United States Patent Application Publication US 2008/0039413 A1 - sequence listing, part 4

SEQ ID NO: 415 - DNA, 77456 bp, Homo sapiens
  misc_feature (1)...(77456): n = A, C, G or T/U
tttctctcttcttccaaatcctataacttgattgcagcttctcctctgggggctgatcgctctcatttcagtgggtcaacaaacctgactttgtcttgcttgtccctgatgattgggctaggatgggtgggtgggtgggtggatggatggatagatggaatgatgaagccaaagcaatgaggtaaactgttaacaaacaaatcagagtagaggatttgtttgtactccagtgtttatatttgtgtaggttatctataagtttaaaattatttccaaattaaaattgtctggtttttttgttttttgtttttgtttatttttaaggtgcacgcctgtagtcccagctactcaggaaactgaggcgggaggattgctttagctcaggaggtcgaggctgcagtgagctatgattgtgccactactgctctccagcctgggcgacagagtgagactctgtctcaaaaaaaaaaaaaaacagaacctgaaaataaatagaaaagaaagaaactaagttggtttggaccagtggttagccacaaagaaattttatattgaattttatattgttaattcagcatatcgacgtttaaattttgaaaagcgtcttaccattttctatgatactaatatttcatacgaacttttttcactttttaaaaagtggttatgatctacccaaggaaatgcacctgttttgaaaaactctcgtctgagagatccaaacgtgagttgaatgttaaggcttcgcgacttggggttttcctacccgtgggcgcgtgacaggactacattttccagagtacctcggggcgaggcctgggtggagaggaggggtctgagctctgattggagactgcggagctccgacctcaccgccaaggcgtggccctcaggcttgcggggaaaggcaggcgaacctcacatgggaggagggggcggggcttgcgaggtgacccgtaggagtcatccggttactgcggaaaaacgtggtgctggtaaggcggtgatgcgcctgctgctcggcctcctgggctttatcgccctgcaagcccgtgcggccgctggttcttcctcctccgtcgaatcatcccaggcctcctgcccttgttctactacttccctgggatcccttaatgcatctattccaatcagctgccgaggcctcccctggtccatggctctggccttgcacactaccagcgctccgcagagagccagggagaggacattggcaaactctggcccgcaggaagtctgggggggcttcctggaggagagagtaggtttcccacgcagaccagagtcaggaatcagcaccgaatgccacatataggcgtgctgttctgatgcataaaccgtccttgcaggcacgccactccccacttcagacctctctctctgcatgcccacagctggccctgtgcttggtatgatagctccaggccctgccagggagacagacattgtctgtcagaccagacagtggcacctaaagtgatgtggaaagccctggaccctacgggaaactagagaaggtgcctcacccagccttggggaggccagggaggaaaagcagccgagatccgactcatctcagggtcccctgcatgatgccacacaagcatcttcattcaaagggctcccatgtgccaggcgatgctggggacagagatagtcataccttgtcctgccctcccccacgcacctggagtgtccctcagcctgtctgatcagggctgggtcaagagaggaacaaggggtttgtggataccaaaggggatccctaaccccgcaaggggctgggggaagggctggttgttggggtgatgtgttatccaattcttggaagtgggtgtttaccctagagaggagggaggatggagatctttgcatatacaaaagcacagtgtcaggagagagtacagagagatgaaggtgaggttgaattgccctggtgaagctcagatctgggaactgcaaagacccctctgtgtctggtactattctagatcaatactgttattatccccacagtacagatggagacactgagaagtagcaaggttatgtctcactcaggttctcccagaagataagtggctgaggtaggattggaacctgggccatctggctctagaatctgggcgggtagccatggtgtaccatgcccaaatactttccagaatggaagctctgccagggcagagacccctctgggaaataatagatactcatcattgtctgcctaatctgacctctggttggctataagatctagggctgcctatccctccccggggaaactgaagctcagcatgagaagaatttctgatggaaggctgactccaggccacacccccactctcctattctgtattcctctggggatgtggggctgagaaatgtctcctgaagggagaagggtgggtgatctcccctctatccaagctgacagtgatggcttgctcctcccatgtgtggatccaatggtgaccctttaggcagtggtgcaatggctgaaggaagggaaggggcagagtggtaaggacagacagggtcacatccccattcctaggctccctgatgtcagggtcacgcccatgatgccaaccttgggggaggtactagggtgatttccaaagagcctctcctctagacagagctggccactatgctgaggccccggctggcggactcctgggtgtcttcactgcccccagggagtaaaggtatgaaaaatggtgagggagagccaggcactgtggctcatgcctgtattcccagccctttgggaggcccaggagggcagattgcttgagctcaggagttcaagaccagcctgagcaacgtggcgaaaaccaacctctataaaaaaatacaaaaattagccaggtgtggtggggcgtgcctgtagtcccagctacttggggggctaaggtgggaggactgcttgaacccagaagattgaggctgcagtaagccatgattgtaccactgcactccagcctgggcgaaagagcaagaccgtgtctcaaaaaaggaaaaaaaaaggtgaggacggaaggtagtgtgtggctcaagttcagccaccaccaaatgcacactgtcctggtctcacctgaacatcccaagagccgcacaaagtaggagggattgtgcccacgttcagatgaaaaacccgaggctcacagaggggaagggactggctcctggcctcattggcaggaagcagaggagggaaaattgggaggaagtctaagcttcagggttgggtgagtccttaagtccatgtctcaatatatcatcccaacaagtccatgaaaccatatcatctggggaaacaaattggacacgccacttaaacaaattaaacgggctctttcctgccggacttgtcagagcctttagccccttcacgtttcccaaatctctttgaccaggaccaagaccaaggcctgggacaactggcaggccctgggtcccaaaggccgagagagagggcacgatggaggtgaaggtgtctacagcgtttgtacgcgtgtactccggccatctgtgcacagaacagatgaccgtgtgtacatatgcacctgtgtttctccatcactccatctggggctcaaatgacatctgtaaaaagcagaacaggcatccaaaggccaggacacgcgcccaaagaccagggtctggcccttcccggcttcccctgcaggagataaagtccaagactgccttcactgcccctcaagtcagattccacaaggatttattggcaccggacctagcctggtgcccgccccttcaaggaaagacactaacaaggaggagtgccggcaccgcaagagccctcccagaagcgcccagactgggggtcggggaggacgctgccattcgtggccaggaagggaagggcgattccggaggagggtgggcacggcgcagggaaaggccgggtggtgggatgggcagggaggcggggtaccggccccgctagaaggggaactcgcagacgtagtagagacgccgctggcagtcgtggtcccaccaggagccgtcgtcagaggcctgcgccacgcagttttcgagcgtgccaccgttgggctggtccgggctgagcggatgcggcgaggcgctgggctgggcgccgagctcggggcggggtgagcgatgccaggcgaagaaggacacgcgctggccgttttcgaagaggtagaggccctcggcgcgccgatcgtgcacgcccagccacacgggccagttgtagggagcgagcgccgcgcgcaggtaccgagtgagcgcctccatctgctggcggtctgccggctgcgccaggctcccgccccgcgccgtgcaccgcgcctgcgccgccgcctgagcttcgaagtcgcgcgagagcaggaagcacttgtggcccaggcgcagccccttcaggcagcctgtgggcggggccgggtagagaaggaggcggggtcatgcattcagagtctggaagggggcgaggacaaaacatccgggggtggagggaggcggggccaggaactcatggggagggctgggaggaggcgtggtcagaaccgcgggagccaggaggtggagagtctggtccgccaggggcggggccaggcggtgggagctggactgtagggggcgtggtgctgccccagtcgggtccgcgcgggtctggagtgcccacccgctccctgcattcagcctcccagctctctaaccccgtccgctagcacacagcagctctcccgaactctcccgccccggacacctagggtcaccttctcaaccagtcccattcctggcccagatagtctcatttttttccaccccgcgcgccgcggactcaccctccaagcggccgtgctcgcgctcggcgcgaccctgcgcctcctgcagggcttgcacggcatcgcgggtgtcgcctgccgcgttccgcagctgccgcagcccctgggtcagctcgaccacgcgggtgtccaacgcgtgcagacggacgtgcagctggtgcaggcctgcgtccaggccggccaggcggcccactgcggacagacagggatcatgctggagggggagcctggagatgcagcggggggcctgaggacctggagaactgggatctagggctcctgagggcggggtggcggtggggggggcaccccggactcctggaaggtagggtcgagtggcccaggcctttaggaggcatggccgtggacctggggctcctaggggtgtgggggctctgggctgggcaatggacaactgaaaggccacttggcagtgaaccgacccttcatttttgcgaaagtgaccgcggcggcctaggagtttgggggtgagggcttctggttactcacggatgtaagtgacgatgtcctcaggggtgggagaggggctggggccggaggatggggttggcgttgcttcctcctcctcttcctccccctggtcctcctccatctcccagtcctcttttccctcaacagttccggcaggattctcatcccccctcccagcaggcagtcctagggcttcctgcagatgctggggcaggggaggggtggtgagccccagcctgccaccaagatgccccattcacccctttccaactcataactcattctctgctgcctgagtcctgtctctgagcccatcaccctcccactcctctgagactatcccaatcgctcctcattgtccatttccctaaccttgcaataccccctcccagacccacagttcaccacccatagctccctgacactccagagctcaccttcagcatcagggcctccctctcccgctcctcctcctgggcacctccccagcctccctcccactccctctctgctccccgagccccatggccaaagcccaagagctgggggaccaccaaagcccccaaaagccaggctgcctgcattaagctggactcttggcacccaaagttccagatgtctggatgtctggggtgggaggggtggcctctgggaactgccgagtgcccctgccctgtgtgcaggtcactagcccccaggttcccgattctcccagcttctctcttcctgttcctctcctcgtctctgtccggtccgttggtctcctctgcttctctctgtgtgtctctccccgcccctcttggctccccggaggccctgcctctgtggccggaaacctccaacgttccaaagcctagatcccgccttgggtctcctcgcacaccctcctctttccactttccagagctcgcttccgccctgctctttccttctgctgtagcccaaagatcagataatcaggaagaggatggagctggctctccaaggaatcttggaaaacacaggccccggcctcagcccaggaacccgctcagaaccatctcggcagtggtgggatgctgggaccgagcactgctcccttcttccctgcctggccattcctaaggaggggcagacctcaggatctcgctgaggttgttattaccctgtggccaccatcgcctgcacactcaatggaggagactccagggcccctcctgccccctagattgcccatcctaccctccaagcccttgtctggagatccaagtgagtgtgtgtgggggcagggtgacacatgtgaagagcacgcgtgtgactgtgtgcatgaccctggaagacggggctcggggattaattggccactttactagaagcctcctgcaggccaggctgtgggctgggtgatgctggggactccagctgcttgcagaccagcagccagatagctccggggatgagggggctggagatgggagagggtgaggagtctggcggagcagtcagggaaggtttctccaggaggtgaaatcgacagacgctaggttgtgtgctcaaggagctctgagcattcagcaagccacctcatttcagcctggaccactgcagtctcgccctccccctccttcctcctgagcccctccaatcccggctgcttgccgcagccaaagcaatccttccaaaccataaatcagatcacatcactccccactcccctgctcccccaccttcccatcataagcaggagggaagccaagcccgggcctcagtcctcagcgcagcctaccatgctgggggctgggaaggaagaaccctttgcacctctgcagcctcatcacccccactcccttcacccacccccagcctccaccttccctggcctcttggctcatccccaaatactaagctgattacaacctcagagcatttgcactagccctttcctccttctagaagcctctttccccagctccttctcatcatcgaggtctcagctccaggaggtcttccccaaccaccttatctattccgcaagttactttattaaaatgccccatttcatctttttggtataatcaagactggcatgatcttgtttgtttatgtctgttccctgccaatgaaagcagggatttttatgcactgatgcatctcctagcacaaggcctacctagcacatagtaggtgttcaatcaacctgttgagtgggcgagagggtagccgttcctggtggggtcaaaggcctggaagcttcacctctttggtttgctggcacccaagttcccagggtggtggtggcagggtaggtagaggtggtgagggcagtgggagagaggcttggaggcaaggaagaacaatgccatgccatgcccctctatgtcaggcccatgagtcatgcagggcttttcccgcccaggcctggctggtggtgccaacaagcatggggcacaccagccaaggatcactgggcctgctcttcaaaggaggagaccgaggctctgaaacagcatagcctgctggaggtcaccagtgtggcggcagctagccaaggtttctggctccaagagcagggcatctgccctcggctgccgggagccccaggaggggccttggaaatcagtgcctccagccttccgttttccaagaaatcctggtacatcgagggcactgtgaccttgggcagactgctccctgcctcagagcctgggcctctcaggtgcccatcgggaacctggggcccctcaccaggagctacagacctcaagaaataatgcgtatgtggggaaaggccttgtaaagtgtgcaggggtgcacagcctctctggctgctggagccaacatgggcagctgtgctttccccgggcccagctgctcaccacctgggctagtgggtacgcatcaagatagaggcctccccaggctgagcaggcacctcctccagctcatactcgggtaccccggagagcctgcagctggaggggaacccagaagctgcctagaactgccccctgcaggccctggaggtgctgttggagctgggagaatgaggaagcctgggctaaggggacactcaccactcactgctgccctatgggatctgctctgtccctgtgggtgcgtcccaggcatgaatgagctgtctgcctgcagctggctgcatatgcgtgcctacacagacatgtgcaaactctgaggagacggttgggtgtgtctgtgtgtgatgaataaggatatgcaactatgaggggatatgcccagtagtgcaccatagttgtcaagtgaggactttggagccagcctacctgttcctgatccttgttaccacctccttacagctggatgaccttgggcaagttacttagcctctctgttccttggtttccccctctggaaaatggggatggcgaaagtccctgagcctggcacacagaaagtgctccaggaatgtcagcagtaactatcctggaggggaaggatggcacggtgttgggcatgtaaacgggtgagtgcgagccagtgcaatggacagcacggtgggtgggtgtgatgggaaggcgtgcacacgtctctacagtgctgtaactccgttttggtgttgagagatctgggcatgcataccggggtgaacgcctgtgtgcgtgtgtgcgcgcgcacgtgcgtgtgtggtgggcaaatgtgtgcatgtgctgcgtgtgtgcccgggcacaggggtgtgacaactgcatgtagctgggtgtgtttgtagctgtgtaccccaggtgcattgtgtctgggcatgcatgcgctggagagtgtgtgtatgtggggactctgcaggtgccgttacagctggtgactatgcacctgtgccttggggaaatgtggcctggcccaggtatgtccacgtgtgccctgacccagtgcttaaatggaaagggtgtgtgtgtgtttggggggacagggtgggaatctatagccttcacacttaaatttgggggtgtagagtctggcaacaaatatttattgtgccccactctgtgtagggcggcggggagctctctgggagggggtggtcctgaggtgtgtgggggggggcaccttatgggggcaggaccccttcctcggggtatgggagcaagcaggggcggagtcaggatttggggactcggaggtggggaggagtggtgggggagggnnnnnnnnnnnnnnnnnnnnnnnnnnnnnnnnnnnnnnnnnnnnnnnnnnnnnnnnnnnnnnnnnnnnnnnnnnnnnnnnnnnnnnnnnnnnnnnnnnnnnnnnnnnnnnnnnnnnnnnnnnnnnnnnnnnnnnnnnnnnnnnnnnnnnnnnnnnnnnnnnnnnnnnnnnnnnnnnnnnnnnnnnnnnnnnnnnnnnnnnnnnnnnnnnnnnnnnnnnnnnnnnnnnnnnnnnnnnnnnnnnnnnnnnnnnnnnnnnnnnnnnnnnnnnnnnnnnnnnnnnnnnnnnnnnnnnnnnnnnnnnnnnnnnnnnnnnnnnnnnnnnnnnnnnnnnnnnnnnnnnnnnnnnnnnnnnnnnnnnnnnnnnnnnnnnnnnnnnnnnnnnnnnnnnnnnnnnnnnnnnnnnnnnnnnnnnnnnnnnnnnnnnnnnnnnnnnnnnnnnnnnnnnnnnnnnnnnnnnnnnnnnnnnnnnnnnnnnnnnnnnnnnnnnnnnnnnnnnnncgggcgccgccgaccgggactcagcagccccgccaggcaggtaagggggtcgagaacctgggggtttggggcagctgcggggccggggccgcgggcaggggcgagggcgccccggatgtccttggcccggcgccgggctcctggcctgggtgtgcggctgggggtacgggtgaggtggggagcgttgccctgggcgacaccaaattgggttacgcccgggtccccggtgccccgtcccagatcgcatccttgatgggagggcgcgccccccacccccggccagcagagcccctatcccgaacccgcctcccggctctccggggccaagggctcggtcctggtacccgcctccccgcccagcccggccactcccccgcctcgccctccctggcgtacctgggcccctccgccaggtcaccctggtccccactcccctccagcgagggtctaggcccgggcctcctccgcccctttcgacccctccagctcccgcttctccttccaggctcctccagtccctttccacccctgtccaagctccctgcgtccccaccaggtctccagtccctacaccgccggccggcgcgccccctcggctcccgcccccgactcctgctccccggtgccccccgcccctctccccggccgggttctcccccaccagtttcccagcctcggctccggctctctctccccgcccctccccgcctccctccgcctccattcattctccccggccccgctctcggccacgccagccgccccctgtccccccacagcctcccagggcaccccctctctcgcgtcctccaccacccccctcgccgattcctcagcccgtctcggtaccagctgcgtgccagctattcttagccgcggagcgtttgattcatgccgcccggcggagcgtgcccgctccctcccgcgagccctgagggggaggggccggagccggcccgggggggctggggcagccgtacgcgcggggggccctagccagcttttctttcatcccaccggccaccccctccgagcggggttgaggctgggggtcagccagggtcagccgagggggagtgtctgcgggccccagatcgcgaggtgggctgtgcggcggggcagggaggaggcagccggggtctccgcagggacgaggtggggcggcgtggctgggtacctggagggggagggggcttcgcagcgctgccgcgcgtgggggaggggtccgccggccctgggttagaggctcgctcgcccacacctcctggaactctcctcccaccacacacatttagtcttccctttcccaaccccccagcccatccccactcccccaaagtcagcagtaccctccactgcttcccatctccatggcaacggtgcaggaaccgggcctggtgttggggggagggaccagaccagacattctggtttccggtgctggggtgggagttgggggagaacagaagggaggcggaccccatttggaaggggctccaccctcataaggccacctcaagggagaacagcaaggatctagagatgatcccccactcagttccccagaccctcctctcacttcttagcctccctcctaacacccccagtcctcagagtggagcccctagtacccagcaagccagcccacccaccctgcagtcctagaaaagagctacaggtcatctgcagccacccacatctacccgggccaccacaccactgtcacctggacagcactccccaggccgacctccccacctacccgcacaccctctcaagatgccccagtctccaaaagccacctcttgtggttcccttggggacaccctaggccaaatgctctgcccatgacacccccatctcagtgccccttgctcccctgggacggcagattccccagcactattcggcatgccacgcgttgtcagccacacttgagtgaagtcaccagctccacccgctccaggctcaccacacctccctctcccccttactacatctcagtgtcagcctcagcttctccccaaccccaccccccggccctgggatgaggggccaggctggggccaggagggcaggatgcctgtcagtttgtccacctgtctgtccttagctaattttagctgcattttctgtggcctggcaaagtgggccagtagctcccgcggtgattctgcggtttctgggacacggccacgctgggtcaccagcaaagtggggcgcagggggcgggctgcaagcggggccaagggcagggaaggagacacatgccagaagcatgtcagggacaggggtgtgtgcgtgccagcgtgggaggaggcggcaggggaggccgtgcaggccgagggtgtgtccagcctccttcctgcctatcttgggcagtgggggtaggctgcccttgaccgcttgaccaccgaatagcgcctgcggcctctgaggggtcccgggctcctagtctgatggccgcccttggcccctgcagccgcctgtgatgctgccgtcccccgtcgccccgtggccccacaatgacccacagccccgcgacaagcgaggacgaggaacgccacagtgccagcgagtgtcccgaggggggctcagagtccgacagctccccagacgggccaggtcgaggcccccgggggacccggggccagggcagtggggcacctggtagcctggcctctgttagaggcctccagggccgctcaatgtccgtcccagacgacgcccacttcagcatgatggtcttcaggattggcatcccggacctgcaccagacagtgagtacctgcccactggccagcggcaggagagggacagtgccccaaccgacatggggagtccactggtgctgggtatcctcccaggaatcacccccacactcagctcctggctcacttcccaacccacctcaggctctcctctggcccctggcccaccctagcccctatctcttccccaaccagaaatgccttcgcttcaaccccgatgccaccatctggacggccaagcagcaggtgctctgtgccctgagcgagagcctgcaggatgtgctcaactatggcctgttccaaccggccacctccggccgcgatgccaacttcctggaggaggagaggctgctgcgggagtacccccagtcctttgagaagggggtcccctacctggaggtgaagcttccccaactccttcactgataagagaaggcatgccctaaaacacatctgccccccacccactttttaacacactcgaaaccttaacgagggggcacccagtgtgcgagtccagaccttctaagcatcacagggaagtcagagagtcctgagttcaaattaccatctgttctgcttctgaccagctaagtggccttggccaagtcactttcctgccccaagcttctcctcacccatcaaattgggggaggattcccaattacagtaggcactctagaacattccctgtggggtccagactcctcctccttcaaggcaggggttgcagtgcacatataccataatacccagcactgtcggaaaagccactgccacccatctaccgcctagaccaaggttccagggctgttttcactcccaccctgagctaccccggggaattagaaggggatcagaccttcccctaccccaagccttctccccaggcccctgattccaagtctctgtgtctctctcactaccctacccttgacctcagttccgatacaagacccgagtttacaaacagaccaacctggatgagaagcagctggccaagttgcacacgaaggtgagaaaaccctgctggcatctatcccctatagccccctaccactggagccccctacccaaccactttctctccccacctcttcccaatagacctccacattccccaagccagcgatccctctggccactgcccccgcttaacttgggatgctgtaccacatttgagacaaccacaaataccccccattatccccatcacaaccccttcttactttcctcttttgcccttcatccctctgcctgggcccacatcattcccacctggcctcctttgagtctcccttctcttcccctgcctccccccatatccatccaaggcctctttacttccccaccttggcctaggaccctgacactgaaggtccttctgcctagagtctatttcaaagacaggctacatttctcccaacctcatagcctgaatctctgcaaaatccaaccattacacccccctttccagccatatctgtcctcctggtaccttgcccgccagtcctcagcccctgtctgtcctgtgtctcgatggtgagagctgggaggaaatcgggaactgctttggtcagaaatgaagaactcttgatccttgagaaggaaaaactcccagtccctccttgtctaccctctccccaccacagcatgcattgaactctttcctcccctaaatgttccatccctccagactttcacggtccactttgggaaccactggccaagtgtggctcctgagtgcttgcagtgtgtttggtcccaactaagactcgctgtgagtgtgaaatacacactgggtttcaaagacttagtaccaaaaaaaagttaaataacctcattaataattttcatctcaattacctgttgaaacagtaacattgtagctatatcagttaaataacatatatcattaacacgaatttcaacacaactaacacttcacccccaaccaccctgatttttttttttttttttttttgagacggggtcttgctctgtcacccgggctgcagtggtgcaatcatggctcactgcagcctcaacctttcagggttcaaaggatccttccagctcagcctcccgagtagctgggactacaggcgtgtgccaccacaacctggctagttttttgcattttttgtagagataagggtctcactttgttgctcaggctggtctcgaacccctgggcccaagtgatcctcccgcctcggcctcccaaagggctgggtattttctctgtaaaggaggctgctagaagcttttcaatggcgtatgtgactccacgtatattttcactggacgtcgctgcttgaggaccctgcttctctgccttgctcctgactgtcctgtcttctctctctttgcccatggctcagacggggttgaagaagttcctggagtatgtgcagctcgggacatctgacaaggtggcgcggctgctggacaaggggctggaccccaattaccatgactcggattcgggaggtagggaggggtgcgcatcaggaggacctcagggccaggacagagctggggagcaggggtgccatctgcattcacatccattcctgactggtgtctcccaaacacattgctgtccaagggggaggccacggggccagaggctgtggggtggagagctgcagagcctggaaaatgggaagggatggaggggaggagaaggggcttcatgtgaccagcttttcccgcccttcagagacccccttgacactggcggcccagaccgaaggctctgtagaggtgattcgaaccctgtgcctgggcggggcccacattgacttccgggcccgggatggcatgaccgcactgcataaggccgcatgcgcccgacactgcctggcactcacggtgaggcttcggggaccccccatccccgccatggggccctctctccttttccctttgttctttctcaaacctcagttctttggtttcagttaaaaataggccctctcatgtccccagttcaaagcccctttccatagactgagacacagcccctattgtcacccttgtcaggccccccagatgcacccacctgggctatagctgacatcacacagacccgggcacggcctcctcccctaaacacccagaacgtctccatcccctgtggcccagcttaataccaaatctgcctctgtctccccaaggtgtaaacccttctcattccttaaaatacgaagtgagctccctgctatgcccccagatagagcccctccacacacaccctgaaaacagccccccagctacccttccaaaccagcactgcaccagctcccctccctcctctctcacatgcaaatacagccccttccccacgtacacagcctcaaatgcactttcccaaatagacaaacccatacacccacaaaatacatacacagcggcagctgcacagtctaattttaaaatactcttctccccctgcccccgccaggacacctgattgctcttcacatgagggtcaggatgggctgcccccaaagacagccattgagaagcaccccgacgcacagctgctccagctaaacggcccctcccttctctccctcagatgctttcctgaagagcccctaatgcagtcagatgccagccacaaagatctgcagtatacccctggagttaacagatcctcttcatgtatctcccatgcacactcacccccaaacccacatcctgctcacacacgcccctcccagcctccagacctgcgctatccaagccagtagccactggccacctggggctgtttaaatttaaattaaatagaatgaagtaaaattaaaatttcagttcctcaggctcactagccacgttcaagtgctcaggggcccacacgtgcctgccatatagggtggtgcagttgcagaccatccccatgatgggggaaacgttctgttgggtggcactgctacaggctgtcctcacacgaggttgctgccaagactttctcctattaatgttcattattgccagccttccacacccagagctgtccttcaagtgggggcaggaagtggcctccagccccagtgaggccggcccgatccttgcccttacccaagcttacctgtcccctggcttcctgctgtgccccttctttgagatcctggacctaataacacctcccacttggtcagagaccctccagcatccagactctgtcctctcacttgtccccaacaacccacctgtaggaagtggaatgggtgggtactgtggcccctaatgtctttcaatggctcatccaagatcgcccccagggggaaggctgggtgggatgtcagagtgcaagtgtcctctggaggcatctacccaagtcccacattgttcacacggaatcagagtggcccagggagggaaagggccaggctcaaggttgcacaagggcatcacggcagaactgagactgtcattggccactgtaggtcacccaggacggtccagtccccctggcccttcagaatgagctggttaatgtgtgactgtcatctgtgtttttctactgggttctctctccgttcctaggcgctcctggaccttgggggttcccccaactacaaggaccgtcgggggctgacccctctgttccacacggccatggtgggtggtgacccccgatgctgcgagctgctcctgttcaacagggcccagctgggcatagctgatgagaacggctggcaggaaatccaccaggtgctcctgattcaggccatgaagggctggggtgggggacccagtccctgaggcatccaaggggctggggctgggaaccagatgccagggtcctcacagagcatgggggtgagaataacatggtccccaaagaggaaatggtgggggtgaaggcagaaagaccctaagggggcataggctggggaacctgatgccttgacccctgagagggatgggctgtcctcttgacccccttaaggaggcagaccagacgcctgggccttggaatgactgaacatttgggttttgaggctgacagcctgggtcccagagcaggaagcggggctaaaaggtgatggggaggtggatgcggtgaacgataggatgagaaggccagtgcacaggtcatagacagactcttggcccagagggagaacagcctgggtctgatccatgcccctcgctccctgtcctgcccaggcctgccagcggggtcactctcagcacctggagcatctgcttttctacggggctgagcctggagcccagaacgcctcggggaacacggctctgcacatctgcgccctctacaacaaggtctgcctagcagcggccaccccaggcccctcacatccccgatagccgcctcccccagggccaagctcagacactcctcttgactgcatctctgcaccctccacttcttcactatttccaccctttcatccagtcattcctccattcattcctccatccatccatccatccatccatccatccatccaacagatatttactgagctcctctgtatcaggcctggagctgggtgctggggacaaagtgttgagctcatggcctagcagagggcagacaacatagtttgctgctacagtccagagtgctcagagcaaagtcacagggaatccagatccctgcgggagcccacatctgggactgggcttgggatggagtggctgggggtgaaggtggcttcctggaggaggtgcccccagtgttaagatgagcaggagtagaaaagaggagaaaggggtgctccagggtgggggcacagcctgtgcagaaagccagaggaaagggggctgtgggtcctcagttcccctgtgtctgcattcagccagtggtgtgtgcaggtgccacgtggcggcacggcagggcacaggggaaaggccaacgtgcagcccccgtggcccctgaagggaatgacagtgggatgggagttttagcaattcaggaccttgggggtcctgacaacctgggtccctgagcaggaagggagtgctgaagggagatgggaagaacacccccacttctggagttcctaggagaggagaggtacggagcaggcaggggggctcgtggcagctggttggcaagagccgggtctttcaatgtcatgacctctggtactttagccacctgagctgcagatgatcctgggcaggtcagccccatggaaagcctcaatctccccacctgtttcttgatgcttcctgcccttgaagggcagctggtgggggtacttagagagacaggcgctagcatgacagagctggtctgtcagcccccttcctccaggaagtcttccaaaacagccctcagccccctctgcctcggcagaacttgcagtgctggggatttggcgggtggccacgtgccgccttgtggcagccagcagtatgcctggagcccagggaagactcagtgtttgtcaaaccgaaccaacatggtgccggcacttctctccccacgtgctcctgtctcctgctctgcgacacaggcctcacaaccaatcctctgactcccaggccctcgtgcagctgatggggaagaagccctggccccacaggcagatgggggtggggagcaaacaagtccctccccctctttgaggctccatccttcttcctgaaatgggaataacgccagctcttattgacgagggtgagccatcgtgtatactaagtgctcatccctggaaggcagccatcagaataataattgtcattgttaccatcaccagtgtcagtcagggtccagtcgagagacagaaactgtaccgttcagataaacagagaaattttggtatagagaattagaccaggcacggtggctcatgcctgtaatcccaacactttgggaggctaaggcaggaggatggcttgagcccaggagttcgagaccagcctgggcaacgtgggaaaacctggtctctatgaaaaaatacaaaaattagctgggcacagtggcatgcacctgaagtcccagctgctcgggcagctgaggcagaaggattgcttgagcctgggaggtggaggctgcagtgagctatgatcatgccactgcactccagcctgggtgacagagtgagaccctgccttaaaaaaaaaaattagaattagacagcaggcagagttttcttagtgggacagttgcacaagtcattttcccctccttgatctcctttctcagctgtgaaatgggtcaataattaatatctaccatgcaggccgggcgcagtggctcacgcctgtaattccagcactttgggaggccgaggcgggcggatcactaggtcaggagattgagaccatcctggctaacacgctgaaatcccgtctctactaaaaatgcaaaaaaaagttagccaggcgtggtggcgggcgcctgtagtcccagctactcgggaggctgaggcaggagaatggcgtgaacccgggaggcggagtttgcagtgagccaagatcatgccactgcactccagcctgggtgatagagcgagactccgtctcaaaaaaataaataaataaatatctaccatgcaaaaggatcaagtgggttaataggtttgcttgcctttgccatgggcttaacaaaccgatgcataacacatacgaacttgattcctccatttccccccttgtcttcctcccaggctttaagctttccaagagccagggctgagtctgacagtttttcctcagcctctgccgccttggcctcctgatatgcccgtctagcatttggtggtgaatgtcagatccgtgtctaggctgtgagcacctcaagggtgggggttgagtctgattacttgctctgttccaggaccccagcaaacagcaggcctagttccatctttgttgagtgagtgaatgaatgaatgaaaatgagtgaatgaatgatggggtcagccctcttggatttccaccaagactgtgcacagtgcctggctcagagcattcaacaggtgtttgcttgtttcaacagactgaatgactcaaccaatgaatgaatgactcgaacaaatgaattttgactgactcaaccccacatcctccatcctcatcctttccatgcacgttccttgagcacctactatgtgcacagcaccaggccttggggatgtgagatgaatcagacacagcatctggcctggggagggcgagggcggggttggggggggtgggagttcacagtctggtgaggaggcagacgtgtaagcaaatcatggctacgacatgagataagtgctaggatgccgttaaatgcgagtttctcttggtgcccaggggagggagccatcaactctgacttgcacaccttctcagctttgtaagagtaggatgaggagcaggtgaccttaggggctgtgctctggccctgtgcccccagtgtgggtgttggggctgtgaaaacatgcaaaaagccaggcgcggtgcctcacacctgtaatcccagcactttgggaggctgaagcaggcggatcacgaggtcaggagttcaagacaagtctggccaagatggtgaaaccctgtctctactaaaaagacaaaaattagccgggcatggtggcgggcacctgtaatcccagctacttgggaggctgaggcagagaattgcctgaactcaggaagcagaggttgtagtgagctgagatcgcgccattgcactccagcctgggtaacagagtgagactccatctcaaaagaaaagaaaagaaaagaaaagaaaagaaaagaaaagaaaagaaaagaaaagaaaaacacgcaaaagtacacatggcaggagttaacagtctagttggccagcagcacgggcatacacagactcacatgcacacacacactcccaaacacacccagaacacacactgggctaactctgctgcccgatgtgtgactttggcagtcagagtcgtccattcataggagataggtgaaccataggatcagaaggccaggtgcacaggaggattgcttgagcccaaaaggtggaggctgcagtgagccgagatcacgccactgcactccagcctggcaacagagcgagactctgtctcaaaaaaaaaaaaaaggaagaagaaggccaggttgttggaatcctaactgctccactaactggttgtgcggccctgggcgtagcatctgccctctctgaacctgtcctgtaacataggcccatacaaaccccttggtggatttgtcatgtggaaggggtaagatcaaggaggtgcttgggaaatggtggttaaattagcatcagagggcgctggggtagagttgagctggaggccaagttgggtttggccaggccaagataaaagggagaggacactccttctaccgaatagtccctgtgggtccagcattaatccaggtggtgggtgccacaggcaaaatcacgcccctgtacaacttatggtgtagaggagaagagacactactgagacaaataacaggaaatggaatttcagtgagacggggttacgaagaaaatgagttaacattggcttagagtgcctggcacatacatcagtgtggtactaaaaaataaagcaaagggttgagcacggtggctcatgcctgttatcccagcactttgggaagccaaggcaggcggatcacctgaggttgggagttcgagaccagcctggacaacatggggaaaccctgtctctactaaaaatacaaaaattagccagacatggtggtgggtgcctgtaatctcagctacttgggaggctgaggcaggagaatcgcttgaacctgggaggcagaggttgcagtgagccgagatcgtgtcactgcactccagcctgggtgacaagagcgaaactccatctcaaaaaaattttaaaaataaataaataaataaaaataaagcaaggaagaggacaagggttttttttttagacaggatggccagagaagacctctctgaagaggcggcatttgtgcaaaagcctgaacgaagtgaggaagcaagctatgctgagatctagcgggaaaggattccaagcagagggagcagccgtgcaaaggtcctggggcattagtgtgctgtcagaggaaggaggtggccagtgtggctgcagcctgggagcaagggcaggtggtagaagatgaagttggtgagggtcagggtggggagtggcagggcaggcagctcaggttagctcagctaaccctaaccctcctaggccgtggcatggactttgtgcttagcccaaaaagtgatgatgggtgccatgtgattgacaccggtgagaaattgatctgaatgtagaaggcatccctgtccccactggcccagtcctgcccccaccctttcctccacaatgtgtgtccccttccttctgggcctggcagaaagtgtgattaagatagaagactttggagtcagagagatctgggttcgaatccaaggctgataatcaccagctgtgtgaccttgagcccccccaacccccccttttttttgagacagggtctcactttgtcacccagactggagtgcagtggcatgaacaaggatctttgcagcctcgacctcttgggctcaagtgatcctctcacctcagccccacaagtagttgggactacaggcgtgtgccaccaagccaggctaattttttaaaattttctgtacagacggggtttcgccatgttgcccaggctggtctcaaactcctgggctcaagcgatcctccctcctcggcttcccaaagtgctgggattacaggagtgagccaccacccctggcccaccttgggctcttttgaaagccttagtttcctcctctgtaaaatagagacaatttccatgtcctggaattgttgggcaattcaatgagcttctgcctctaaagtgccaagcgcctggcacgtaacatggtaagcctccgtaaggtctagacctgtggttctcaacctgggagcttctgtctcccaggggacacttggcaatgtctagagacatttttggttgtcatgactggggaggggagtgctactggcatctagtggtagagaccggggatgctactcaacatcccacagggctcagaacaccctccacaaaccaatgaatcaccaaaggattatccggccccaacatccagtggaacatagcatgagcacataccctaaatgccctcaaatatcctagtggccatgttaaagagaaggggaaaataattaggtgacatttattttaacaacatattttacttataacagtgtatctaaaacattatcatttcaacatagaatcaatacagaaattattatttttttttgagacagagtctcactctgtcacccaggctggagtgcagtggcaggatctcggctcactgcaacctccacctcctgggttcaagtgattctcccacctcagcctcctgagtagctgggattacacacgcccaccaccacgcctggctaatttttgtattttctgatagagacggggtttcaccatgttggccaggctgggctcaaatacctggcctcaagtgatccactcacctcagccttccaaagtgctgggattacaggtgtgtgtcaccacacctgacattttttttttctgggggggagacaggtccctgctctgtcactcaggcttgatctcagctcactgcagcctccaactcctgagctcaagcgatcctcccacctcagcctcccaagtattcgggactccaggcacccaccacctgcctggctaatttctgtttatttttttgtagagacggggggcgtctcactatgtcacccaggctggtctggaactcctgccttggcctcccacagtcttaggattacaggcttgagccaccacgcctggctatagacatttaaattctttcttgttttcatatggcatatccttgaaatccagtgtgtagttcgcatgcatggtgcatctccgtttgggccggccacgtttaaactaaagtgctcctggtccgtacctggcaggtggctgctgtcctcagtggtgcgggtttagggtggagtatttattcctgaggctcttagcacagaacctgcatccactcatggtgatcttaattttttctctctctctttgtcctgtgccactggccattacccgcaggagacctgtgccaggatcctcctgtatcgaggtgccgacaaggatgtgaagaacaacaacggacagacccccttccaggtctggggctgcaggggatgtgctggagtttccagggctaaggaaagggtgacagtgacacccagtggataaggaaggggacaatgaggaaagcaaggagacaggccgtggagggggagctggaagaagacagagggcggcattgtcggagtggaaggtttgggtcgggccagggacctcgccacgttccctgccctctctctgctgcctgggcccccctggccgacctgcctctaccccctccctccaggtggcagtgattgctgggaattttgagctgggggagctgatccgaaaccaccgagaacaggatgtgggtgagtgacagggagctcggactgcacagagaacctggggcggttgaggtttcatggtgggatgggggagttgggggacctgacttgggggccaggataggatggagaaaaccctagaggaccaaaaatgtctggatggtggtgggggagcaattccaggcccccctccctttctcatctctgtctttctccctcatgcctctctcccaccatctcttgcccccgcatggccccctgcttgccttttctcccctaacatctgccccccgccgccactgtgccctctcagtgcccttccaggagtcccccaagtacgcggcccggcgacgggggcccccaggcacagggctgacggtgcccccggcgctgctgcgggccaacagtgacaccagcatggcgctgcccgactggatggtgttctccgccccgggggccgcgtcctctggggcccctggccctacctcagggtcccagggccagtcgcagccctcggcccccaccaccaagctcagcagcgggaccctccgaagtgccagcagcccccggggtgccagggcccgctctccatcccgagggaggcaccctgaggacgccaagaggcagccccgaggccggcccaggtaggggaggcagccctggctccacagtccccagccccgtcaaatcccctctccagatcggcggcttcccccgaggccagcccagctgccttcctctgtaggccctcatccaagtccctagtgtcaccttggggtaaagcaaggccttgggagctactgtcccgactccacccccggtgcaccacatgttagctggatgtctgctccaggacaggggccccaggcagagggtaccccaaagaaacatgggccccagcccctggggacagacagaatgacagggtgaggtggagggaagctgaacaggaagaggatggggggggtggcagggacttgagggggacagagaggtcactctggagggaggatgaggagggggcgggggacattccggggtcaggaagcccacctggctagaggagggtgagaaggaggcgaaggccagccaggcgtgtcccgaggaagtgggggagaggctggcaacggcgggcagaggagttggacctgacccaggaggaagctgggagtcgcggaaggctcgtgagcggagggatgacacagtcccagctcagcctcaggaagctgaatcaggcggtgcgcgcaggaccgtgggagggggcagagccggaagccaggaggcaggagagggggctggttggggcagctgcgggcaggcagagggagcccccaaatgccctcttccttggaggacgccagtgctgggaaaccccccctcccccctgatgcaccgtcctcttcccccacccaaggacccctgtcctcccagaggtgtcccctccctccaccctcccctcctctcatgccctctgtgtacgcagctccagcgggacaccccgggaagggccagccgggggcacggggggctcagggggccccgggggctccctgggcagccgcgggaggcggaggaagctctactcagcggtacccggacgctccttcatggctgtgaagtcctaccaggcccaagccgagggggagatctccctgagcaagggcgagaagatcaaaggtacccagggtggaagcagggcctgggctgggctgggctgtgggggcgatcagggaaaatgtggagcagagagcagaccattctcgggcacctggagtatctcatgcactctggagacctcagagagccccaggacaccccttgaggcttggaggaccatagagtgtagctcagatgaccctgtcaggaggcagtgaagtgagccgtgtcccactgcgggacactgatgccgtgtgcagggcatggctggaacttctcaccaaatcgtctcattagactcctgatggccctttctggggagggaggtcatgggccccattgcatggttgaaggaacagaacctcacacaggtgaagccacttgcccaaggtcctcagtccaagcccacagtccttcctgccacctggtgcagagcgtgaggccgagcagccttaactttgcctcctgcatctgtccaggggtcctcaactgagagacaggcagggacctacttctagggccccgacgagctggcagatataagatgtttggccgtggcgagggttcccaaaatggtggtgctgttatcagggttcacctccctttggtttttccaccttcatctggaaagtggagccagtctcccctgcttataggctttgcagggctgctgacgtgttcttggatagaaggatgctttagagaccaccacgtgccgcaggtgtggccgttaatacgaggcattggaacaattctttgccagactctaggctgcccaggagctgagcggtatagaggttgagagcctggcagcctgggttcaaatccagaccccaccacttcctagcagggtgacctcagccaagtgatttctctgggcctcagtttcttcatctgtaaaatgggactttgatgaggattggaggagtcagatcatgtaaagtacttagaccaatgtttcctacataacaagtgccatataagagccatcatttggccggacaaggtggctcacacctgtaatcccagcactttcggaggccgaggagggtggatcacctgagatcaggagtttgagaccagcctggccaacatggtgaatccccatctctactaaaaatacaaaaaaaaaaaaaaaattagccaggtgtggtggcacgcacttgtaatcccagctacttgagaggccgaggcaggaaaattgcttgaacccgggaggcggaggttgcagtgagccaagatcacacctggctgacaagagtgaaactccatctcaaaaaaaaaaaaaaaaaagccatcattttcctaagtggcccctacttcaggcacttagaggagagagacctgggcccctgaataagcagggaggatcctaccatagaaggtcaacttgagtgaggccttgaagggtattcgggggtcagaacatcaggtgggctgtgtaactgcatgtgtttcctagtctctcttcccatagcctgagttcctgtaggtgaggtcataagtcactggtctctgggtctctagggctcagtttaatgacccagcacacaggaggctttaatgcacatatgttgagtgaatgaatgatcaaattcaggagctactgtgggggccaggtgcagctccttcagggccagctgcctgggatgtaggcacgtggggttgggggagatgggagaaaagaaaggtgagctgaggccagaggtaaaggaccttccgggcaggcagaggaccatgggcagtatcttgctgagctacaagctcaatgcttctacgcagggagagaacacactgccttctgtttttatatcctcgtcttccattaagagggacttaattgcctcaaagcacacccacatccacgatgtcactgagcttcacacagcctgatgagggagctgactcctgctactctcagaatcacagcccagagtcttcacctggcctccaagctgcctctctgcccaccttgtcaacctcatctcatgcgactcttcctttcacccacaaggttccagggacctcatcctactctccagtcctccaatgccccaagccctccaattctccaatgccccaagtcctccaatctcccaatgccctgagctctccaatcctcctatgccccgagccctccaatcctccaatgccccgagcccttcaatcctccaatgccccgagccctccatcctccaatgccccgagtcctccactctcccaatgccccgagccctccaattctccaatgccccaaaccctctaatcctccaatgccccgagtcctccaatctcccaatgccccaagccctccaatcttccagtgcccgagccttccaacccgagccttccaaccctccaatgccccgagccctccaatcccccaatgccccgatccttccaatcctccaatgccccgatccctccaatcctccaatgccccgagccctccaatcctccaatgccccgagccctccaatcctccaatgccccgagccctccaatcctccaatgccccgagccctccaatcctccaatgccccgagccctccaatcctccaatgccccaaaccctctaatcctctaatgccccaatccctccaatctcccaaagccccaagccctccattcccccaatggcccaagccatccaatcctcccagtgcccaagccttccagttccccagtgctaccaacccctccattcctccaatgccccaagccttccaatcccccaatgccctgagccctccaattctccagtcctccgatataccaacccctccattcctccaatgtcccaagctttcttgtacaccaaactcttcaaacatgctggtccttctgcctggaactcttccatgctctctttgcctccccagctcctaggatccttcaggtctcaacctatgtgtcacacctcagggacacctccctggacccctttgccattataagttatatactcccatctggcttctctccaaacaccctcttattttcccttgagctctgaccccaacttccaatcatacagtcacttgtatagttatgcctctattggccactgctctggaagctcctcaaaggaaggaacaacattgattatattcaacagtgtctaccctggtacctgactcatgactggcactaactaaatatttttacagtgaacaaatgattgattacaagaccaccaagccaggcatggcagtaccagccaagaacccagtccccttgacaacccatctcctgctctcttccatgactttcagcttcccctcatttggtctccccagatgctctcaagggaggcagtttgtggaggggaatacatctgatggccccaactcaacccctagcatagctggagccatctccaggcaagggttttctccacattcgcttcagcttctttgtctataaaatggaaaaacagttgttacctacctgggtaggcacaagggttgaacgaggaaggaaactatgtgaagggctgaatgggggcagagtcatgaaaaatgccggagaaatggaagaccatgtgtttgccactggtgcccttgtcatgcactgaagccgttgcatggagaggtagcgcacatgagtgactgaaagtatgccctctggaagcagactgagctgtgttcaaatccagatctgtcagttactagccttgtaaccttcagcaaatgatcttggctctccaagcctcagtgttcctatcagtaaaagggggataatgaaagtggcccctcttagggttctggcccaggtgagagttggatacgcattagctgttcttgtcatatatctctgtttttcagcagcaggcatgtaacaggcagtctgtgatgtttgctaaatggggaagcggtggggcctgggagggtgggcagggggaagccgcttccattaggggagagggagagaaggaaagaggtgatgctaatctcttttcccttctagagccaggagaggccgagagagacagagacaggggtctggggacaaaggactaaagattaagtggcaaggagactttgggaggtggcagggacagtgatgggagggtgaggtagaacttgtcgccccatccgtgatctaagtccacagagcctaggagggtgaaggggaattacacaactgagctgtgaccagttaccaggggagacaaggaccaattgtggacctgcctctaacctaggaagaccatgttatggaacagtcgtcttccccaatgcctgtcatccttattggatccagaaactagaatgcaagagtgatatgatatgggtctcccccaagctcctcgccccttcctcagatgtttattaaggatggccttgggccaggagctggtaactgtgggaatgctctaagttgagtgtgttggcagttgaggggcagcacagaaacacagaaatgtctctatgtccccgttccccatccagtacttagcatcggggaaggaggcttctgggaaggccaggtcaaaggtcgtgttggctggttcccctctgactgcctggaagaagtggcgaatcgctctcaggagagcaagcaaggtaatgcggaacccccagcagtgttcaatggaccctaggattcccacgtccactcctttcccttcctaatgggggtggggtactgggaggtagatgggaagacttgggccaggagctctagggctgggattgtggtttccaaaacaagagtccaaggttgtctgttgtcaccctgcagaaagccgcagtgacaaggcaaagagactcttccggcattataccgtgggctcctacgacagctttgatgccccaaggtaaatgtccttacaccctcgggcaacccccctcaccccaagttcccttcacaatgtacacctttaaatatttccatcacctctaagccccctttctaatctgttccttctcaagtttgatccaggggtgggataagccagaattagcttcagacagtacagcccaaccccaaaccatcttcggcagccactaagactgcccagctctggggtagccagagacaacggggtggtcagggcagggtggggatgcctgggggggccggggcgctcttatgtctggctggctggaggcccttgtctccttcatgtgccccatctctgtgcagtcatgtgcagtgggaatgtgtgtgtcccatgcaccggtgtggggagggtgcagtcagggctgggtgggattggggtgaggagatgggtgcactgacacctttcccctccctggctgctggctgacttgcttcggaagcttaatggatgggattggcccagggaggtgagaggcgaggggcagggaggggatggggtcaggaggggaaggacggggtgcctggggggcgtgtgaacgtgtgtgcacgaccagagctgaggtttcttggtgtgtgaacgtgtgtctctgtaggtgtgcatgacacgcatctgtgtgcatgtgtggcctggatgtacctgtacctatgcccggggctggagggtctgccctgctctgtatatactggtgcctttgtggctatgatgactgtggggctggctctgcacatctgtgcttctctgaatccgtgggcaagcaccacagggcatgtcagtgagtctgctcacacacatggacaggtgggtctctgcacacatccgtccctctctgtgcatgtcactgtgcgtgtgtactcgcacattaacgtgtgtgcatgcatgtgcgtctgtctgattgatctgagattcaggacctgggatgttgggggagggaagggcagaggaggggaggattccagggcttgggcctccagaaggacagggctgtgggggagggagggtcataatttggtgtctaaaatatgacactctcctccactgctccccccaatccagggaagagtccccttgtgcgtagcatccttccattaaatgtgtccaaacctacgtgtctgtgttctggccagtggggatgggtcggggatgggggggacagagaaatggcaacatggggagagagggtggggctggggtgccaccctgcgccccgagtgtctgaggcgcttgaccgttgtgcgtgtttgcctggcgcgtctcctgctctgggcaccgggtgagtattggggtacacccccccacaccccgagcttctatgtcggcctctgcttcttgtctaccagtgtctctctgggtctctccttggcctccgtctgtgggggtcacttgtcctaccagctgaatgcgggtggtccccgtcaccctcagcttcctccttctactctgtcttgtcaatgggcttcctcccctactcctccgtgcctctcgctggctcccacgtgctgctgtgtgtgtggtgcgtctcagcttcccctcctcctgcctccccgctcttcccggaccctgtctgcgctggcctggcctgtgctgtgccgtgcgccctgcagccagggcccaaccccagcctccctgccggagctgggcggtccttccgtgtgtctcccctcctggcgtgtgccgccccctccccgcgctggctcggggtccacgctctctcggggagctgtggtggtgtgttcgcccctccgcctgggcttctctggtgggggaggggtgttgctcatggccttggggcccagtctgaatgtcctggcctttcttgccgactgtgtcgaggtgcgttgcgtgttggtctgtggtggtgggctgcgtgtccccgcctggggcctctctcacccgcggtgtccctgccggggaagcggggctccgtccgcgcgtccgtgcacgcggctgcgaggcatcttgtgtgatgttgtgcctccctctccccgcgctctctagctctgcacctgcgcgggagggctctggaggggggagggggattaagggggggcccagaccggaagtgcctccccttctcctcccccctccaagcctcgcccctcccccttctcccgccaagggggcccccgcgttcccctcccggccccctcccccctgcccggccccctccgccgcccggcgcaggacgccaaggggttaagcctcgcgcccgccgcccgcctccggagctgtccgcggtgctgaagccggcgccgtccgcggtcctcgcgctaccgccgcggcccgaccccgcgccccgcgcccccgcgccccccggcatgtgagcccccggccctgccctccctcccgcgggagggggtgcgcgccccctccccctcccccctcccggcgcgggtcagcatgaggcggggcctgggggcccggacacgggggttcggccgagcgggtacggggacgcggcggcggcggcggcggcgggggcggccggcaccgggacccgggccggggctggggccgcggcggcgatggctttgtctgcggtcggcggcgggggtctcgggggcggccccggtgggagctccctgccgcagccgccccccgcgctgtcctccagctggccagccctggggccccggcggcgcagcgtctggtacatctacaggtaacggagcgcgccgcctcctgctttgcgggccggccggcaggccccggcccgcggtggcgaccctcccccgccgctaaaccccagccccagggcctttccccttcccccaacccgccccttcccctccgctcctcttccctaaccttctctcagcccgaaatccctttcgggcccctggtctcaacccttctcctctccatcttcctccctggaatcctctccccgaccctcccccctaatacgcactcgtcagccctgggaatcttttcctccaccccctcacaggcccttccaggcccccctctgctcttcccccaagaccttcctcccagcaggccccctaaaccgacccccctccaggatttggagcccactcgcctttctgccgcccttagcgcccccattccccggagccctccctgtggggagccaccgtggcttacccgcatccgcctacatcccaggcccctgtccctctgatccccacatccccacacctcttcacggtgttggcaagtccccccattcatacccctctctcccattcacagtcatcccccctccatcacacacgcatcccgcccccggcttcccctcccctcctctttttccgctgcgtgtcactgtgcgacggtgcgtgtgtcagtgtggctgtgtcgatgtgcgtgtgtgtgactgcctgcagccgcgtgcgtgtgtgtgcgtgtgtgtgtgagagagagaaatggagagatggtgggctcccagcccaccccccaactgtgtccatctgtgtgtccctgtgtgacagcgtctgtctctgtatgacttggagcgacagcgaggctgtctgggactgtgtgtgtgtgtgtgtgtgtgtgtgtgtgtgtgtgtgtgtggtgtgtgctggagtgggtctgtcccagggactgcggctgtgcttcccaacacccaccctcctgggcctggcctacccctcccccacaggcccctacttcaagggtccatcctgtgtctctgtccccatgtgctcctctcccctgcccccttgcccccgggggtctgtgcatgtcaggagtacttgagtcactggctctgccctctgcccatgtggggcacgtgtgctgagccccggctgagctgcatggggagccgcatccgcttgtgtgtgccacttctcagcatggggaggggggctggcgtccctctgtggtggcctctgggcaggccatggacacgggtacgtgggaaggggctgagtgcggggttgggggtgcgccgtgcacagcagcaggctctgggctggcggaccctgggtgtgtgagagggacgttggggtggggaggggagtgcaggccgctgcagtgcccctgtgtgtgggatccagtgaacaagagctggctgctgagctctggaggccgctcagggtcgcttagggatggcctggggaaaagcattgtgtgggctcctgcagggcaggtagtcagccagagggagcctgaatggggtgctgcaggggcagccaagatggggggcaagggggagggactagaggggtctgggtaggaggtgcagggttgagaatggaacaggggagagtggggacactgaagtgggggaggggtggcggctggagcaccgagggttcggagcagagaaatggggtggggagggaattcagggaatgtgggggggtatttgggggtggggatttgggcagtagggggagaataccaagaggacacagggaatgtaaatgaaacgcagctgccagtaaatgcaggcgggagggcatgtggtgaagtgagtcgagggggcagaaataggtggaggtttccacggatgcaaaagagggtacccaggaagtatgaaagggaccagaggtactttaggggagccagtgagattacttacggaggtgcaggagggtgtgggaagggtgaggccaaaggatgagggagaggtcgcaggacaagggtgaggaggtcacagaggtctgaggaggatgtttagggggaaaggggggtagggtgtgtcaggggacacgggaaatggggggatggctccatagggtgtgaggagggcttgtgggagtcagggatgaggggggtgggttagggcgatgtggaacctcaacatggcatggaggagtagggagtgaggtgcagagaggaggggtacacaggagttggggagagggagtttagaggtacatggagctgtgggagcaagagagcagttgggaagttcaaggagactgtggtgggatgagggcaacaccacgtatgtcctagctggggattgggtgagggagtcatggagcagagaggggaatggagcatgtgtaggatagggggtggttgagaagcagaagcaggaacagggtgggtctggatgtggttggacccccctccctgcctcagatcaccactggtgtgtgtgtgtatatatatatatatatctggtgaattcaaatcttggctttgacatttttctagctggtgtcatcttgagcaagttatttctctgtgcctcggtttccccatttataaaatgggaagaataacagtcaacccttccctgggttgttgtgaggactaactgaatacataaatggaaatatataaatgcaaagtgcttggaatcatggctggcattcagtaataattcgataagtgttcctcattgtcatggtgttactgccacaccctgggataaactccaggtgctgcagggccgagctcagggtggattccgagcagatggatatatgtgctcaaggtatttcggtgctgtggagtggagggtattaccactgcagttacccgagtattctcttgggtattgttgaagaatgatactcactgtgtgaccttggacaagttacttaacctttctgtgcctctgtttcctcacctataaagtgaaactagggctgggtgtggcaactcatgcctgtaatcccaacactttgggaggctgaggtgggaggcctgcttaagtctaggagttcaagaccagcgtgggaaagatagtgagacccccatctctaccaaaaaaaaagatttttttaattagttggccatggtggcaagcacctgtagtcctaggtacttgggaagctgaagttggaagatcctttgagctcaggagtttgaggctgcagtgagctataattgtgccactgcactccagcctgggcaagagagtgagattctgtctcaaaaaatatgaataaatacatagataaagtagaactggtacttatccctgccccagaggctggttatgagaagacaatttaatgatctatctgtgaagggcttcagatactgcccagccaatggcaagtgctccttcttggcatattgatatgggagttttattgactatattggctgacatttggggaaggcttatgtatggggtatgaggctgatgagggggcaagagagattccagaggggagggagaaagatggaggaagggaggggtttgtggcatgagtgaaagaaagtgaggttgcctccagtgaggaagggtgctgctggctgctggggggccttggagacctggaagagatacaggaggaggagtaagaaggtgggaatggggacattacagaatgcatggttagaaacaggcagctctgacctctgagccaatttctgtgtccagtttccccgtccacttgctgttctggccttctcggcccctttcctcccttcccctctcccttttcctaccctcattcacccctttcagccccttccctccttctctgccaacacctctctatccaggggaggaagacatggcgggtatggtgtggatgagtttactggactgttacgaactttgagcgaggactgttgctggagtatgtacatgtgaacatgcgtggtgttaggtgcactgaggtgccacaaggagggtggcagcaggaagggaggacacgtgcacatccagaaccctgtcgccatggtgcaaatgtatggatttttacaaggggagccatgggggtcctgggagcatacaggggtgcttgtgggggtggtacctaaatacagtggagcacagtaagtattattggcatttgctgggatgtatgtgttcagagggcgtgttatgggaatacactgagatccgagtgagggggagttattattggaacatactgggatgtgtgggggttgccgaaacatactggagtattcgaggacggctgttttgctgaatttgtgggggcaggtaattggggagcatgcttggctatgattggagtgtattagggccacatggatgttactgggatctgggtattattggaatacactgggattgtgagggtgggaggtgctacaagtgtgccctgggacaggctttagacagtgctgaaggaagctcagcacagcagagcacgcgttccagtgactcctgggtgttcttgggtattctgaaggcagtggggttgcagccagggtgtctgagtattcctgatgtagactggggtgtcggatcctctgggaatggaatggatgtatattcctgaggtgtacagtggtcatgtcaggagtttggggctgtttgagtgagccttgagatccatgaactgtatctgagtttcattgacatttcctgggtacgtgagccttacctaaatgtgctggtggcatttgatggctttactggaaactaccacccatattcatgggtgctttgcattttactataatagaatatgctgactgcatgcagtagctccatttgagatgcaccagggaatacagaagacagtgctgtccacggggagctttgcagcaatggaaatgttctatatctgtactgtccaatgtggtggccaccagccatgtgcagcttctgcacacttggaaatatggccactgtgactgaggaattgaatttttccatttgattttgattagctttcataaaaacagccacgtgcacctagtggccaccatattgggcagtgcagaattagcaattttaccctgtgtggggttcttgggaggtgacatatgtataaaggaattttgaggggtatcatcaaagtacatgagtcctcttgacttaacactctgacctaaggacatcgagcagatcatattgagcacctactatgtgccaggcactgtgcgaaatactaaatgtgtattacccccactggattcccactgcaaccccatcaggtaggatctgtgatagccccccattatagatgagggaactgaggcacaaaaggttaaagttgtgggctcaaggtcataggcaggaagtgactagcagggacccaagcctggctgtctggtaatctggaagctcttctccccatcctccccaccgtgcctggtgctgaatggatgggtggatggatgcatggatggatgaatgaggagagagggagtgagagagagagcatgccggctctgagggggaagcccatcagggctagcatacacacacagagtgggtgacagagatcctaggagatgcaattaatggccctggagcagaggtttgggtctgggttgccgggtgggggacagcctctgtgtctcatgatgtcttctccactccccccaccacccccccatttctcctgcctccctgccagcgattacatcattaaggagaagacagtcttgctgcagaagaaggacagtgaggggtttgggttcgtgctccggggggccaagggtgagtgccagccggggaggggatgggagaagggctctgtgaccccagaagcagggctgaaaatgggggctggaaaggggaagggaccccagcccgcccaccaccccaccccggggtgctggtccctcagctgcggtgaggcctccgtgacttgggtctgagccccatcccctgctcggcctctccaccccctcccctccgaccccgccggctcctccctgtctgcagcgcagacccccatcgaggagttcacccccaccccggccttcccggcgctgcagtacctggagtcggtggacgagggtggcgtggcatggcgagctggactgcgaatgggagacttcctcatcgaggtcagtccaggccccctctcttccctgggaccctgtgacaagttcccagaccccctcatgattcacaccaggatctggctgcccagttttattctcctttggcaccaggattcccagccccctgcccaccccccagccagcctctgctttccccagcgattccatctaaaggcctctgaggcatctcaaaagagtgacacagagctgtccccaacacatacacaataccgggggatggccaggcacagcggctcacgcctgtgatcccagtgctttgggaggctgaagcaggtggattgcttgaactcaagagtttgagaccagcctgggcaacatagcaagatcctgtctcttaaaaaaaaaattagccggtgctgtgtgcctgaggtcccagctattctggaggctgaggtgggagaattgcttgagcccaggaagtcgagggtgcagtgagccatgattgggccactgcaccccaacctgggtgacagagagagaccctgtcttttaaaaataaaagtaaataaataaataaatactggggacaaggagggagggggaagtgaatagggtaggctgagcctctcccccaaccctggggccagggagggtgggaaagggggcttgcccagggaggcggtggtatgaagggtcggagggagaggaacatagcccagagggccatggacagggcagcgcaggaggcatcctccttggggtctctgaagctgcaagcacccctcccctcgtctactctgtgtgatctgggggtgtctgtgccacaggtgaacgggcagaatgtggtgaaggtcggccaccgacaggtggtgaacatgatccgccaagggggcaacacgctgatggtgaaggtggtgatggtcaccaggcacccggacatggatgaggcagtgcacaagaaaggtgctcctgcggccactctcgcagccaccccactgccaccaggctcagccctgcgggagccccagggctggttgctgctgcccaaggccttcccttccctagcactgcttctccgtgacccttgtggggagaaactgaggcagggagggctccgcacgctggcaatggctattctctgagccctgggagccctgtggtggtagagggtggtgggggcatctcccccatgatactgatgcctcccctcatcaccttttcagcaccccagcaggccaagcggctgccgcccccaaccatctccctgcgttccaaatctatgacctcagagctggaggagatgggtgagcctgcggggctgctgaggccagggggccggggggagaggggaaggagggctggaccatcccttgagttcgttagtgttgttagtgaccaggggtccttgtcctcatcctgtccccagtccatgggtcggactctggcctgtgtgtgtgtgtctctgggaaggggtgtctgagagacgactttcctctgtgctcttgtatctgtttctccgttggggtctctctcagggtctgtatgtaccctctctgcgggtctctctgtctccttccttttgtcccacctcaccccccagccccattcaacatctctccctccaccagctccccccaacccccaataacagaggaaagcgagcccctccctccagacaaggccgagtggacctgggggtcccatttcccctgacagggggctggtcggacagctgaccgcccccaccccggggccccgagggaggcgggcttccagacagggggcccctcaccttcccctgacgtcctaactcttggctcctctactgcctctcccccgggctagtctccccctggaagaagaagagtggtgagtgggcacaggactggcgggagggcccccgtctcccgaccccgccggcggactcgcccctccctgaccccggcccctcactgcccctctcgcgcccgccacgcccactggcccgcacctgctggccacgcccacaggccgagcccgctccgccccgcccccgggggctccctgggcgtcatccgtgttctttgcccacagagtacgagcagcagccggcgccggtgcccagcatggagaaaaagcggaccgtgtatcagatggctctcagtaagacggcccagccctgctcctcgggatgccgggccccagccccggcacccgctgcatccctgtcccaccatgaaccccacggcgcccctcaccttcctgccccagagaggctgcgatcccacctcccctccctccgcccgccctctcccgacggctgccccgttccctgcccgcaccccttcccaccctgggtgctgcccactgggctgggagattgtgtctccaagcgggactgcccgtccacccggacccaggcagggctgccctttcctggttgatccaggtgctggatgaactgcgggcggcagctctggtctttgcggcccgggtcaaagcaaacttcatttcattgtcttcccacctctgttcattcatctacccctagacaaactggacgaaatcctggccgcagctcaacagaccatcagtgcaagcgaaagccctggtcccggtggcctcgcgtccctgggcaaacaccgacccaaaggtttctttgccactgaggtaggcggcctggtgtggggaggaactgccaggggggaggcggttcacacaccaacctggagcctttctctttccaaaaccctcctgacgcctctgtgctttaggctggtcctggaggggcgacacacatcctagggtttcctcctttctcccaactttggagacctcctttcctccttatcccctttccctcaaatcccatctctgtccttttctctctccactttccacccctgctattatacttgagctcttgccccgcctctttgtgtccctctgcgtcccatcttaagggtctcaaggaaggcaaaatgatgtcatggatggagattccccggcataataatagatacccaacacgtagtacttattaaaatatgaatggtcatgtctgttgccactctgtctgcctctccccacaaccagaggccaacctgtagggggtgttgataatttgggggacactgcattttattttatttttcaatttttatttatttatttatttattttgagactgagtctcactctgtcgcccaggctggagtgcagtggggcaagcttggctcactgcaacctctgccccccgggttcaagcgattctcctgcctcagcctcctgagtagctgggattacaggtgtgtgccaccatgcctggctaatttttgtatttttaatagagacagggttttgccatcatggccaggctggtctcaaactcctggcctcaagtgatctgcccgcctcagccctccaaagtgccgggattacaggcgtgagccaccagccagacatcaaattttatatggattatctcattcattccttagattcatcctgggaggtacacgaggttgttagcccatttacagagggggaaactgaggctcaaggaaggaggggggattttaacccaggcaggcagccctctgaacccatggtcctgccacagccctggctatcctggtagggtcctgctgctcccttcctggatgttgcccctactccactgggctgtgtgccttccctccaacacatcccccactaggcttgccagtgccaccccttaccctccaactgtctcctccagaggccacgctctgccttgctcctcccttcccgcttccttcttctctgcccagtccccatcctctggccgcatccaccacgtagtggtcaggggtccatttactctaaaactgggtcctttggcttttagggggtcatggatctctttggcaggctgccgtggtccttctcagaataatgcttataaatgcataacatgaaataacaaaagaggccagttacactaaaatgtagtttctcaaaatatttttcaaaagcaaaatttgtgatatcataatatcatctttttttgtcaacatgttagacattggcggtggattttaacaactctaatttcaaaatcacgaggcgcataaacactattttgggaaatctgcaccactgtgatgggatatggagatatctgtgattcctactggggatacaggcatgggtcttgctgaaactagcatggtttgctgcttacatatttaactgaggaaaggttgagtttttgttggaggatgatgaaaatgaagacataggattttttttcctgtacaagtgcacaggcccctgaagtctatccacaatccctcatgctctggaggggctcgtacttttataaaaatcaagagtaggaggctgggcttggtggctcacgcctgtaatcctagcactttgggaggctgaagtgggctgatcacctgaggtcaggagttcgagaccagcctgaccaacgtggagaaaccccatctctactaaaaatacaaaaattggccggatgtggtggcatgtgcctgtaatcccagctactcaggaggctgaggcgagagaatcgcttgaacccgcgaggcgggggttgcagtaagccgagatcgcaccattgcactccagcctgggcgacaaaagcgaaactctgtctcaaaaaaaaaaaaaccttcttccttatatggagtccaaatctacctcccctgggctcttaccttttttgaccctgtttcctcctcctgtgatcttcttctatcctcaactgccctgcagcaaacttctcataattcctcaacaaacttcttcacaaccagctttaagaaggaaagggcggtacagaaacagaaagaaagacagagcatgcacattcccattttacagaagatgaaacagtcttagagatttgcattcacttgcctgagacctttcatcaagtgtgtctctcatcaagacagaaccaaagtccaagacctcttcctgtccgtcatagtttctaacatctgcgctgttgacacagttggccctcatgattcccagattctgtgtctgcgaatttgcctactcgctgaaatttattagaagcccagaatcaatacgcgaagggcttttgtggttattcttggacaggcgcaaagcagagaaaatcttgagtagccctatgtgtgggttcccagacgaggctgaacgagggtgccttctcatttcggctcttatactgtgaacgagtgtcttttctcggtctgtttagtgccacgtgctttgcatctttgggccttttagtggtgatatcagcgtttaaaaggtcccccaagcatggtgctgaagagctgtctagcgttcctaagtgcgagaaggccgtgatgtgccttatggagaaaatacgtatgttagagaagcttcattcaggcatgagttagagcactggtggccaggagttggatgtgaatgaatcaacaatgtatattaaataaggcatccttcaacagaaacatgcataaaacaaggttatgtattgattggttgagggaaatgtgtggcaaccccatataacacaactaccgcatatagccacaattgcctgtatttggagctgcgtaattctttgttgtggaagcctgtcctgtgcattgtaggatttcagcagcacccctggcctctaccatccggatgccagcagcaaatactgcccaacgtcctctggggggcaaaactacctctcattgagaaccactgccctgtatcattctaaggttaaaagattttcagggccgggcgcaggggctcacacctataatcccagcactttggaaggctgaggctggctgatccctggagcttagtagttcgagaccagcgtgggcaacatggcaaaaatcccatctctactaaaaatacaaaaaattagttgggcagatgtggtggcatgcacctgtagtcctagctactctgggggctgaagagggaggatcacctgagcctccgaggttgaggctgcagtaagccacgattgtgccactgcactcccacctgggcaacagagagagaccaccctgtctctaaaaaacaaacaaacaaaaaagattaaaaagattttcagccccaggattatcctaagtggacttagattcaggatgctaccatccatattcactcactaaattattcagtatttattggaagtctggaatgtactcccactaatcccatttcttcatgcctccccccagtctgtattttacactctcctccctctgaatttccctctctgggtctctaaccataccccaggtgtttctgtttgttcctgatcccccagaaactctatattaacagacaaatggggatgcaaatcctgacttcctctaacttaatttgccaccttggaccatgttacttaatttctctgcatctcagttttctgttctttaaaatggggctaaagtgaaacttgcccagttcttatgagggttccatgaggttaactgtaacacagcaaactcccaacagaaggtaaacccctcaggatagaaaacaggccaggctgggccgggcgcagtggcacacacctataatcccagcactttgggaggccaaggcaggcagatcacaagggcaacagatcaagaccatcctggcaaacatagtgaaaccccgtctctactaaaaatacaaaaattagctgggcgtggtggtgtgcacctgtggtcccagctacttgggaggctgaggcaagagaatcacttgaacccaggagatggaggttacagtgagccgagatcatgccactgcactccagcctggcaatagagcgagactccgtctaaaaaaaaaaatagaaaaaaggaaaagaaaataggccaggtacagtggttcacacctgtaatcccaacactttgggaggccaaggcaggaggatcacttgaggccaggagttcgagaccagcctgggcaacatagtgagaccctgtctctacaaaatatttaaaaattagccagtcatggtgtgtgccgaggtgggaggatcactcgagcaagggaggtcaaagctgcagtgagccatgcttgcgccactgagctccagcctgggcaacagaatgagacctgtctcaataaatacataaattaattcactgaaataaaataaactagaaagtccaccatggctcaccagtgatctctgtgtatgcctccagagaccccgcaacaccagagaccccacaatagcgtatcagactgagtgtaaatctctgataaactaattagagcaagtcctgttttcattaattcaacaaatgcgcagagctcctgtaaagtgccaggcagccacagttctaggtctaccctgcacgaacccagttacaggacagtcaagagcctaaccctcagggaactcaccctctgagctccaaagacctccacccccagaggagcccagacaccagccagtaataaaaccagctgcccacctgcccctgcctcctagaaatgaaactcacaagcactcacctgagttctgggagacctcctttccctctgtgtccagaggacccatagtcatttgccctgtacatccccctcgccttttcttctctcacctcttggatctgtccctgggccttctccaggtccccctctcatgtcggaggctctctctgccgccttctctgctccttcccacctgccatctttatctttcccgctctctgagtcaatacagatgccccttcatgaggtttctgcatcttggtggcctctctcgacgtctggtcttgttctcggtgtctcgatttcccattcatttaggctcctctcccctcttcaccctgcatcttccctctggtctagatgcagtggggtggggggtgcagtaccccccgaggcttcttggatcaggtctgcacaaaagtgaacaagagcaaagcattgtataagacgccactatcagccaggcgtggtggctcacgcctgtaatcccagcactttgggaggccaaggcgggtggatcacctgaggtcaggagtttgagaccagcctggccaacaaggtgaaaccccgtcgctactaaaactacaaaaatttgctgggtgtggtggcgcacgcctgttattccagctactcgggagcatgggacaggagaatcgcttgaacctgggaggcagaggttgcagtgagccaagatcgcgccactgcactccagcctgggtgacagggtgcgattctgtctcggggaaaaaaaaaaaaagatgccactatctaaggacttggaaactgggagatttcaaccctctccaaagatgcacttttgcatataacctagaggaggtagggacagcaggggcgcggagcccagcagatccaccctaggtcagggcacctcttgggctgtctcctcctagggctctgctgtccatccgcccctcggtatggctttggctttctctggtactgtctttgtcacccgccactgatgcccgagggctccctcgtgccccctcatctctcagtctgagacgtcattgctccctctcagttgcactccccacttctggggttccctcctggggctgcgcaggccctctctgagtcagagctgccctccctccttcctctctgggctcttcctgcttcccatgcttcccatcgccctctcatttcccctctcatctctcagtccttgtctctcccccttctaggccccatctctgtctgtcgctcttcgcctctctcactctccctatctttctcttcccatccctccctgtttccccacctccctctctcccccatctgtctttgtctctttgtctctgtctctccatctctgtctctgtgtctccttgtctccctagctctctccttgtctctctatctctgtctcctcatctctgccattgtctctctgtctctccatctctatctccccatctctgcctttgtctctctgtctctctatctctgtctccctatctctgcctttgtctctgtctctgtctctccatctctgtctctctccccatctttgcctttgtctgtctgtctctgtctctctatctctgtctctctttttctgtctctctacgtctgtctctgtgtctccttgtctccctctctctgtctctgtctatctctgtccccccatctctgtctcttcagttgtctccccgtccattctctcccctatcccctctcagggctgcctccttagcaggagttccccagccactggtcagcggcaggacatgcgctgccactgaggcgccagaccacgaggtgacggagaactgggcctttgggcggcggactgaaggggagtctgcccggcagccagtgacgtcatgcaaggctgcgcactctgattggctgtcccttctgcgcgggagcgaatgctcccgttggttggtggagttcaggtgctccctggggagtcagtgcgatgccccatcagattgttatggttcctccgtcagtctgacatctctcctgtcaccctgacccttcttatgtcaagctaacccatttttgtcccttcttcttccacatggtgctgaagtgtcttttgtcagcttgcaaatctgacgaggcgtctgtcactctgcaccctcctctgtcggggacacccctccccctcactctaaccagttccctgccactctaagccctctcccgtcaccctgaccccttgcctgtaaccctgacccctccccgtcacactgacacccccccatcaccctcaccccttacctgtaatgcttgtaaccctgacccctccccatcaccctgacccctccccacaccctgacccctccccattaccctgacccctccccatcaccctgacccctccccacaccctgacccctccccacaccctgacccctccccatcaccctgacccctccccatcatcttgacccctccccacaccctgacccctccccacaccctgacccctccccatcaccctgacccctccccacaccctgacccctccccatcatcctgacccctccccacaccctgacccctccccatcatcttgacccctccccatcaccctgacccctccccatcaccctgacctttccccatcaccctgacccctccgttttccctttgactcctccactgtctctcttttacctcttctctcaccctgacccccaccctgtcaccctcacccttccccatcactctgactcctactctgtcacctgaccccttctctgtcacattgacctctccactgtccccctgacccttccctgtcatcctgacctctcccccatcaccctggtcccttccctgtcactctgacccttccactgtcacatcaacccctccactgtcactcggatccctgcctcatcaccttcaccctcacctgtcacctgaccctcgcctctccctctggcccccaccacctgcccccgtgccccatgcaggtgtttcccttgccttcctcccctcctcccagctgtcctctcctgcctggactctgttcttgctgtcctctccagccctgcccctcagcagtccccgtgtgcttcctgactggtcacacccccttctcctggctcttcgtacccctcccattttatctcagggtttttgagccactctgacctcttttctccgatgcatcttgaatctcctccttactcgctggctggtctaggataaggaccttttctctctgatccacggcctctttcattatcatccaaatgggtataatccaccctaactcacaggtgtgaggatccagtgaggacacatacgaaaaatagcaggtaaaatggctcacacaagagtgtctccttccacttgccacttctctactgcctttatcttttgcaaggttctgctctctgataccacacagctgcaggacgggacagaaagccaagcagagtattggtctgtggctgaaggaggtgggggagggggtcagaaaaacattcagcaaagtggagaaggattgagcaggctgagaagcgcttagagaagagcagcatggcaggaaatccgtcaaagcagggatgccttcaggcgacacctcctgaagcctgcttggagctggccctgtgctgtttgatggggatgttcagaggaacaggctggggttttgccctggagttgctcgccacatcttgtcagggtgtcttgtattgcttccaatgagttcttccttctacaaatatttattgagcacctactatatcctggacctgctgctgggctctcaaggtataagagtgaatcagtcaaacaaagtaacttcctttagagaatttacatttgaaagaggagactagcagaattgggttctgctgcacctgagggagaaaaagcaaataatggtggcttgaccaagaaaaatgcttttatctctctcttgttaaagaagtatgggggccaggcatgagtggctcacacctgtaatcccagcactttgggaggccaaggtgggtgggtcacctgaggtcaggagttcaagacaagcctgggcaacatggtgaacccctgtctctactaaaaatacaaaaattagctgggtgtggtggtgggaacctatagtctcagctactcaggaggctgaggcaagagaatcacttgaacccaggaggtggaggttgcagtgagccaagatagtgccattgcacttcagcctgggtgacacagtgagactcccatctcaaaaaaaaaaaaaaaaagtatgagataggaagtctcaggcaggttagcagcctccatggtcttaaagacccagaatccttctcaatttctgctccaccatcttagccatgtttccaactgcagactggcctcatagtccaaaattgctgctggagctctagctattgcaccagcattccaggtagcaggaacaaggaagggcagaaaggcagaagggcaaaagagggcaccttgctgcctcttgagttacctccaagacatcccagatgtaacacacaacactcccacttgggcatcccggttggccttccttagtcatatggccacacctagctgcaaaggaagctgggaagtgtagtctctcaaaaggtgccaaataagattggcattttcttaccaaggaaatagagtagaaagagtattggggtgggctgcatgcctagggagacagacagtaaacaagcaagcaaataatgatgatgactccaaactgtcatcagttaaaggagttatgacagagtaacaggaggaagcctctccagagaggagaccttggagccgaaatctgaaagaaacctgaaacttgcaggtcctacccactcccacccttctatcacctgtctaacctcaactcctacccttcagctcctggcctccttcctattcctcctgagcctgcctggctcaccttcacctcagggcctttgcacctgctgttccacctgcctggaacactgttcctctacacatcattatgccccctccttcacctcctccaggagtttgctcaaataataccttctcagtgaggccttccttgacctccttattttatttattttgagacaaggtcttgttccgttacccaagcaggagtgcagtggcacgatcatagctcactgcagcctcaaactcatgggctcaagggatcctcccacctcagcctcccaagtagctgggataacaggcacatgccaccatgcaccactaattaaaaaaaaaaaattgggggtgagacagggtcttgctatgttgcccaggctagtctcgaactcctggcatcaagcaatcctcccacctcccagagtgctgagattacagacaggagccactgtgcctggccagcccttattttattctattttattttagatgaagtcttgctctgtcacccaggctggagtgcagtggcacgatcttgactaactgcaacctctgccttcaggttcaagtgattctcctgcctcagcctccctgggaccgtaggcatgcaccaccacgcctagctaatttttttgtatttttagtagagatggggtttcaccatgttggtcaggctggtctcaaactcctgacctcaaatgatccacccaccttgaactcccaaaatgttgggattaaaggtgtgagccaccgcgcctggcaccagcccatattttaaattacattctccctctctcctccctcttacctccatctgaccaatgttatattttacgaatttatgctgtttatggcctgcttgcccttcctgtgggctgggacatttgtctaatttgtcgtatctgcagtatctgtcacagtccctggcataaaggaagtcctcaataaatatttctggaatgaatgaatcaatgagacaaacatagaaacagacagtcccaattcaggaagggaagtgtagtgagaggcatgtaatacagaccccaggaaactctggactagaaccaatagagctctctgtgatgatgaaatgttccatatctatactgtccaatttggtagccaccagccacaggtaactgttgaatacttcaaatgtggccagtgcaacagagaaattgaattttacaaattaattttaattaattgaaatttacacttgtctttttggttggtctgtttctttaatgacgcagtctcactctgtcatccaggctggagtgcagtggcacaatcatagctcaatgaagccttgaactcttgcactcaggtgatcctcccacctcagcctcccaagtaactaagatgacaggcatgtgctactatgcctggttaattttttttttttttttttttttttgagaccgagtgttgctctatcacccaggctggagtgcagtggcacaatctcggctcactgcaacctccgcctcccgggttcaagtgattctcctgcctcagcctcctgtatagctgggatgacaggtacatgccgccactcccagctaatttttgtatttttagtagaggtggaatttcaccatgttggccaggctggtttcgaactcctgacctcaggtgatctgcccaccttggcctcccgaagtgctgggattacaggcatgagccaccgtgcccagcaatttttgtaatttttatttttgtagagacagagtctccctatgctgcccaggctggtctcaaattcctggggtcaagcgatcctccctaatgttgagatttcaggcatgagccaccacgttggcctgaaatgtacagttgaatggctagtggctgctctaggggggcactgcaggcctaaaggaagcgggtagccgggccagggtggagggctaagataacagagctttcccaagcagagcccagagcccagggaaaggatgctccatgcagagtctcggaagtgagaagcgagggaactgggaatggttgtgaatggctggaggaaagaggcaggagggggtatagtgggaagtgcaggaagtaagggttcatcccaaaggtgcgaacttcattccgagagggctccctttctctgcacttctggtctcaaagatggagaagggagacacatggggtgacctggcagaagctggggagtcagggccccgaagtgcctgaccttggctgattctccctgttactcatctaacacttgcttgtagaacagcaggccctatgcggggaccggggactcagtaggaaaggagactgataaagtcactaccctaccctcaggcaggtttcataatgacttccatgaaccttaggcacttttgcccttctgcattaaaaaaaaaaaaaataggccaacacggtggctcatgcctgtaatctgagaacttttggggaggccaaagtgggaggatcgctggagcccaggaatttgagatgagcctgggcaacatagcaagaactcgcctctgcaaaaaaatttaaaaattaactggatgtgattgtgcctgcctatagtcccagctactcagaaggttggggttgggatcgcttgggcccgggaggccaaggctgcagtgagccgtgttaacgccactgcactccagccctgtctcaaaaaaaaaaaaaaagtttaaattttatgactttgttgctgcaaagaccgatattatccagggtacaattttctcttttctttttttctttcacttctactttgaaaagaaatgaaaacacttcccctaaaagcatcatgggccctagacactgtaggtgcgatgcctgggatacatcagccccgccttcagggagtttctaggctagtggaggaaacagacagcaagtaaacaagatggtttctggggaagagagatgctgtgaagaaaatgggacagagggaagtgcagtctgggtagggggccggggaaggtctcgccgaggagaacttcgcgctgaaaaggaactgtgacaataagagggaaagctgttgccgagagaaccagggctcgcaggtgttctccaatgagggtagacctggggctgacagaggagaaggaagaggtgggggtggaggtggaccaagggagcaagtgggaaatgggggcagggctgggtcccgcctgcaggacctgtcttcgtgtgggcttccctagaacgggagccggaggtggggattcctgtaccaagggtttgctacgggggaaccttcagggagtgtgggagactggctggggttgtggaaggaagtcaagcagacacggttcacgctggagtgggaacccatggggtcaggctgggcaccccggctttagtgctgcctcgggcctccgtatccgtccatcgtgggctgtgggctgctccaggaagcagggacacataacggactgggcgagtccaggactctgaaggagggtgattcttaagggctgcaggcaggtgaccctcccagcagtgggtgagggatgggatgctgcatccagggggagggcagctgcaggggcaccagcagtgcctgccatagagggtcttgtagaccagagttgggagtttggtcccctctgatctcctcctaactgacatgggatttcaagcaggggcaatagcatgctttttgaaagatgcctctgactcttgtgtggaaaacagactggaacagggtgggggatcaaggatggcagcagggagatgagggaagaggctgctccatcccggagaacactggtggggacctggatgtgggcagtggctggaggaaggaagcagatcaagagtcgatggaaaatctgctttcttctcctttctttctccttcctgcccagacttgaggcttttcattcccgcagaattccctttcgccttcttttctttttttttttttttttttttttttgagacagagtctggctctgtcgcccaggctggagtgcagtggtgtgatcttggctcactgtagcctccacctctccacctcatgggttcaagtgattctcaagcctcagcctcccgagtagctgggattacaggcgcctgccaccatgcctggctaatttttgtatttttagtagagagacgaggttttgccatgttggccaggctggtcttgaactcctgacctcaggtgatcctcctgcctcagcctcccaaagtgctgggattacaggcgtgagccacgttgcccggcctccttccaccgtcttcacactgctctcccttacggcaggggcttagggaaggaatgggggcagccgtatagtgaagccacaagcctttctgcgctgactgatctctctctatcttttctctctctccccctctgactgccgctccaaagtcgagcttcgatccccaccaccgtgcccagccaagttacgagcgtccttctttcctgcctccaggacctgggttgatgctccggcaaaaatctatcggtatgccacccagaagaagagatgtgggggctgggggaggccaggaacgtgacagttcaggaaaagcaagcagacttggaaatgttctgtgctcccagagagaccatagtttcatcaaattgggttaagagttcaggctttggaaatgggtgaacttggccatgaatcctggctcccctccttcccagctgtgtgaactggggcaggtggcttgacttctctgggcctctggctctacatctggagaatggggatgcagtgagctaaagcccccgctacagctttctggttgtttctcttatacccgattccatccattcattcattttacaagtgtttaccaagcgctccccacatgccaggaattgttctagaatggggatacgtcagcgaataaaacagactaaaggttcctgccctcatgggcttgccttatagcaggggaagacagataatggattataaggaaaataagcaagaaaattatctagtatgttagcagttgtacgtgctatggaaaacaaaaaaaagagtgggccgggcgcagcggctcacgcctgtaatcccagcactttgggaggccgaggcaggcagatcacaaggtcaggagatcgagaccatcctggttaacatggtaaaatcccatctctactaaaaatacaaaaaattagccgggtgtggtggcgggcacctgtagtcccagctactcaggaggctgaggcaggagaatggcgtgaacccggaaggcagagcttgcagtgagccgagaacgtgccactgcactccagcctgggcgacagagcaaccctctgtctcaaaaaaaaaaaaaaaaaaaaaagagtgaaaaaaaataatggagtaaggtaagagagatagggagtgctgggtagggggcagggtgcaggtttgagctaaaacctatagatgggccaggcacagtggctcacacgtgtaatcccagcactttgggaggccgaggcaggcggatcacaaggtcaggagttcaagaccagcctgaccaacatgatgaaaccccatttctactaaaaatacaaaaattagccaagcgtggtggcatgtgcctgtaatcccagctactcaggaggctgaggcaggagaatagcttgaacccgagaggcagaggttgcagtgagcaaagatcgcaccattgcactccagcctgggcgacagagcgagactctgtctcaaaaaaaaagaaaagaaaaaaaaacacctagagatgaagtggggaatcgtgaggctccctggggttgaggcattccaggcagagcgaactacctctgcaaaggtcctgaggtcgggctgagtctggtgcgtttacagaacagggaggaggcctgtgtagcaggggccaagtgagcactggacatgagggcagtggggggacagggtcccgatcctgcagggtctggggagtcatggtgaggacttgaacctttgccctgagtgaggtgagtgaatggcagggctctaagcagaggagggacatgagctgacttcggttttaacagaaaccctctggctgctgtgaagggactagattgaaggggatgagctgggaagccgggggaccaaagaggaggtgacagctattgctatccagataggaaatgatagtggctggcccagggtgttgactctggaggggtgagaagggattggattccggatatgttttgaaacaacaggatttgctggtggattggatgtgggtgacttgaggaagaaagctaagagtggctgcaaggttttcagtcttagcacctgaaaggacagagctgctgtttgctgcggtggtggggagggaccgtgggctgggaggagtctgttggtgaggagatcaggagcttgggttggagcgtttggagtctgagatgcccgtgagacagccagctgggtgtgggtatttgaatataggggcccagagctcagggcggaggatggggccccaggcataaacgtgggcgtcgacagcagaaaggcagtgaatgaagctggtcactagttgagagggagtagtcagaggtgagaagaggttcaaagaccgagccttggcagtgaagtaagcaaagacttaactcctgcacgcctcctggagttgtttttccctgattggattcagctttccccaactcctggcgttcaaagtccaccagtgtgagtcttacactcccactgagtgtggggtccacctggctcgcatcgtttacctgatttttttttttatagatccaatcccttttaaactttagcctcatcataagtggttctctctgtagaatcacagctttgatgtgctggttgcatttctttcccgcatatacgtgaaaagaaacacgcatctatgcataaacacgaggggactatcccttcccagctccagccacttttgctggccccaaaccgttcactgagcctttgaacggaattagaaaatggcgccccctcctggcgtggggaggaagttctgctgaatttcagtttcctcaccttccttgcggtttgcagttgtgcagtgcacaacctgtacctctgtatgaagcagatttgggtttacctcaaatagggaagagctgggcgagtccacgtgaagttcctggcatatacggggtgccattcttgtcattagtattgttgcggttctatgggatagtggagcagggagaccctccccgccagggtccccctccttgagcctctgtatctccccaggtgcggcagaagatgacagaccttacctagcacccccagccatgaaattcagccgcagcctgtctgtgcctggttcggaggacattcccccgccacccaccacgtccccaccggagcctccctacagcacacctccagtcccctcctcctcagggcgcctcaccccctcccctcggggagggcccttcaaccctggctctggtggccccctccccgcctcctcccctgcatcctttgacgggccctcccctcccgacactcgcgtggggagccgcgagaagagcctgtaccacagtgggcccctgcccccggcccaccaccacccgccccaccaccaccaccaccacgccccgccccctcagccccaccaccaccacgcccacccccctcatcctcccgagatggagacaggcggctctcccgacgaccctccaccccgcctggctctggggccccagcccagcctgcgaggctggaggggcggcgggcccagcccgaccccgggggccccgtccccatcgcaccacggcagcgcgggcgggggcggcggctcctcccagggcccggctctacgctatttccagctgcccccgcgggcggccagcgcagccatgtacgtgcccgcccgctcgggccgcggccgcaagggcccgctggtcaagcagaccaaggtggaaggcgagccccagaagggcggcggcctcccgcccgcgccgtcgcccacgtccccggcctccccgcagccgccgcccgccgtggccgcgccctcggagaagaactccatccccatccccaccatcatcatcaaggccccgtccaccagtagcagcggccgcagcagccagggcagcagcaccgaggcggagccccccacccagccggagcccacgggaggcggcggcggcggcggctcctcgcccagccccgccccggccatgtcacccgtgcccccgtccccctcgcccgtgcccacccccgcctcgcccagcggcccggccacgctggacttcacgagccagttcggggccgccctggtgggggcggcccggagggaggggggctggcagaatgaggcgcgccggcgctccacgctgttcctgtccaccgacgcgggggacgaggacggcggggacggcgggctgggcacaggggcggccccgggcccgcggctgcgccactccaaatccatcgacgagggcatgttctccgccgagccctacctccgactggagtctgcgggcagcggcgcgggctacggcggctacggggccggtagccgagcctacgggggtggcgggggcagcagcgccttcaccagcttcctgcccccgcgacccctggtgcacccgctgaccggcaaggccctggatcccgcctccccgctggggctggccctggccgcccgcgagcgagcgctgaaggagtcctcggagggcggcggggccccccagccgcctcccaggcccccatcgccccgctacgaggccccgccgcccaccccgcaccaccactcgccccacgcccaccacgagccagtgctgcgtctctggggggcctccccgccggaccctgcgcgccgggagctggggtacagggccgggctgggcagccaggagaagtcccttcccgccagcccgcccgccgcccggcgttccctgctacaccgcctgccgcccaccgctcccggggtggggcccctcctgctgcagctggggacggagcccccggccccgcaccccggagtaagcaagccctggaggtccgcagcccccgaagaacccgagcggctgccgctgcacgtgcggttccttgaaaactgccagccccgggcccctgcgacgagcggaaggggtcccccctcggaggacgggccgggggtcccgccgcccagcccacgccggtccgtgcccccctccccgacctccccgagggccagcgaagagaacgggctgcccctgctggtcctgccgcctcccgccccctcggtggatgtggaagatggcgaattccttttcgtggaaccgctgcctccgcctctggaattctccaacagcttcgaaaagccagagtcgcccctcacgcctgggcctccccacccgctgcccgacacacctgcccctgccaccccgttaccccctgtgccacccccggctgtggccgcagcccctcccaccctggactccaccgcatccagcctgacatcctatgacagcgaggtggccaccctgacccagggggcctccgccgctcctggggacccccatccaccaggcccgcctgccccagcagcaccggctcccgctgccccacagcctggcccggaccctccgcctggcacggattctggcatcgaggaggtggacagtcggagcagcagtgaccacccactggagaccatcagcagcgcctccacgctgagcagcctatctgccgaaggtggtggcagcgcagggggtgggggcggggctggggccggtgtggccagtgggccggagcttctggacacctatgtggcctacctggacggccaggcctttgggggcagcagtactcccggcccgccataccctcctcagctcatgactccctctaagctccggggccgggcgctaggagccagcggaggcctgcggcctggccccagcgggggactccgagaccctgttacccccaccagccccaccgtctcggtgacaggggctggaaccgatgggctgctggccctgcgtgcttgttcaggaccccccacggcaggcgtggcggggggtccggtggctgtagagccagaagtcccaccggtgcccttgccgacggcctcctctctgccccggaagctgctgccctgggaggagggcccgggcccaccgccaccacctctgcccgggcccttggcccagcctcaggcctcagccttggccacagtaaaagccagcatcatcagtgaactcagctccaagcttcagcagtttgggggctcctcggcagctggcggcgctctgccctgggcccgaggaggcagtgggggaggcggagacagccaccacgggggagccagctatgtccccgagaggacctcctccctgcagcggcagaggtaagcgggggctggtggccaacaagggaggccagaggtgttgatggcatggctgtgtccctttagggtctcagggtggcagaaaggaaacagaaaccaggttggcaggagtttgctgtcacagaagcatgctttcacaaatattttctttttctttttttttttttcttttcttttcttgagagggagtttcactcttgttgcccaggctggagtgcaatggcgtgatctcggctcaccacaacctctgcctcccgggttcaagcgattctcctgcctcagcctcccatgccaccacacccagctaattttgtatttttagtagagatggggtttctccatgttggtcaggctggtctcgaactcccaacctcaggtgatccatccgccttggcctcccaaagtgctgggattacaggcatgagccaacatgcctggcttttttttttttttttttttagaaacagggtctcactctgtcacccggctggagtgcagtggtgtaatcatagctcacttgcagcctcaaactcctgggctcaagcaatcctctgggactataggtgcacgccactatgcctggccaatttttcttttcttcttcttttttttttttttttttttttttttgagacagagtctcactctattgcccaggctggagtgcagtggtacaatctcagctcactgcaacttctgcctcccaggttcaaacgattctccagcctcagcctcctgagtagctgcgattacaggtgcccgccaccatgcccggcaaatttttgtatttttagtagagatgaggggttttgccacgtgggccaggctggtcttgaactcctgacctaaggtgattcatcccacctcggtctcccaaagtgctgagattccacacatgagccagcatgcctggccctggccattttttctttaactttttgtagagacaagctacgttgaccaggctagtttcaaactcctgggcttaagtgatcctcctgccttgacctcccaaagtgtgattacaggtgtaagccactgggtccagcctttaaatttccatttatttcagtagcttctgttgtctctgcccatcaccatcacaacctacatcccatgatgaacaaaaagttattaacaggctgggcgtggtggttcacgcctgtaatcccagcactttgggaggctgaggcgggtggatcatgaggtcagaagatcgagaccatcctggctaacacggtgaaactccatctctactaaaaaaaatacaaaaaattagccggtcatggtggtgggcacctgtagtcctagctcctcagtaggctgaggcaggagaataacttgaacccgggaggccgaggttgcagtgagccaagattgcaccactgtgctccagcctgggtgacagagtgagactccgtctcaaaaaaaaaaagttattaacaaaggagactggagtgagacctgcttatgtttgtttccttggtgagctgccacttctttctgacagtccctgaaatctgtgagtcccttgaagccagtgtggttcaagacaggatgcagttataggtgtggttctagagcccaccttctcagcttccagtcccaaccctgcactttctacctgggtgatcttaggcaaatgaatccacctctctgtagaagtggaatggcctagtgccagcccaaagagtttttgagaggatttagtgtgtgccattgttgtaacatgggatgggggaagagggggcctcgaacaagagcccagcaacttctacgtggggaaatacgggatgatgcagatgcttcccagagcagccagtcagctgcatcgtcgcagaattcgagcccattcaagaccttctagtcctagagaaagtagagttacatttctgcttcagatacacagagggttgggagcaggttttaaatatccttgtccatctacagagttcacttgaattctgtttgaaggtctgctatccaaatgtgtctgaccttcaaatgtgggttcagggagtgtatatttggggcaacttaaatctatgctcccaggttgaaaaaaaaaaaaaagaaagaaaagaaaaaggaggctgggcacagtggcctgcctctgtagtcccagctactcaggaggctgaggtgggtggatcacttgagcctggaaggttgaggctgcagtgagctgatatgacaccaaggcactgcagcctggggaacaaagtgagaccctgtcttaaaaaaaaaaaaaaaaagagagagagagagagaaagaaaagaaaaaggaagtgtatattattagagcaacttgaatcaatgctcctacgctgtaaaaataaacaaacaaatgtgggtttattaggcctttaagaactgaatgcaattccttgactattcttaagtattctggttagagaagaggattttttttttcttttctttttttttttttccactgcttgtagcagcaacaggaaggatgcttaattcagtcaacaattgcattaattattgactcatgacctatgtgtgcagagtgcccttctgggtgatgggatcccctgctggacaggacaggcaaagactgtgcaactccacagggctcatagtctagggacataggagtgggggcggggcagtaaacaaaataattgcaaccatcctacaaaaaaagctaccacaatgggatgggtggagaaggtctctcatgtaacaggcaaggtgggcagagtaatgaaagtggagagggagcagctgcccagggcaagagtgagccaggcagggggagcagccagttcaaaggccctgaggtgggacagtgctggaggggagggaacgaaagggatgaggggaacctttttctccccttgtttcttctctctttcatctccctctcttcatctctctctctctgtgtcccctgtcccttccatctctctcccctggatgctcaccctctttttgtctctctctcactgtctccccatctttcactctgctacgactggccataacctgaaaggcagtatagaatagtggtgaagagctcagactttggtgccatataaccgggctctgccacttcctgtgtgtccttaggcaagttatttaacctctctgtgctgataataatagtaacctgcatcagggctgtcgtggggattaaactgagatgcaatcatgtaaagcacttagaacaatgcctggcacacgtgagcatcagtaagcggtgacgattattattattatcacttaatgtctctttttctttcatctctcttaactgtcgccctctccctgtcctctcatctttctctcccttcatttctttcctcgacggccggccgtcttaccccttgctccctccatttcttcccgtctctcctccgtctctccccctacccttatgtctctcctcctctctccctatatcttgacctctgcctctttctcacccctgcccttgccccctaaatccctgtcctcccccactgcccccttgtcacattccagactctccgacgactcccagtcctcactcctctccaagcctgtcagcagcctgtttcagaactggcccaaaccacctctgccgccactccccaccggaacaggggtctcccctacagccgctgcggccccaggggccacctcaccctcagcctcctcctcctccacgtccacccgccacctccagggcgtggagttcgagatgcggccccctctgctccgccgggcccccagcccctcgctgctgcccgcctcggagcacaaggtcagccctgcgcccaggccctcgtccctgcccatcctgccttccggacccctctacccaggcctctttgacatccgtggctccccaactggaggggcaggaggctcggctgaccccttcgccccagtctttgtgccgccacacccggggatatccggggggctcgggggagccttgtcaggggcctcgcgctccctctcaccgacccgcctgctctcgctgcccccggacaagccgtttggcgctaaacctctggggttctggaccaagttcgacgtggctgattggctggagtggctgggtttggcggagcaccgagcccagttcctggaccacgagatcgatggctcccacctgcccgccttgaccaaggaggactacgtcgatctaggtgtgaccagggtgggccaccgcatgaacatcgaccgggctctcaaattcttcctggagaggtgatggctggcctggacggaccagccccgtccacagaactcttgagcctgctggcctcttgacctctgacccctgactgtcattctctccccgggccagggactctgttcaaactgcgccctgccctcatctcccaaggccagaggtcaccaggtggcccaatccaggccggacatttgcacctcactgaaggggggcagctgacacaagagtgtgtgtgtgtgtgtgaagcggggagcggaggggggataggagaaattacagaggggaattgagaaggagggaagggcctattctggggggaggggatagacagagccatagagggtcagccctgagcccgattggatggggactgtcccccaggccgcaggggaagggggtgccctcggattccaccacctgccacccctctaacaacccttcccactctctccaggcccctcagctctccccccttcccctctccccagcacacacagctgcccccctcagcctcttgcacgctccgttgcacgcctgctcacctctctcccctcccgtccccgggctgcaattttgcacaaatttgccctctcgctgtcttgcacattctgcctttgcttctggctggcgaggcccgctcaaatacactctgctctcctcgcacacgctgcatttcctttctcacgctccatgcctccttctctgcttcttgctgcttacacacttttcccctaccagggccctcctttacacactccatttcacatctcctcctccccgctcgctctggacccttgttgcagacacacttgggacacattttccctccccctcacagactccatgcacatcattcattctctggagtgccctgctctttgctcagcccttgcacacttgctatcttatgcacccctcctgacacactcttacctccattttcttacgttgaagcactttcccttcttattcttaaaaaccccagattcttccactccccaactctcccctctcaccatgacactcctagccccccaccccccgccttccctcttgccccttttgcaccgtcacttttggtcacgccttttgcacacttgcctcccagaaactgtttctctcacacatgctcattctcttcttctttgccaggctcccactcccttgcccctttctgtttgaaatctttgcccttctgcatttttgattcttttgtgaaccctcttgcacacttgcttttgcacacgcgcccccccccccagcattttcagtgctctccggaagccttgtttctcccctttaataatgttcttgcgcaccatgacatggctgcacaccgcatcttgtcttttctacctggatgagagctctaccacttctttccttttgcacactcatctcattccatgcactcttgggctgtaactgtcatttcttttcctgacacgcttattttttattcctgttgacaagcagctcttgcggccattctcattcggattctcttacctccttaagctctttctcttcctggtgagagaagaccctatgcacactggcttcctgctcaccatgcttccacactcgagcctctccctgcctccagccctcacccttcctcacatcctccctcttctgtctttcctgggccatctgtccatcccttttgcacgaagattgccctctcctaacctgtccactccaagaagctccctctccctccagcatggctgttccttcccgcacgcttcctctctccgcttattcccggggcttgggaatgttaagccacccctccccctgaaaagccccctcccctgctgtgggtaaaggggggagggcgttgccctcaggtcccccccccatgttcagctgccaaagaagggagctccccctccttccccaagcccattccccctctgctgccccctacccccgagaggggggcgctccgtccatgaggggagggggctgcaagccccctcccctcaccatgtcagggatctgcggggaacctcgtgggagggtcgtgggaggggggaggggtggtgagagaggggcagaggccgcgctggacccctacccgccccctcccccttgtcggatgcccccagtccgcagggggcctgcgcgggcgcccgtctatcaagggctcgttcattctggatgggtgccgcggggttggggagggtgtagggggtgggggggggaggagaggtcggggtggggagtggggagggaccgaatgcggggacagcgcggggtggagaggagagaaaaagcaaaaagaggaacaataacaaaagaagaaaatataaaaaacagaaaaaaaaaacacaaaacccctagaacacacaaaaaaatccagaaaaaaaacctgaaataaaagcccgagaattgtcttccaagggggggtgggaggggaagaggaggggggcggatgaggacgtctgattctcgctgagacagggctcggcacgcgctgaaagccccggtgcccaggtcttccctttcgcgggcttcagttcatccctcaagggattgggacccaggcgtccacgtacagggactggaggaagattagggacgcgggattataacatgggggttcattcctaccccccatcacctcccttcccctgactccccaccaagattttgcagagagaaatggcttttgtaccaggtcattctttataattaaactcacagtatccaccccctcgagccggccccgcctccttcctgggaaggcaacgccccctgtcctccggggctccgggtgggtggccccagcccgcggggcggtgcgcaagcgctgccggggcccgcccgggcgtcaggcctcctcgttcggctccgcccccagggcctcgagcatgcgccgccggaccagggagcggcgcaggtgcaggcggtagtcgcccagcaggaggtcgtcgtggcgcacgatctggtgcgcaagcccgcggggactgagcccggagcgcagcaagcgcgagcgcgtctggaagtccgtgaccgcgatgagccacctgtaaggggggtggggacggaaaaggaactcgcaggtcgtttcagccctggctttgatcgtcgaagagtccctgcctggtccctggagtcgtttacaggccctggtccagcggaccatcgctccgtccctaaactcccctccagccctgccctctcgcctgggtcgctctaggctccttacgctctcttagcctggttctgcgtcctaatcactgtctgtcgaggctccatctcaaaccgcccaaaggcccgaccctccactggcgactgcaggctgcgctctaccctaggcactccaggcctgtccccaccctatcacccctggccccacacctactatgtgctcagtctcttccaccccctcacagctgcctttccaggctcagacctctatcccggtcactactgggtcactcaaactcgggcccctactcactcgagatccctccttctctctgatctcaccggaccttacctccaaccgcgctcactcttggccccgcccctcagtggctctgcaccaatctcgctcttatctagtccctcctggccccgcccccccaagctgtcactccactgtcgccccgcctcacaacacccttacaccaaccacgctcttatctagtggctccggggcccgcccctcagcacccttacaccaaccacgctcttatctagtcgccccgggccccgcccattcatgctttcactcttggccacgtccctcagcgctctaaaaccaaccacgctcttacccggtcgccccgggccccgcccctcccgctcgctccaggccccgcccccgccgcttactcaccggttccggcgcccagcagtcccacagatgacgttcatgttctcaaagcggatgctgctcacgcgcccgctctccatggcccctggtaactgggcctccagggcttgcagcacctccaggtgggtaaaatcctcctcgggctgcgggtgtcggagagagaacctcagcccgtggcctcctggttcattttgggttcagaagtcaccaccctagaccccacctgcagaacctgccacagagttccaggtggcatttgaggggcaaggatcgctcttaatcccagggtactgtcgctatggtcaaaggagacgacagattatctctcagatgggaaagcatctactatcactctaggtcattctccaaaaaaatcaattctcaccaagccaatttgccccaaagtcaatgaacagttggctgaatgattcaccaacttagccaactttacgaatctaccaaaaactttcccagcaatttgcaatggatgcgcctgaaagttcttgaaaatttctgccaggatttaagttacacacctttccttttatattcgtattagcattttaagaatgttcagtagtcaaaagataagggtcataggggttttgatgtcttgtcaatctatttaacattcagaaacgtggactgatcactaaacacagttgcatcacgtgattagcatgtcaagggtgataacagttgtcatagcacataaaattgctgaggaactaaaatgaaatgaaaattttcacgatttcactgaaaaatgatgtcacttccagaaagtcattccttgactggggtgagaggggaggctggagagtcccttgctcaaagccacaaagaagtggagtgatggggtggagactgatccctaaaacgaggacagcaatccctgtatgcagggtggagagttacacggattagctgagagggtaccttggaggcctgtgcctggcacacagtaagcacctattgacatcagctcttctcagtcaattgttgagtgcctgggactctcatatatacctcttctgattgaaggcagggaggaccagtttactgaatctgtcaaaaacatgacctctttctttccctccctcccttccttcctttcctttcctttccctccctcccttccttccttccttctttctttctttcttccttccttttttttttgacagagtctcactttgtcacccaggctggagtgcagtggcacgatctcggctcactgcaacctccacctcccaggttcaagcgattctcctgcctcagcctccccagtagctgggattccagccacctgccaccacgcctgcctaatgtttgtatttttaatagagacggggtttcaccatgttagccaggctagtctcaaactcctgacctctagtgatccacccacctcagcctcccaaagtgctgggattacaggcgtgagccaccgcacccgacacacatgggctttttcttgagtttttgttatatttgtaaactttacagaagtggattagtaggactccttttgtcctccctccctgcccccctcagcctcccctttctttgcccgttggtctcccctctgacatgagcagtagatttcatgactgaccctttgacaaattcacaatcagttttcagcaaactgtcctggtggcaagcccacagcttataagccaaaagcctgaatttaaactctggccacactgcttctcagcctgtgcccttcccatcaccccaccaaaactgtgcagaaaataagggcacaggtccactcaccaaggtctccatgcagaggcagaggggctgggcagctggtggtgtggggaacttccggatgcacgggagttctcggtccagtgcctcgtactctgcaatgacctgccgcaggtactgctttctagggagagagcgaacaggcagggacctctgaggtcagggttcactgccatcacatttggggaggcggaagatagaggtcatgggggccagggacaactcacgaggatttgatgggcctgcccaggctccgagcctgcatctcctctggggtctccaggtccataaggagggctcctgaggacagagaacccagtgtcagctgccctgagccctcctcagccatgattctgcttaaatggccatcaccaattgcttgcccatgccacacccagaatagcttgtatgccagatattgagttactgtctcttagctccaaactccaccccatgacaccggctctgtgatgcctgggttgagactctactaaccacatttctccttcaacagctgggttcctattaggctctgcctaacaggggcgccagtgggagcctgcaaggcaggaggaagcaggaggaacttgctcctttttgcttcctcttctagtcaccccaggcttacttcttcactgtggcagcatcacttcagtaacaacacttgaatccagttttcaggttttttgttttttttttttgagacagagtcttgttctgtcgcccaggctggagtgcagtggcgcaatctcggctcactgcaagctctgcctcccgggttcacgccattctcctgcctcagcctcccgagtagctgagactacaggcacccgctaccacgcccagctaatttttgtatttttagtagagacggggtttcactgtgttagccaggatgatctcaatctcatgaccttgtgatcctcctgcctcgtcctcccaaaatgctgggattacaggcataagccactatgcccagcccagttttcagtttttccaacactctcagaatcagtctcctgattggaacttcacagataacagttctcaaatatggaccctttttgaccaccccaccatcagctaactggtctctctcttatggccaagtgctagttgttccatgtactccattttccccttcccctacaatcctagagttttacccagcacatggcttcccagctagagacaacagttcccagactcccttgcagctaagtgtggccatgtgaccatgctctcaccaatgaagtgttagctggagtgagaggtgtaactttggagtcatttgcttaaaagattactgcttttcttggactctgccctttctcttggactggaatgtggattagcaataacccagcctccaccatgttcagatatggcaagcaacagtatgggaggaactcttatctctaaatcttctcaccaagccaagatgtcccacaaccctgcctttcattacacaagagagaaatacaattctggttcttgaccagctgaggcaggtaacatagcaacaccctatctctacaaaaaaaaatttttaattatctgggcatgatgttgtgtgcctgtagtcccagctactgaggaggctagggtgggaggattgcttgaggccaggagttagaggttgcagtgagccatgattgtaccaatgcacttcagcctgggtgacagagaaagggagaaagagagacagaaagagagaaggaaggaaggaaggaagggagggagggagggacggagcctggtgcagtggctcactcctgtaatcccagcactttgggaggctgaagcgggcagatcacgaggtcaggagttcgagaccatcctggccaatatggtgaaaccccatctactaaaaatacaaaaaagccgggtgtgttggtgtgtgcctgtagtcccagctactcgggaggctgaggcagaagaatcccttgaacccaggaggcagaggttgcagtgagccaagattgcgccactgcactccagcctgggcgacagagtgagactccatctcaaaaacaaaaagagagggagagaaagaaaagagagagatggagggagggaagaaggagaaagagaggaaaggagcaagggagaaaagaaaagaaatacacttctgtcttctttatgatgttgtgttttggggtgtctttgttatagctgctgaaagggagggaagcagacactgacagcccggccctggtgctctcctgccgaacataaaacatttcccgtaacaccaacatcaagcaaggccactctgtgaccgtgatggactgagacaaaaacaagaccacccctgaatcatgtctcaacacaacaaacatgaacattgtccaaaccacaaaaatgaccaaaatccccccctcccagctcagagccgacggctgctttttcattaaccccagcattagctccatctacccctcctggttcccaatgagatgaagattcccagtcatgggcttgcctgtgctttccatcagtctcccatccagagcaaagccccacccccgtgaaccctccccaaagtcacctgacacagcccggctctaacaataagtccttgctaacacccttctactgagacaacgtgtgtgtgtgtgtgtgtgtgtgtgtgtgtgtgtgtgtgtgtgtgtgtgtgctgtctctcattacaataagtcaacacattcaacttggtttaactatagtcagtggtgtgctggtatatgtttcacaacgggctctcctgcacactctcacacacacacgtgcggtagacacttactccagggcccacccccagacctactggattcaaatctacattttcacgggatccccttccagaaatacctaccctcattattttcttccagtcataccggcctccctccatccctcaaacacagccatcccctcctcaagtctgtccacttaacaatataactatgtgcttactgtcccttttatatgccaaacactttaaaaaatactttccactgtggccgggcacagtagctcacgcctgtaatcccagcactttgggatgccaaagtgggcagattgactgagctcaggagttcgagaccagcctggccaacatggtgagatcccgtctctactaaaaatacaaaaaattaggcgggcatggtagcgcgcacctgtagtctcaggtactccggaggctgaggcaggagaattgcttgaaccctggaggcagagattgcagtgagccgggatcgtgccactgcactgcatcctgggcgacaaagcaagactctagtgccaaaataaaataaaatagaatagaataaaatactttccattgcatcctcacaacaaccttccgaggtagtgttgtttaacatatgatgaaacagaagcacagagaggttaagtgacttgcccaaagtcacacagcacaaaatgatagaataaggataaaaatgtaagcatctggatccagtgtgcgtgttctcaatctccccaggtgccttcctctcacctcactctcacctggtctcctaactcctctcgctctccagttaccccagcaaggcaggattttgacatgtagacctgaccctatggccccttcctcaaaaccctcccaggacttttcattgtctgtgggatgaataaagtccaaagtccttccagtgaccataagaccacacgtgatcagaccgtgctagtgtcttaaacctgatcaagcacaatcgtccttttcacctgctgcagtccaaaaacgctgtttttctgcgacttggactctctgacccctcctgctgcaggatcttggccaatgctgtaactctgcgtggatctctcttccccctcatttggctaatcaagtctccctgagggtccactgatgccattcctcatagcacagtatgtttgtactcatagtattgcaattttacctttatttctatgattccctaattacactctgtcttccctacgtcttctgagcaacgtaagggcagggacttgtgttttcgtccccagcatctagcaaagtgccaggcttatagttgtccttagtatttattgaataaagcctgaaatgtgtgcactttgtttgggccctaatttaaacaagccaactataaaaaaatacaattttgagataattagggaaatttaaatatgtactaggtatgagatgatattcaaaaataattataggccgggcatggtggttcacacctatcatcccggcactttgggaggctgaggcaggaggatcgcttgagcccaggattttgaggctgcagtgagctacaatggtgtcaattcatgccagcctaggttacaaagtgagtccctgtctcaacacaataaattaattttaaaaaatagccttgtacaagcgttaaatgaatcaaaaagtaactctagcagcatcaaagatgcatgtgaaaaaatgtgaatacaatagtttctcatgaaatatgacattagaaataagaactatttctagttacaacagtgattttaatatatgtaaatgtattt

SEQ ID NO: 416 - DNA, 6707 bp, Homo sapiens
cgggcgccgccgaccgggactcagcagccccgccaggcagccgcctgtgatgctgccgtcccccgtcgccccgtggccccacaatgacccacagccccgcgacaagcgaggacgaggaacgccacagtgccagcgagtgtcccgaggggggctcagagtccgacagctccccagacgggccaggtcgaggcccccgggggacccggggccagggcagtggggcacctggtagcctggcctctgttagaggcctccagggccgctcaatgtccgtcccagacgacgcccacttcagcatgatggtcttcaggattggcatcccggacctgcaccagacaaaatgccttcgcttcaaccccgatgccaccatctggacggccaagcagcaggtgctctgtgccctgagcgagagcctgcaggatgtgctcaactatggcctgttccaaccggccacctccggccgcgatgccaacttcctggaggaggagaggctgctgcgggagtacccccagtcctttgagaagggggtcccctacctggagttccgatacaagacccgagtttacaaacagaccaacctggatgagaagcagctggccaagttgcacacgaagacggggttgaagaagttcctggagtatgtgcagctcgggacatctgacaaggtggcgcggctgctggacaaggggctggaccccaattaccatgactcggattcgggagagacccccttgacactggcggcccagaccgaaggctctgtagaggtgattcgaaccctgtgcctgggcggggcccacattgacttccgggcccgggatggcatgaccgcactgcataaggccgcatgcgcccgacactgcctggcactcacggcgctcctggaccttgggggttcccccaactacaaggaccgtcgggggctgacccctctgttccacacggccatggtgggtggtgacccccgatgctgcgagctgctcctgttcaacagggcccagctgggcatagctgatgagaacggctggcaggaaatccaccaggcctgccagcggggtcactctcagcacctggagcatctgcttttctacggggctgagcctggagcccagaacgcctcggggaacacggctctgcacatctgcgccctctacaacaaggagacctgtgccaggatcctcctgtatcgaggtgccgacaaggatgtgaagaacaacaacggacagacccccttccaggtggcagtgattgctgggaattttgagctgggggagctgatccgaaaccaccgagaacaggatgtggtgcccttccaggagtcccccaagtacgcggcccggcgacgggggcccccaggcacagggctgacggtgcccccggcgctgctgcgggccaacagtgacaccagcatggcgctgcccgactggatggtgttctccgccccgggggccgcgtcctctggggcccctggccctacctcagggtcccagggccagtcgcagccctcggcccccaccaccaagctcagcagcgggaccctccgaagtgccagcagcccccggggtgccagggcccgctctccatcccgagggaggcaccctgaggacgccaagaggcagccccgaggccggcccagctccagcgggacaccccgggaagggccagccgggggcacggggggctcagggggccccgggggctccctgggcagccgcgggaggcggaggaagctctactcagcggtacccggacgctccttcatggctgtgaagtcctaccaggcccaagccgagggggagatctccctgagcaagggcgagaagatcaaagtacttagcatcggggaaggaggcttctgggaaggccaggtcaaaggtcgtgttggctggttcccctctgactgcctggaagaagtggcgaatcgctctcaggagagcaagcaagaaagccgcagtgacaaggcaaagagactcttccggcattataccgtgggctcctacgacagctttgatgccccaagcttaatggatgggattggcccagggagcgattacatcattaaggagaagacagtcttgctgcagaagaaggacagtgaggggtttgggttcgtgctccggggggccaaggcgcagacccccatcgaggagttcacccccaccccggccttcccggcgctgcagtacctggagtcggtggacgagggtggcgtggcatggcgagctggactgcgaatgggagacttcctcatcgaggtgaacgggcagaatgtggtgaaggtcggccaccgacaggtggtgaacatgatccgccaagggggcaacacgctgatggtgaaggtggtgatggtcaccaggcacccggacatggatgaggcagtgcacaagaaagcaccccagcaggccaagcggctgccgcccccaaccatctccctgcgttccaaatctatgacctcagagctggaggagatggagtacgagcagcagccggcgccggtgcccagcatggagaaaaagcggaccgtgtatcagatggctctcaacaaactggacgaaatcctggccgcagctcaacagaccatcagtgcaagcgaaagccctggtcccggtggcctcgcgtccctgggcaaacaccgacccaaaggtttctttgccactgagtcgagcttcgatccccaccaccgtgcccagccaagttacgagcgtccttctttcctgcctccaggacctgggttgatgctccggcaaaaatctatcggtgcggcagaagatgacagaccttacctagcacccccagccatgaaattcagccgcagcctgtctgtgcctggttcggaggacattcccccgccacccaccacgtccccaccggagcctccctacagcacacctccagtcccctcctcctcagggcgcctcaccccctcccctcggggagggcccttcaaccctggctctggtggccccctccccgcctcctcccctgcatcctttgacgggccctcccctcccgacactcgcgtggggagccgcgagaagagcctgtaccacagtgggcccctgcccccggcccaccaccacccgccccaccaccaccaccaccacgccccgccccctcagccccaccaccaccacgcccacccccctcatcctcccgagatggagacaggcggctctcccgacgaccctccaccccgcctggctctggggccccagcccagcctgcgaggctggaggggcggcgggcccagcccgaccccgggggccccgtccccatcgcaccacggcagcgcgggcgggggcggcggctcctcccagggcccggctctacgctatttccagctgcccccgcgggcggccagcgcagccatgtacgtgcccgcccgctcgggccgcggccgcaagggcccgctggtcaagcagaccaaggtggaaggcgagccccagaagggcggcggcctcccgcccgcgccgtcgcccacgtccccggcctccccgcagccgccgcccgccgtggccgcgccctcggagaagaactccatccccatccccaccatcatcatcaaggccccgtccaccagtagcagcggccgcagcagccagggcagcagcaccgaggcggagccccccacccagccggagcccacgggaggcggcggcggcggcggctcctcgcccagccccgccccggccatgtcacccgtgcccccgtccccctcgcccgtgcccacccccgcctcgcccagcggcccggccacgctggacttcacgagccagttcggggccgccctggtgggggcggcccggagggaggggggctggcagaatgaggcgcgccggcgctccacgctgttcctgtccaccgacgcgggggacgaggacggcggggacggcgggctgggcacaggggcggccccgggcccgcggctgcgccactccaaatccatcgacgagggcatgttctccgccgagccctacctccgactggagtctgcgggcagcggcgcgggctacggcggctacggggccggtagccgagcctacgggggtggcgggggcagcagcgccttcaccagcttcctgcccccgcgacccctggtgcacccgctgaccggcaaggccctggatcccgcctccccgctggggctggccctggccgcccgcgagcgagcgctgaaggagtcctcggagggcggcggggccccccagccgcctcccaggcccccatcgccccgctacgaggccccgccgcccaccccgcaccaccactcgccccacgcccaccacgagccagtgctgcgtctctggggggcctccccgccggaccctgcgcgccgggagctggggtacagggccgggctgggcagccaggagaagtcccttcccgccagcccgcccgccgcccggcgttccctgctacaccgcctgccgcccaccgctcccggggtggggcccctcctgctgcagctggggacggagcccccggccccgcaccccggagtaagcaagccctggaggtccgcagcccccgaagaacccgagcggctgccgctgcacgtgcggttccttgaaaactgccagccccgggcccctgcgacgagcggaaggggtcccccctcggaggacgggccgggggtcccgccgcccagcccacgccggtccgtgcccccctccccgacctccccgagggccagcgaagagaacgggctgcccctgctggtcctgccgcctcccgccccctcggtggatgtggaagatggcgaattccttttcgtggaaccgctgcctccgcctctggaattctccaacagcttcgaaaagccagagtcgcccctcacgcctgggcctccccacccgctgcccgacacacctgcccctgccaccccgttaccccctgtgccacccccggctgtggccgcagcccctcccaccctggactccaccgcatccagcctgacatcctatgacagcgaggtggccaccctgacccagggggcctccgccgctcctggggacccccatccaccaggcccgcctgccccagcagcaccggctcccgctgccccacagcctggcccggaccctccgcctggcacggattctggcatcgaggaggtggacagtcggagcagcagtgaccacccactggagaccatcagcagcgcctccacgctgagcagcctatctgccgaaggtggtggcagcgcagggggtgggggcggggctggggccggtgtggccagtgggccggagcttctggacacctatgtggcctacctggacggccaggcctttgggggcagcagtactcccggcccgccataccctcctcagctcatgactccctctaagctccggggccgggcgctaggagccagcggaggcctgcggcctggccccagcgggggactccgagaccctgttacccccaccagccccaccgtctcggtgacaggggctggaaccgatgggctgctggccctgcgtgcttgttcaggaccccccacggcaggcgtggcggggggtccggtggctgtagagccagaagtcccaccggtgcccttgccgacggcctcctctctgccccggaagctgctgccctgggaggagggcccgggcccaccgccaccacctctgcccgggcccttggcccagcctcaggcctcagccttggccacagtaaaagccagcatcatcagtgaactcagctccaagcttcagcagtttgggggctcctcggcagctggcggcgctctgccctgggcccgaggaggcagtgggggaggcggagacagccaccacgggggagccagctatgtccccgagaggacctcctccctgcagcggcagagactctccgacgactcccagtcctcactcctctccaagcctgtcagcagcctgtttcagaactggcccaaaccacctctgccgccactccccaccggaacaggggtctcccctacagccgctgcggccccaggggccacctcaccctcagcctcctcctcctccacgtccacccgccacctccagggcgtggagttcgagatgcggccccctctgctccgccgggcccccagcccctcgctgctgcccgcctcggagcacaaggtcagccctgcgcccaggccctcgtccctgcccatcctgccttccggacccctctacccaggcctctttgacatccgtggctccccaactggaggggcaggaggctcggctgaccccttcgccccagtctttgtgccgccacacccggggatatccggggggctcgggggagccttgtcaggggcctcgcgctccctctcaccgacccgcctgctctcgctgcccccggacaagccgtttggcgctaaacctctggggttctggaccaagttcgacgtggctgattggctggagtggctgggtttggcggagcaccgagcccagttcctggaccacgagatcgatggctcccacctgcccgccttgaccaaggaggactacgtcgatctaggtgtgaccagggtgggccaccgcatgaacatcgaccgggctctcaaattcttcctggagaggtgatggctggcctggacggaccagccccgtccacagaactcttgagcctgctggcctcttgacctctgacccctgactgtcattctctccccgggccagggactctgttcaaactgcgccctgccctcatctcccaaggcc

SEQ ID NO: 417 - protein, 2141 aa, Homo sapiens
MTHSPATSEDEERHSASECPEGGSESDSSPDGPGRGPRGTRGQGSGAPGSLASVRGLQGRSMSVPDDAHFSMMVFRIGIPDLHQTKCLRFNPDATIWTAKQQVLCALSESLQDVLNYGLFQPATSGRDANFLEEERLLREYPQSFEKGVPYLEFRYKTRVYKQTNLDEKQLAKLHTKTGLKKFLEYVQLGTSDKVARLLDKGLDPNYHDSDSGETPLTLAAQTEGSVEVIRTLCLGGAHIDFRARDGMTALHKAACARHCLALTALLDLGGSPNYKDRRGLTPLFHTAMVGGDPRCCELLLFNRAQLGIADENGWQEIHQACQRGHSQHLEHLLFYGAEPGAQNASGNTALHICALYNKETCARILLYRGADKDVKNNNGQTPFQVAVIAGNFELGELIRNHREQDVVPFQESPKYAARRRGPPGTGLTVPPALLRANSDTSMALPDWMVFSAPGAASSGAPGPTSGSQGQSQPSAPTTKLSSGTLRSASSPRGARARSPSRGRHPEDAKRQPRGRPSSSGTPREGPAGGTGGSGGPGGSLGSRGRRRKKAVPGRSFMAVKSYQAQAEGEISLSKGEKIKVLSIGEGGFWEGQVKGRVGWFPSDCLEEVANRSQESKQESRSDKAKRLFRHYTVGSYDSFDAPSLMDGIGPGSDYIIKEKTVLLQKKDSEGFGFVLRGAKAQTPIEEFTPTPAFPALQYLESVDEGGVAWRAGLRMGDFLIEVNGQNVVKVGHRQVVNMIRQGGNTLMVKVVMVTRHPDMDEAVHKKAPQQAKRLPPPTISLRSKSMTSELEEMEYEQQPAPVPSMEKKRTVYQMALNKLDEILAAAQQTISASESPGPGGLASLGKHRPKGFFATESSFDPHHRAQPSYERPSFLPPGPGLMLRQKSIGAAEDDRPYLAPPAMKFSRSLSVPGSEDIPPPPTTSPPEPPYSTPPVPSSSGRLTPSPRGGPFNPGSGGPLPASSPASFDGPSPPDTRVGSREKSLYHSGPLPPAHHHPPHHHHHHAPPPQPHHHHAHPPHPPEMGGSPDDPPPRLALGPQPSLRGWRGGGPSPTPGAPSPSHHGSAGGGGGSSQGPALRYFQLPPRAASAAMYVPARSGRGRKGPLVKQTKVEGEPQKGGGLPPAPSPTSPDQPPPAVAAPSEKNSIPIPTIIIKAPSTSSSGRSSQGSSTEAEPPTQPEPTGGGGGGGSSPSPAPAMSPVPPSPSPVPTPDSGPATLDFTSQFGAALVGAARREGGWQNEARRRSTLFLSTDAGDEDGGDGGLGTGAAPGPRLRHSKSIDEGMFSAEPYLRLESAGSGAGYGGYGAGSRAYGGGGGSSAFTSFLPPRPLVHPLTGKALDPDLGLAARERALKESSEGGGAPQPPPRPPSPRYEAPPPTPHHHSPHAHHEPVLRLWGDPDPARRELGYRAGLGSQEKSLPDPAARRSLLHRLPPTAPGVGPLLLQLGTEPPAPHPGVSKPWRSAAPEEPERLPLHVRFLENCQPRAPATSGRGPPSEDGPGVPPPSPRRSVPPSPTSPRASEENGLPLLVLPPPAPSVDVEDGEFLFVEPLPPPLEFSNSFEKPESPLTPGPPHPLPDTPAPATPLPPVPPPAVAAAPPTLDSTASSLTSYDSEVATLTQGASAAPGDPHPPGPPAPAAPAPAAPQPGPDPPPGTDSGIEEVDSRSSSDHPLETISSASTLSSLSAEGGGSAGGGGGAGAGVASGPELLDTYVAYLDGQAFGGSSTPGPPYPPQLMTPSKLRGRALGASGGLRPGPSGGLRDPVTPTSPTVSVTGAGTDGLLALRACSGPPTAGVAGGPVAVEPEVPPVPLPTASSLPRKLLPWEEGPGPPPPPLPGPLAQPQASATVKASIISELSSKLQQFGGSSAAGGALPWRGSGGGGDSHHGGASYVPERTSSLQRQRLSDDSQSSLLSKPVSSLFQNWPKPPLPPLPTGTGVSPTAAAAPGATSPSASSSSTSTRHLQGVEFEMRPPLLRRAPSPSLLPASEHKVSPAPRPSSLPILPSGPLYPGLFDIRGSPTGGAGGSADPFAPVFVPPHPGISGGLGGALSGASRSLSPTRLLSLPPDKPFGAKPLGFWTKFDVADWLEWLGLAEHRAQFLDHEIDGSHLPALTKEDYVDLGVTRVGHRMNIDRALKFFLER

SEQ ID NO: 418 - DNA, 6667 bp, Homo sapiens
ccgcctgtgatgctgccgtcccccgtcgccccgtggccccacaatgacccacagccccgcgacaagcgaggacgaggaacgccacagtgccagcgagtgtcccgaggggggctcagagtccgacagctccccagacgggccaggtcgaggcccccgggggacccggggccagggcagtggggcacctggtagcctggcctctgttagaggcctccagggccgctcaatgtccgtcccagacgacgcccacttcagcatgatggtcttcaggattggcatcccggacctgcaccagacaaaatgccttcgcttcaaccccgatgccaccatctggacggccaagcagcaggtgctctgtgccctgagcgagagcctgcaggatgtgctcaactatggcctgttccaaccggccacctccggccgcgatgccaacttcctggaggaggagaggctgctgcgggagtacccccagtcctttgagaagggggtcccctacctggagttccgatacaagacccgagtttacaaacagaccaacctggatgagaagcagctggccaagttgcacacgaagacggggttgaagaagttcctggagtatgtgcagctcgggacatctgacaaggtggcgcggctgctggacaaggggctggaccccaattaccatgactcggattcgggagagacccccttgacactggcggcccagaccgaaggctctgtagaggtgattcgaaccctgtgcctgggcggggcccacattgacttccgggcccgggatggcatgaccgcactgcataaggccgcatgcgcccgacactgcctggcactcacggcgctcctggaccttgggggttcccccaactacaaggaccgtcgggggctgacccctctgttccacacggccatggtgggtggtgacccccgatgctgcgagctgctcctgttcaacagggcccagctgggcatagctgatgagaacggctggcaggaaatccaccaggcctgccagcggggtcactctcagcacctggagcatctgcttttctacggggctgagcctggagcccagaacgcctcggggaacacggctctgcacatctgcgccctctacaacaaggagacctgtgccaggatcctcctgtatcgaggtgccgacaaggatgtgaagaacaacaacggacagacccccttccaggtggcagtgattgctgggaattttgagctgggggagctgatccgaaaccaccgagaacaggatgtggtgcccttccaggagtcccccaagtacgcggcccggcgacgggggcccccaggcacagggctgacggtgcccccggcgctgctgcgggccaacagtgacaccagcatggcgctgcccgactggatggtgttctccgccccgggggccgcgtcctctggggcccctggccctacctcagggtcccagggccagtcgcagccctcggcccccaccaccaagctcagcagcgggaccctccgaagtgccagcagcccccggggtgccagggcccgctctccatcccgagggaggcaccctgaggacgccaagaggcagccccgaggccggcccagctccagcgggacaccccgggaagggccagccgggggcacggggggctcagggggccccgggggctccctgggcagccgcgggaggcggaggaagctctactcagcggtacccggacgctccttcatggctgtgaagtcctaccaggcccaagccgagggggagatctccctgagcaagggcgagaagatcaaagtacttagcatcggggaaggaggcttctgggaaggccaggtcaaaggtcgtgttggctggttcccctctgactgcctggaagaagtggcgaatcgctctcaggagagcaagcaagaaagccgcagtgacaaggcaaagagactcttccggcattataccgtgggctcctacgacagctttgatgccccaagcttaatggatgggattggcccagggagcgattacatcattaaggagaagacagtcttgctgcagaagaaggacagtgaggggtttgggttcgtgctccggggggccaaggcgcagacccccatcgaggagttcacccccaccccggccttcccggcgctgcagtacctggagtcggtggacgagggtggcgtggcatggcgagctggactgcgaatgggagacttcctcatcgaggtgaacgggcagaatgtggtgaaggtcggccaccgacaggtggtgaacatgatccgccaagggggcaacacgctgatggtgaaggtggtgatggtcaccaggcacccggacatggatgaggcagtgcacaagaaagcaccccagcaggccaagcggctgccgcccccaaccatctccctgcgttccaaatctatgacctcagagctggaggagatggagtacgagcagcagccggcgccggtgcccagcatggagaaaaagcggaccgtgtatcagatggctctcaacaaactggacgaaatcctggccgcagctcaacagaccatcagtgcaagcgaaagccctggtcccggtggcctcgcgtccctgggcaaacaccgacccaaaggtttctttgccactgagtcgagcttcgatccccaccaccgtgcccagccaagttacgagcgtccttctttcctgcctccaggacctgggttgatgctccggcaaaaatctatcggtgcggcagaagatgacagaccttacctagcacccccagccatgaaattcagccgcagcctgtctgtgcctggttcggaggacattcccccgccacccaccacgtccccaccggagcctccctacagcacacctccagtcccctcctcctcagggcgcctcaccccctcccctcggggagggcccttcaaccctggctctggtggccccctccccgcctcctcccctgcatcctttgacgggccctcccctcccgacactcgcgtggggagccgcgagaagagcctgtaccacagtgggcccctgcccccggcccaccaccacccgccccaccaccaccaccaccacgccccgccccctcagccccaccaccaccacgcccacccccctcatcctcccgagatggagacaggcggctctcccgacgaccctccaccccgcctggctctggggccccagcccagcctgcgaggctggaggggcggcgggcccagcccgaccccgggggccccgtccccatcgcaccacggcagcgcgggcgggggcggcggctcctcccagggcccggctctacgctatttccagctgcccccgcgggcggccagcgcagccatgtacgtgcccgcccgctcgggccgcggccgcaagggcccgctggtcaagcagaccaaggtggaaggcgagccccagaagggcggcggcctcccgcccgcgccgtcgcccacgtccccggcctccccgcagccgccgcccgccgtggccgcgccctcggagaagaactccatccccatccccaccatcatcatcaaggccccgtccaccagtagcagcggccgcagcagccagggcagcagcaccgaggcggagccccccacccagccggagcccacgggaggcggcggcggcggcggctcctcgcccagccccgccccggccatgtcacccgtgcccccgtccccctcgcccgtgcccacccccgcctcgcccagcggcccggccacgctggacttcacgagccagttcggggccgccctggtgggggcggcccggagggaggggggctggcagaatgaggcgcgccggcgctccacgctgttcctgtccaccgacgcgggggacgaggacggcggggacggcgggctgggcacaggggcggccccgggcccgcggctgcgccactccaaatccatcgacgagggcatgttctccgccgagccctacctccgactggagtctgcgggcagcggcgcgggctacggcggctacggggccggtagccgagcctacgggggtggcgggggcagcagcgccttcaccagcttcctgcccccgcgacccctggtgcacccgctgaccggcaaggccctggatcccgcctccccgctggggctggccctggccgcccgcgagcgagcgctgaaggagtcctcggagggcggcggggccccccagccgcctcccaggcccccatcgccccgctacgaggccccgccgcccaccccgcaccaccactcgccccacgcccaccacgagccagtgctgcgtctctggggggcctccccgccggaccctgcgcgccgggagctggggtacagggccgggctgggcagccaggagaagtcccttcccgccagcccgcccgccgcccggcgttccctgctacaccgcctgccgcccaccgctcccggggtggggcccctcctgctgcagctggggacggagcccccggccccgcaccccggagtaagcaagccctggaggtccgcagcccccgaagaacccgagcggctgccgctgcacgtgcggttccttgaaaactgccagccccgggcccctgcgacgagcggaaggggtcccccctcggaggacgggccgggggtcccgccgcccagcccacgccggtccgtgcccccctccccgacctccccgagggccagcgaagagaacgggctgcccctgctggtcctgccgcctcccgccccctcggtggatgtggaagatggcgaattccttttcgtggaaccgctgcctccgcctctggaattctccaacagcttcgaaaagccagagtcgcccctcacgcctgggcctccccacccgctgcccgacacacctgcccctgccaccccgttaccccctgtgccacccccggctgtggccgcagcccctcccaccctggactccaccgcatccagcctgacatcctatgacagcgaggtggccaccctgacccagggggcctccgccgctcctggggacccccatccaccaggcccgcctgccccagcagcaccggctcccgctgccccacagcctggcccggaccctccgcctggcacggattctggcatcgaggaggtggacagtcggagcagcagtgaccacccactggagaccatcagcagcgcctccacgctgagcagcctatctgccgaaggtggtggcagcgcagggggtgggggcggggctggggccggtgtggccagtgggccggagcttctggacacctatgtggcctacctggacggccaggcctttgggggcagcagtactcccggcccgccataccctcctcagctcatgactccctctaagctccggggccgggcgctaggagccagcggaggcctgcggcctggccccagcgggggactccgagaccctgttacccccaccagccccaccgtctcggtgacaggggctggaaccgatgggctgctggccctgcgtgcttgttcaggaccccccacggcaggcgtggcggggggtccggtggctgtagagccagaagtcccaccggtgcccttgccgacggcctcctctctgccccggaagctgctgccctgggaggagggcccgggcccaccgccaccacctctgcccgggcccttggcccagcctcaggcctcagccttggccacagtaaaagccagcatcatcagtgaactcagctccaagcttcagcagtttgggggctcctcggcagctggcggcgctctgccctgggcccgaggaggcagtgggggaggcggagacagccaccacgggggagccagctatgtccccgagaggacctcctccctgcagcggcagagactctccgacgactcccagtcctcactcctctccaagcctgtcagcagcctgtttcagaactggcccaaaccacctctgccgccactccccaccggaacaggggtctcccctacagccgctgcggccccaggggccacctcaccctcagcctcctcctcctccacgtccacccgccacctccagggcgtggagttcgagatgcggccccctctgctccgccgggcccccagcccctcgctgctgcccgcctcggagcacaaggtcagccctgcgcccaggccctcgtccctgcccatcctgccttccggacccctctacccaggcctctttgacatccgtggctccccaactggaggggcaggaggctcggctgaccccttcgccccagtctttgtgccgccacacccggggatatccggggggctcgggggagccttgtcaggggcctcgcgctccctctcaccgacccgcctgctctcgctgcccccggacaagccgtttggcgctaaacctctggggttctggaccaagttcgacgtggctgattggctggagtggctgggtttggcggagcaccgagcccagttcctggaccacgagatcgatggctcccacctgcccgccttgaccaaggaggactacgtcgatctaggtgtgaccagggtgggccaccgcatgaacatcgaccgggctctcaaattcttcctggagaggtgatggctggcctggacggaccagccccgtccacagaactcttgagcctgctggcctcttgacctctgacccctgactgtcattctctccccgggccagggactctgttcaaactgcgccctgccctcatctcccaaggcc

SEQ ID NO: 419 - protein, 2141 aa, Homo sapiens; identical to SEQ ID NO: 417

SEQ ID NO: 420 - DNA, 27256 bp, Mus musculus
  misc_feature (1)...(27256): n = A, C, G or T/U
cagcagacagaaccgaggggaggaggggccaggaggcggcctgtcgtctccgtaacccagcgcgagaatacgcctcagcgcatgcgcacctgcaggtgggacccgtccatgtgcccgatgggggaggcgagcagggaacagcctatagattttgaatctctcccttcaaaaaaagaatctaggctgtgagaagttccgtaaacactaactcgaagttgttctcccgagctccgcatcagggaccgtagacacagaccccctaaaacaagaggtgacttctctttcctcccccctccctcgggagcagtggtgggccgatccaggccacagactttcgttcgtttgcagcgggtcggagatcgaaggattgagccaattgcggatgaaacgtcttggccaggaagggggtgagggagcagccctttgagttccgcctcgtctctaggcgctggtggggaagggggacgtaggaaacccctgccctctgagccagcagatccgacgcctcggtgcaaagtgtcgagagggcggcgggaaaaccgcccgcccggaccaagggacgggaagcagccgggaagccgtgcgggagggcgcgcgcgtgcgcgcccctttttcagcagtgtggcggggtcgcacgcacgcccgcctcggcggctgggcgcgatttgcgacagtggggggggcggcggcggtggcggcgccggcagctttgcggcaggctcgggccgggcgtgcttgacggcggtgtggcggaggccccgcccgaggcggcaagaacctggagggaggcggaggaacatgtccgagagggaagtgtcgactgcgccggcgggaacagacatgcccgcggccaagaagcagaagttgagcagcgacgagaacagcaacccggacctctcgggagacgaaaatgtgagtgcagccccgcctgtcccgggactgtggagtagaagtttcaggttctttggtaactgcggtcggggccggcgggcgggcggccgtggggggagggaaaggtgtcacccgcgctcgggagaacgcaggcgtgcggggaagtccggtttggctggggctttcgagctgggactgcggcagatagcaagcagaaagttgtcgaggagcggattaaaggtcccaaagggtctgcgaggtctgctcagatcgtccctgcgtgggagacggagtttgtgcctttgggggcttgacgctgattgcgaatctgagattgtacttactggtttaaaaggcatgctcgaggtaagaggttcagttttccccaggaaagttggtacgaagggtcctcgtaaggatccgaggggctgtgtcactgtagagcactacgggatcttcaggatggaaagtatagatctctggcttgggtttacgtgaccgtgcggttatgtatgcccctttccatggaagtgcggtgtgccttcgtgtcgacttttttgtggaaggagtagaatcgagaagatcgtagagggggagccacctttgattaaggcaaaggaggaaacagtttgaaagtttttgcttaatgtaaagggattggaagatttcaggccaccgtggtaaattctgtacttgagccaagtgtgaagattaagggaagtcggtgcttagagaaatgccgccccgtaaaaaaaaaaaaaaaaaaaaaaaaaaaatactatgcaagcgttgtaaagagtactagacacgtgttctaataattagatacttatattctgatagggtagcgtagaggctttggcctttcgtataatgattacttagactttaatgaaaatgtcaaatttataatgaggaaattgtcagggaaaaaatttaagtgaaagctcattttatctttccaaactcctaaggtacattttttgatgctttctaaatttatccatagttgaatgattgagttagcttttgcttcggtcccttcaaagagggacaagacttaacgttttggtatgtgtgtttttgacacattattgaaccctttggggtcctctcagaaaaagggattttttgtttgtttgtttgagttagaatctccctgttcaacatagactctccccatgctgccctcacacctgttaccttccgtgctttaaccctctcagtacctagaagacatttatgcaccaccatatcctgcagaatactgtggatgtatagatgaagcacataagattacaaaccagaccaagtataaaactttaaaatatatttaattttcttaaagggacagaggcataaaagctcatttgtaaagcacatgcctgacatcattggagggacaggttctgtcctcaccaaaggatgtgtgtgtgtgtgtgtgtgtgtgtgtgtgtgtgtgtgtgtgtgtgtgttggggggggnnnnnnnnnnnnnnnnnnnnnnnnnnnnnnnnnnnnnnnttggcctggaatcccagagatcaggcatgtcctgcccactaagtgttgtagcaaaggttcgaggcacaacacctggtttcccatctagaaggagtaatggaaccattgagggaggtgatagggctgatttttaccacctgcaccaattgtaatatgagatgggatttttaactggaaaatccaaaatcggaactttttgcatagaagaacaatcgacaggtgaggagaaacagataatctgtggttttccttttttttaaatcgggatcttgtacttcccgtgctggctaaggtctgcctttgcctcctgggaatcagatgcctggatgaaaatgatttcaatttaagaggccagtttagattgtaacaattaaaacttccactaaaagctaattgtacatttacatcaaattgcaattcaatcacttgtaggtcacctgctttatgtcaagtacttcattccttggttcttggttggttttttaaaaagacatttattttagaccaatgtgaagtttgaaaaatcttaagaactaatgtttttaaatgaattagtggtttttaaataccttttgacacttctatttattttgtaccttttgtaatgtaatacaaaaccaactttagggagcagtaacttagaccacaaaagccgtgggcttcactctaacgactgttggatacactcagacaaaatggttcgtctggaatggatttagggactactactacctagtgatatatggaagtatcagggtgatacttggaaatttttgtattccaaagaagacttaagtatgggttctgaactgaagataagaagtcagaagacttctcagtatttcctgcagctgtatctgtttgggcagattattatagtgtacagagttcagatctctgcacagagtagaaatacatttcatggtaggattcagactatgaggtgaattgcatttacatatagtgtagaccacggagagcttatttaaaatgctaaatggtttatgttataaataagtagtctttgcataacagatgcttttcaaaactacacctaatataggaagtaataacactctcgccccaaatggccaacctgagtagcagtcaaataaattatgaagatgtgtagtaggtcagtcagatttattgaattatgttagtgaaatattgaatcttagcaactgtttaccagcaggagagcagttagtttccccagcattttcttgtggacaagtggcattcctacagagctgtgtaggagtgagtgaggcattgtattggtgtccctggtgtagaccagtgtcttatttaaagcccagatttgcctatatcttccacttctctgcagtctaagttttccactagtattctaatgtataactggattttatgtccccacctgcagccaggagtacaagtctcactttttgcacacttttaattaagtcatctttttaaagatttatttattttatgtatatgagtacactgtagctgtacaggtggttgtgagccttcatatgttgttgggaattgaatttttttgtaggacctctgctccctccagtcaaccctgattgctcaatctctgctcaatccggtccaaagatttatttattataaataagtacactgtagctgtcttcagacacaccagaagagggtgtcatctcattaaggatggttgtgagccacgatgtagttttgggatttgaactcaggaccttcagaagaacaatcagtgctcttactcgcggagcaatctcagccatctttttaatagtgaagtcccttgcttttaaatactgtgtacatctgtttgatgaagctcctaatttatttactgctcacaggacgatgctgtcagtattgagagtggcacaaacacagaacgcccggacacgcccacaaatacgccaaatgcaccaggaaggaaaagctggggaaagggaaaatggaagtcaaagaaatgcaaatattctttcaaatgtgtgaacagcctcaaggtatgtgctggaagctctagacttcagacttctctcagggcatatgggggatacccttaggtctaaactattttaaaactactgttttaaaggggtttctgtttgtttaagttgactattctaatctgtcacacagtcaagtgagctttgtttatccttgttctttactttgaatgtataatagtgagtattgtaggctgttcttgacttatttgttgatccaaataaaggactttaagaaatgttactcttggggctggtgagatggctcagtggttaagagtgccgattgctcttccaaaggtcccgagttcaaatcccagcaaccacatggtggctcacaaccatctgtaacgaaatctgactccctcttctggagtgtctgaagacagctaaagtgtacttacatatgaataaataaataaaaaaaaaaaaaaaaaaaaaagaaatgttactctttatatttcagtaaactataaccaaagccacttctgacatcagttactaaaaaagaactgagtgtgatcttgttaactggtccctagcaaatgccaacacatcttaacttttagttttaaagatattctaaacttttgcttataattaccttttaacaaaacaatgtgacattttttaaacttctgggttttgggtccatccacatggctcagtggataagggtgtttttgctgccaagtctgacaacctaactttaatccttggaacccagatggtgggtggttcaagagaattgattcctgaagtcattctctgattgccacgtgcctggtaagccggcctttacacacacacacaattttttaatttatttgtattttatggacattgctattttgcctgcacacatatgtctgtgtgagggggttcctgcaggtaggtgttagattgggaagcaagctgcacaaagagatgagagtgaacatttggtacaaactgacttggttatcttggatccgacgagtctaactggatcggggaaacctaacaccaggtggttttattgtaggcatatcaaacagaatttggaagagggtctccaggtagcaataattcccatactcatttcagttccaggcacacagtaaaggttaaggtatggctacgtagaaactctttcacagagtatatgtgaccttgggtgtgggttctacagctaaaagtcctagaatctagtgtggtctctgacagcatagatgttagcaggccttaaagtacatgtgacatccacgagggatgggtgagggaggaaagagcctaatcacagtagggagctagggtgaggtctgtccctattgagtgcagtataacaggaaggtcaccaggtctttaacaacccccacttctctgctttctgggtggaatgcaggtatttgattttatctcctccattggagagacacacctgcataattaacattctgtgtcctctattgtgtggttgctgggaattgaacccaggtcctctggaagagcagtctttgctcttaactactgagccatctttctttccccaaatcaatgtgttttctgtttttttgagacagggtttttctgtgtagcactgttgatacaaaccagacttgaacatgcagagatctccctgcctctgcctcctgggtgctgggattaaaaggcaggggatggttttggtgtttgttttgttttttttaagatgggggtgggctggttttgttttgttttgtttttttaagatgggggtctccctaacagaccactataggtaaggactttttattttaaatggtttatatatacatttactgtttttctaaattttatgggcatttttcccttgaaaatatatgtatatttatatattatgtttattatatgtttataatatatattctctcctacagatgtaagtttaactttgtgcgagaaaacattgagtgggaatgaatatttagaatatacaaataatttaaaaaattaccctctccaaaaaaaaaaactccgtccaaatctagtcaataaacaggcaataaaatgaatacacatttcaaaagataaagtaggaccatccagatgactcagtgggtaaaggccctggccacataagcttggacacctaacatcatccccctaacccacattaaaaaaacagcgtcatgggctggtggctcagtggttaagagcactgactgctcttccaaaggtcctgagttcaaatcccagcaactacatggtggctcacaagcatccgtaatgagatctaatgccctcttttggagtgtctgaagacagctacagtgcatttacacgtaataaataaataaatcttaaataactttatgttatcctctgacctctggagtctattttccctcccccttcacccacacacatgcacaataataatgaatttttataaaaaccacgagtactgttggtgaatagatagatgaaaatgttcaccatctttagcaaccaaggatatgggaatcaaaataatacagattctgcctctcccctgtcagagtagttattgtttttcactgcagtgaggacagctgtatactcctggtggggatgtaaaatagtacagccacactggacgtcagtgtatggagtcttagaaactacaagtaaagctaccatatgatcttgccactctatgtctacatatcatagagaaacctctttccacatttgtcataaatattcacaataatcaagtaccacgtcaggtcagcttgggtgcccatcaacagctgagtgaagaaatgtagatacagagagacatgtgattcagccatgcaggatgtagctttagaagggaagaagggaaccaaggacaataaagggtaatacctaactaaattcagttaaaagttcatgatatacagaaaaaaaaagtcataaagctcactgcttctactacaaatatgtactaaagtaccttaaaaatgaaattggaaaccttttctcaatataattttaggtaaactcttagcaaagcataagaaactggccttttctggtctggagcaaacttttagtgctcaccatggttaactgtgccctgtaagaggtgtaaacgaagttccattatagtttgttgatataaaaacttacttatattaacttagcagttttatatactgtctctagaggatgtttttattgatgtatgtaattgtgtgtgtgggcgtgtcttccataggggtatgtgcatgcgatggaggagggttgggttcccctgggactgtgccaggctgttgtgagtcccccttgcccccaataaacacagggtgccagagctggagtagggtcctgagttacctcttactataaaagacacttttaagtgtcttttaaatagttccaaagtctgaagccctggattttcaagagataagaaaataaaagctagaagacattaaaagtagaagcaagaactttaaagtgaatttagaagtcagtgttgaataccaggagattgcaataaagccctaaatctgaactgcaacttagaaaactgctggcgactgcgtagtctaagctctgcttggagagcgagcactaaagacagaaatctcacaggttgttctccccgtgtgtatctgaaggcataatagttcattccctctgagactccactgttagtcttgaggggttgatactttcctctagtaatccaagtccaaggttataaagattactcaagataatttaaatttgtttgactaggactgactaagaaaagcagtggcggggctggtgagatggctcagtgggtaagagcactgactgctctttcgaaggtcctgagttcagatcccagcaaccacatggtggctcacaaccacccataatgagatctgacgccctcttctggtacatctgaagatagctacagtatacttatgtataataataaataaatctttaaaaaaaaaaaaaaagaaagaaaagcagtggcaagaatgaggtgtgatgtgctctatttccaagggaaaaccaaacacaatccaaagccatttgttggtttgttagatgagagaaataaccatgtcctctgagctcaagaatttacaatacatctaccaaaagttcccaattgatcatgattcaggaaatgaaggttgggtttaagaaagcaggcagataccagagtgttttcaggatacatagctgtttgagtcttcattagaaaacattctcatattttaagatctggaagcttgggtggtgttatagctttaatgtcagaagtcagtgtgtgcatgatatatgtcttagtgttctattgctatgaagagacaccatgaccgtagcacctcttgtaaaagaacgcatttagttggaacgtgctgacattttctgaggtttagttattatatcatggctggaagcaaagtggcatgtaggcagacttgatgctggagaggtggctgagagttcttcctttggatctacgggcaggaggaagagagagacactgggcctggtgtgagctttggaaacctcaaggctaccctagctaaacactgccaaaaacaaggcggcagcacctaccccaacaaggccacacctcctcatcctttcaaatagtgccacttcctaagcattcaattctatgagcctatgtgggccattcttagccaaaccacccaagtatataaggtagtgaatgagctgaatttgggggagagaaggaagggtaagagttagtttgctaatggtttttgtttttaaaaataagttaaatttttctttcatggtttatattttataggaagatcataaccagccattgtttggagttcagtttaactggcacagtaaagaaggagaccctctggtgtttgcaactgtgggaagcaacagagtgagtgtcgggtgggggcaggttggcaatactgattgttacaactagagtgctaaaatggaatgattttaaaatcaattctggatactgggttaacagtatgactctttgtgtaagaaactcataagaaatcgtacatatgtacagggtatcaggtgatgtttcagaacatgtataatgttgactttatgtgaggttctttatttttaaagttttagactttaattctctttgaaaaagttgtgattgcatggatgaagtgtatatttaaatgtttggaaatagaaattgttattactaggctattaaatatagtctagcattacataaaatgtgtgaggatttataaggctttggtaagtttaaattagtttctgtaatgtccttaagttagaattgcaactagaattttttttttcttttggtttttcaagacagggtttctctgtgtagccctggctgtcctggaactcactttgtagaccaggctgtcctggaactcagaaatccacctgcctctgcctcccaagtgctgggatcaaaggtgtgcaccaccacgcctggcacaactagagtttttaagagataaagagaatgtttatctgagatgacatgcatatttttgtttctttaggtaaccttatacgaatgccattcacagggggagatacggttattgcagtcctatgtagatgctgatgtatccttttctgagtgtttttatagccctggtttaagaaatttgataagtacatcagaactttgaaaacgaattctctaaagttactgtcccatagctaggcgtgctgtcacgagggcgtcctggcatctacctgatgttggacttgttaggaggtggatgtgtgatgaagtgggtaggggtaagatgtgtgatgaaatgggtagggtaagatgacggaagaaggagcattagaaatccatgagaagaattattagcagagaccagctaaaacctcatggttattgatcatgcttagagttttacaattttactatagttctaatgcttaactggaaatccttgtatggatttgatcaatagagccaatggaaaaaataatatgtgtgttgttaaggaaataaaatattggtaagtgagttatgaagaaaaagaagatcttaaaagccaaagattagctcacaggaattttaaaaagctgaatgttaagatgtttcttcagacccattggaagaaatgtgacaagtggtgcagggtgacactgaatctgcagatgacacagaaatgagtgaatggtttccatgttagaaaggtacaaaatgaaccatgcataggttcatagcttatcaggacagagggtcagtagcaaggcaaacctgcaggcttgccacctagctttataaataacgttttactggagaacagttatgtctacatgttcaactgctgtttccggctgttttgggactacatcagtgcagtagactacttccacaggcatctagaaagaagtgtgatggagtgagggacgaagaaggagctcagctggtgtagattttagcctaaaagtgccactgtgaatatgcatttagtttttgagaatagggccttggtgcgtagccctagctggcctttcatttaagaatatcctgcttgtgctttttgagtccaggtcacctgtctatcagtatgcaaattttgtgtaaagaaaaatgagcacttaaatatccaaactcttaccagttgtttggaaggttccatttattgtaaacatttcattaactcattttttttcataattatgtttcttaactgtggtatttctcaggcagatgaaaacttttacacttgtgcatggacctatgatagcaacaccagccaccctctattagcagttgctggatctagaggcattataagaataattaatcctataacaatgcagtgtataaaggtgcgtcttctggtcaaattgtagagaatgctacttttgaattcacatctggttaaaacttcataaaatgtctttaaaatgaatgtaatcactaacttgcttacctaagttgatttataccttgattatatagtctttttctttattacatttatttattatttgtttgttggtttgtttattttggtttttcaagacagggtttctctgtatagccctggctgtcctggaactcactctgtagaccaggctggcctcgaactcagaaatccacctgcttctgcctcccgagtgctgggattaaaggcatgtgccaccactgcccggcaggcgttgcttgttttaaccctgggggtcattggcatctcttatacaatgctattagctgagccttggctaactggtaccattttccttcctataattttgttgggtgatattagtatgtagccatggttgagtgagaactacttgaagtgcattttttgtttgggggggttgggaggcagagggcagcagggctggacactgaatcttgggccttgagtgtactaggctattggtttgcccccagccttatgtttctcttaaggtttatgaaagaaaatttattggcttttgagatgaaatgaaatgttttaaatttattatagcactatgttggccatggaaatgctatcaatgagctgaaattccacccacgagacccaaaccttctcctgtcagtaagtaaaggtaagctcacaagaaacaaaaggtcccttagttcagtttgttttggaataattgttagaagtgaaaggttgtgttctgagaatgcatagtttaaattaaaagaagaaatttagtagaaaaagaaaagcctttattaacatctcataaaccaagccttcaaaaataggtttctgcctgttgatgtcagacatagtgagattatgtcatcctcgactcgactcttactgttttgtgatagttgtagaaccttatcctcaagtgagtaattgctttatcataaatgccaaagttaaggtttttcagatgtttttagtagctccgttctcaccagtctcttcaataatgttaaagggatgttgcatgttaaataagaaaagagactgatgaggtggcacagtagataaagcctgaccatcctcagaacccatgtgtaggtggcaggagagagctggcctccacacacatgccgggccaccccaggacaactccctctccccccaaaataataaaggaagcactgcagtgaagagccatactcttattattaaaagattttggatttgaaccccctatagattaactataacttgcctccttgttttttgagacagttttctattctgtatcccagagtagccacaaagccacagggaacctcaaatcccacccttcttggtgctgagggtcaggtgtgagccactgcgcctgcttcagcttccttgagtggctgcgttccctggcgagaaagcatggcattgctccttgtgcctgcactgctgctcaaagtttacctggatttatacccttctcgttttgttttaatgtgtatcagtgttttgcctacatgaatgactgcactacatgcacacctggcactcagggagaccagaagagagttagggcccttggaattggagttaacagttacttgttaagttagtcctgggtcctgggaaaatgagccagtgttttaagtgctgagccatttctccagctctctctgctgttcttaactgtttctggctttctaatattcattagcttgttttttctacactcttatttgcctcatctccttatatttatacttctaagtatgtactttaaaaatcttttttttatgggtagatgtatatggttatatgtgggtatgtgcatgtgagggcagatgcctacagaggccggagacattagatactctgaagctgcaattagaaaccattgtgaaccactcgatacagatgctggaaactggactcatcctctggtagagcagcaattgctctttcttgctgagccacctcttctctccctaccatgtttttgttgtttatggagagatgggatctccgactctctagcccagattggctttgaagtcaagtcctcttgctcaatcagacccctacccccacccgatagtcccttgaggctgagaatgtaggtataaggggaggagaattttgcctttttatttcagtgctgaagcttgaagcccaggccttggtgagtgctctgagcaacatcctcaatgtctgctgcagttgtcattcatttttctgtttgtttttgaggcagtctcagtatgtgagttaataatctacatgtaacatattttaagttgttatatatcatcgataatatgcttagttttactgtacataatctaaatcttcatggattttacatacatgttaatggcatactaaaagtttgcagtaggcaagtgataaaagtctcccttaactttgtgtgtttacattagatcatgctttacggttatggaatatccaaacagacactcttgtggcaatattcggaggtgtggaagggcacagagatgaagttctgagtgctgtaagttgaatctggggtaatgatcttgggtttacatagagtgactatctcccattaaacttttctcattgtaggcaaacatgtctgcttcatgcagcctgtcaggcagtcatttcatccgttcaacatagaaatgctgacctatacataaaggcatagagcaagtgggcctctggcagttttggtcttacagaatgactctgatgagtgccatgagaggaagaatattgcagtcattctcggggtgggggtggtggtggtggtggtggtggtggaggtggaggtggtttttggagatagggtttcaccatgtatttcagctagtgttgaaatcttcctcctcctccagcttgctgagattacaggcatggattcagttgggattacaggcatgctccactagacccaacttttttctttttaatccaaaacccaccaattgaattttccttgttcttgttgttaaagaacaagtttatctaactgtccttcagaaattttttgtttgaagttgaaatcagtaattctcttggggaagtctgtgtgccaccactgcccatggggaagtcttctgatgtgcttacctttgcatttcagagtgcctcttccctgggttgcatgcaagaccgaccagtaggttatggttataaaaaaaaaaaatgtagtttgtgctttggcagcaaggttttcactatactccctctggcctggaacttgctatatagagcagattggcatctgagtcacagatagcctgcccctgcttcctgggtgatgagaataaagcctgggccactcattttgcctgcctgcctgcctgcctgcctttttttttttttttaaagatttttatttattattatnnnnnnnnnnnnnnnnnnnnnnnnnnnnnnnnnnnnnnnnnnnnnnnnnnnnnnnnnnnnnnnnnnnnnnnnnnnnnnnnnnnnnnnnnnnnnnnnnnnnnnnnnnnnnnnnnnnnnnnnnnnnnnnnnnnnnnnnnnntttttctttctttccttcctcccttccttcctttcttccttaatttcttaatttctttttaaaatacttctttattgtgtatctatgtgtgaataggtggatgtgcacttgccacagtgctcgcccatgtcgtgatcacaggccaactctctggagtctcttctctgtttctgccagggataaaaccgaactctggtctatgggctccgtaacaggcctccttactggttatgttagagataagcctgtactgtctttatgctgatacattgtaaccaggaacctgtcagctttaggacatgttcaagtttttagcatttcagcctttgcatggtaactcacttgatttttttattctttctaatttaaccacttaaagatgaattactttgaaccgtatatggcagtgccaaaatactgcattagttcaagtttatctgcttttgagaatcatgacacctaatactaccatatcagcttgtatatttctagaagtcgtggtatcattctacaccaggctctgtatgggagtcatcaagagaagtctgacttagaggggctggagcgatggctcagtggttaagagcaccggctgctcttccggcaggacgtgcgttcagtactcagttgcagagtattttgtgtcctcttctgtcttccaagggctatgttctgtcctccaacctttgtgcatgtgccatggctcatgtgtgccaccttccccaacacatactacaaatacattctttaattttttgatatttttaaatgtttgtaatgtgatactttattgtgttactgtgaattttgtttatattcacccccaaccttgattcctcctagagccttccctgcctttcttcctcccttccctccttccctcctttcctctctatacccagtccagtttgggttagctgactactactgggcatggggcctgctctgaagtgaggtgtcacaccactcaaggtggcaatttaatttaaattaaatttttaaaaaagatttatttatttatttatttatttaatgtaagtacactgtagctgtcttcagacactccagaagagggagtcagatctcgttacggatggttgtgagccacatgtggttgctgggatttgaactccggaccttcgaaagagcagtcgggtgttcttagtcactgagccatctcaccagccccttaaattaaaatttaatttaaaattaaggaagatatttcactatagttgaatagatgaatgtaagctcaagtaacttaccttccattttgcactctagtgatgagaaagtaattagaattttgaactatagtctgtgacttctggcaagctgaggcgatgcctggaatgtggttagtattcctggattgaaatgtgctcaccaggcggtggtggcacacacctttcctcccagcactggggaggcagaggcaggcggatttctgagttcgaggccagcctggtctacggagtgagttccaggacagccagggctacacagaaaccctgtctagaaaagccaagaaagagccgggcgtggtggcgcacgcctttaatcccagcactcgggaggcagaggcaggcggatttctgagttcgaggccagcctggtctacagagtgagttccagaacagccagggctacacagacaaaccctgtctcgaaaaagcaaaaaaaaaaaaaaaaagaaagaaagaaagaaaagccaagaaaaagaaatgtagtactcatgttactgaggcactaggtgaaaactggaaagtagcatttgaggctataaattacttatttgcacttttctgctttattcctaggattatgatcttttgggtgaaaaaataatgtcctgtggtatggatcactctcttaaactgtggagaatcaactcaaagaggatgatgaatgcaattaaggagtcttatgattataacccaaacaaaactaacaggtgacagttaggctctgtgtgctcagtagatgtgaaatcgtgtctgctgctgcactagtggccattcttctaatatcctataacctcaggtatcatgtagccgctatcagggcttacaaataaatggaaacccttatttaaattatgttttcaatctttgaattgtcttcatctaatttattggcacatttcagttactttgatttatgtatacatgttcttaactcattatgttggaagtataaaagttaaatcacctgacctagtgtggaatagagaaggggaaagacataatagtaaatcctaactcaatatactaaactataatctcagactggtttctagctatagaatagttcctgttagtaaaatattgtcctgctaggaatggtggtgaacacctttaatcccagcactgaggaggcagagacaagagcatttctgtcatttggaaaattgcatgccactctggtctacagagcaagtttcaggccacttaggcctactacctacatagtgagaccccctagatacgtggataggtaggtaggtaggtaggtaggtaggtaggtaggtaggtagatgttgatattttcttgtaaatgatgcttccttcattaaatagaaccttcagattgtggagtgttgcatgtctccatggtgaggagtctgtggagttgttgcatgtctccatggtgaagcaagcgtctgtatcattgagatgcttcccctgcttctcttgtgaaggctgctccaggtcttagtgtaactgcctcttagtacttacttggttgtcagagatactttcactataaacatgtgtgcacgtgttatacgttcactacaagcattatatatttaaatatgttaactttgcatttttattttagcaaagagttattttcaggtttccaaataagtttattaataggctggttttacttttgcaagctttagtgaacattggagtgcatttatcatactttactgacttttaagaattagtgcaacttttagtttcaatctttcaacatcaggtgcaatggtcaatttatgttttaaaatagtttttagatctctgaaataaatataaattacatttcacagagttgccctggactttttgaaagggcattaactagtaatataatatgcatttgactaaaaagcaactgagattgtaacagttatgaattcatgtcagcatggcttggtgagatggataagagcacttgctgtaaaggcagaaagacctgagttcaggtcctcagcacccatgtaaaaaaacctggtgtggttttgacttgctgataaacccagggttgggcaatagagcttgctagctgggcagtctaagaacccactggctttaggttcagtgaaagaccttagttcagaaacaaggtggagatggagataggaggatgccagccagaggttctcctttaatctctgcaggcacattcatggacacatgtgtacatatggttttattgttttgttttgttttgtttttggcattgataacatcttaccaggagatcctaaactttgaattggagagagtttgagacgatgagcttaacctgtttttttttttaatatatatatgagggggaaagaaaacatgattgcctcaggccataatcnnnnnnnnnnnnnnnnnnnncttggtgagatggataagagcacttgctgtaaaggcagaaagacctgagttcaggtcctcagcacccatgtaaaaaaacctggtgtggttttgacttgctgataaacccagggttgggcaatagagctgctagctgggcagtctaagataaacccagggttgggcaatagagcttgctagctgggcagtctaagaacccactggctttaggttcagtgaaagaccttagttcagaaacaaggtggagatggagataggaggatgccagccagaggttctcctttaatctctgcaggcacattcatggacacatgtgtacatatggttttattgttttgttttgttttgtttttggcattgataacatcttaccaggagatcctaaactttgaattggagagagtttgagacgatgagcttaacctgtttttttttttaatatatatatgagggggaaagaaaacatgattgcctcaggccataatccacatccaatcacagttcgataattaacataaaatgaatcacagggatggggtgtggctctagttaaacagtccagcaagggtgatgttgtggttgtggccctctaaacaaagacagacagacatcatacaatcacttgggagattagaatttaccacctccagaatatcttgtttattttctcacaaatacattttagcaaaggaggaggtcgagggcagctttgtggccgcacttcgttctttacatgggttcctgacaggcactgagcgcaggtcaggcttgggaggcaagtgcttttaccgtctcacctaccccaaacttgaaatcctgagtttaaaaaggacagtagagcattatcatggaaaactgatggtgaaagaaaatacaactgaaaaatggatacattggctctaaagaacaggttgacagggaagtcagtggtcagagtttatgttgtggagttttacaagttgaactggaagatgaagctcagcaggcagagtgcttgcctggtttgtgtaaagccctaggtttgttcctgactcagcaccgcagagtttataaatcccaaactgaaaaacagtatgatcctactacactttttttcttttaacttttacatttccattcttccttcaggccatttatttcccagaaaatccactttcctgacttttctaccagagacatacataggaattatgttgattgtgtgcgatggttaggcgatttgatactttccaaggtatggaacactagagttaagctgtacttgcattgtgcgtgcctgcgtgtgtgtgtgtgtgtgtgtgtgtgtgtgtgtgtgtgtgtgtgtgtgtgtacactgttcaggaaacagttacttatgaaatttattaaaatcaatagtagataataaacttttaaagtcttattttggtagatttgctgaaatatttaaggaaaaagaagtttgctaggtgctctctacactctatagtgaaaaaagaagcaagcttagaaggttcaactgtctgggaaccagagatgttgaaataataattaaaaccaataggaatgttttttgtttcttcagtaaatccttatttgcaagaagaggtggctggagttgattggcttacaggctgcagtttgctctaccttgttagtggatatagatacacagccctctgtctccgtggattccacatcttctaattcaatctatgatcagaagtatttgaacaaaagaattgcatctgtactgaacttgtacaatgatcttctcttatcattgagtaaacatagtacaactataatatacacatgtgttgcattgggtttcatgagtgtagtcatgactaaaggtatgtgggaggatgtgcacgtgcgaagctgtttcaggaaagtacttgatcctgtagcctttggtatctgcagccagttcttgtgtcttgctttgtttagtttgttttttccaagtggtcatcttgaggggtgattggtgttgttaatggaacatgtaggcttatcagagtgggagagtctgcctggcttcttgatgtgaatgtcaaggtgtcttacatcttaggcagaacttagtttgatttttttttttttttgtccccctttttatttcctttcggatttaaacttactgttgttggtttcattttcccctccttaaactcttcatcttgggataggctacaggaagttttaaaagtagttcagagaggtaaagtgtggcatcacctactttctctcagtaggcatgctgctatcataatcattattgtagatttttgtattttatgtttatgagtgttttgccctcatagatgtctgtgtaccatttatgtgtctctggtgccctcagaggccagaagagggcattggatcacctggaactggagttaaaaatcagtagttaacgctgtcatgctctcaaaacctagacaatgaacatcggtatgctttgtgtttagtgccttgtcgttttgtcacgtcacatgaattttgttattttgagaatgctgcatacagttgggggcccttaagattatttattttcctcaataggattcgctggagagccatattttgtatagtctagtgaagccccccaaccctggggattaaaggtgtatgccgccattctcaagcttcatcaaggatacttaataccatatcattggctgtgtttgtttttccagtttggaactacagcacactctcagataaaccgtttgtgtgtgtgtagacacacatatatatacatacacatatatgtatatgtatatatatatatatatatcttatgtaggcttgactttttgtatctctgggataaatgtttagagtagttgttgaataatggttgactttttaagaatttgtcgaactgtcttccagagtgccattttacactctcatcagcaatatatacacagtccagtgtctctgtatcattgatattatttaatactaccattatttttagttgttccaatagatgtgtagtgaaactttatcctggtcttgatttacactcactgctagtaatgctgctgaacatgtgcttatttaccatctgtattagggttctcgagaggaacagaacttacagaatgagtgtatatatatgatttattagaattgttaacccaacactggctgcctatgaatgaaaggtccaagaatccagtagttgtttagtacacaagactagatacctccactgatcttaagtacacaacacaatttcaaagaatgccagtgaaggaatgaacttgccatcaagagcaagcaggcaaagagtgcatcctcctttgtcctttctgtgggctgctagcagagggtatcatccagactaaagatggatcttcccacctcaaagattctaattagaagtggctcttcttcaaatgatttgagagagagaaaaaaatccctcacaggtgtgcccagccatttgggatttagttaattctagatagtccagttgtatactagacagtcaagtatagccatcacaccatccatatccttttggggaatatttcttggaatctttagctggttttctaatggattaggttttttgtttacttttaattgttgaattctgagtgttctttatatattctaagtatgcatctctgtcagaagcatggaaatattttcttccagctagtggctagtcttttcatgttcatagtagggcctttggctaagaaagtggcctttttaaaaataagggggggagggtgtctgtgtgtgtgttgttgttgttgttgttgttgttatagtgcaagtggaacttagagggcagttttggggaatcagttctcacattgtaaggatatctctcttcttcttttcctccctccctcctttcttccgttcctccctttcgtttttagagaaaaagtttctttgtgttgttgtggaactcactatgtagaccaggctggccttggatgactctactgctttctgcatcctgaggcctagggttaaagaaacttatgggatagtcagtcaaacttagcaaatcctcttagctcagccccctgagtgctgggattgcaggtatgagtgaccatacctagctcatttaagtttgcccctgtacttcctataggttatttgaacttttattttgttcattttgttttgggctatttcctcctcttccttctctcttcctctttcccctcccccctctttctccttttctccctcctcttcttcctctcctcttcctcttataattttttttgttgaaacagggtgtctcaccatctacccaagccagccttaaacttgctatagcccatgctaacttcaaacttctcctcagtctcccaagtacagaaactatgtgacacttaatttgagaatcacctctttatgtacagcttatctggcttactttttagtaatgtgtatgtgtgtctgtgtatgcaggtgcttgtgtgctgctgcactgtgtggaagtcagaggctaccttcgagggtcttttctcttttgcatagaatctgggcattgcactcagcttgcaaggcttgtgcatggaggacttttgcctgtgtgccatcttgctggcccgtgtggagcatatttctttgtgtagcagctttagaggttgctttgctttagatgtcatatttcgaatatgtaacctttcagactaccatatgttggcatattggtaatcagaggaagtataggacccttcccttgtcattgctttgtccccagcttatgatctaattatcttaagtatttaacttatatttgagaaccatattgggttgtgtaatttttgcagtgaaacaaatttggaaagtgaacatgggactgtctgcttttttgttttttcctttctaatttcggggtgccatcctaagccaggaaacttcctgcagctattcattagaggtctactagtaacaaattctcttgtttttttcttagtttttctctctactctagaatatatctattaaatacatatttctggctttacagtgccacccctctccccagacttgaaaagtatttgccctttctctggcctgcatagcttctaatgtgtaatattttgtcattaacctcccaaccccaaacttatttgtagttcattgatctggaatatgtggtggaattatatattagagaaatattttgtctcatactttgaactataacactaatgacactgttttcttcccttattttgagacactaatcctcattattaatatattagatatttttggtgcgcacacacagtgctggtcttattttgtccctactctaacactaagatttttgtcagagatcttgtcagatggctgtcttcctcctccatttgtttcttgtttgttggatgatattctatcgggttgtcttgattggggattctccttctttgctcgtcgagccggtcagttaagctttcattgtgtttactgcattagttacttggtgctgagacagaatgcccagcaaggcaatttaagagttaatttggctccagtttgatggacagtctcatggcatggaagtcgtggcagaaagcagtgtaaggcagctagtgcatgcatctttattgagaaacagagcagtgaattctgctgcccattcactttcttaagtcccacgacgtaagttggtagtcaagattaggtatcacagttatatttttactggggcctgaatgtttcagtattactagactctggaaacttcctttttttcattcacccaggcatttgtttgcttgtttgtcatttgtcatttgatggctatcaatcccagggcctcacacctgctagacaagcactcttccactaagctggccctcggatcttgggatcctctcttgttagcaggctttctttattatctacttagttgtggaagggagcaattcagggctgccttgcagtttgccaggtgaaggtagtaattcagacttttcactgggcctcagccgatcccaccttaaaggaggcgggccattccttatcagctgcttacttagtgacctctactggcgctggggatagtgttgcactcttaacccctgcggtggtcattgtaatgtcctggctgccaggccagagagttacattactgctacagagggagaagagagcccagaatgtacttgttaggacctaaggaatggtttctcaagagcaggttcaaatgtctcttagcattaagactttttaaatctgaagaaggtagagaacaacgttgctcttcccattccaatctttctgtggcgccgtggttaaactgtttaaatgcagagacctctgtaggctgccatctgtgactgaataggtcccctgaaaaactctagggggcagggctgttaatctgggttctgttgaggttggccagccacggaggagaggttggtgatgagatgtttagcagcatctctggctactgtcaactagaggccagatacagtgtcaaaaatgtggtagtgtggaccactggctaagtgagtgattggaataatgaccacagggaaattgttttaagtagaactgtcacaggttacggaatgtgtcattcatgacctgttagacccgatccccacatgagcatcttgagccactttatagcctatggtcctttcagtgaactaaaatcaatttcctatgatgttatctaagcatctactaaatggtgcccacactgtgtataaagcctcagtagttaacaaggtataggtagtcactcctgattaagtgtgcattgggaaactgaggaactatgaaccaatggccagattttaaaagccttctaattttctgtagcattcctcaggtctctgtatgcgaacgtatacaaagctgaacttaatttgttctgaggggagaattcttctgaattgcttaattctattgctagtcagatttcttgtcctcaggtgtaagccttgacttgcaaaacagtttatagtcttggaaagtaggctctctgagctattctaaaatggtaacagttttaattttactttttgaaatgcagttctaattatgtgtctcttatttctcttttagtcttgtgaaaatgccattgtatgctggaaacctggcaaaatggaggatgatatagataaaattaaacctagtgagtctaatgtgactattcttgggcgatttgattacagccagtgtgacatttggtacatgaggttttctatggatttctggcaaaaggtagcacataattttacatttggaattgtcttctgaaacactgtaattctagcctctcctgccctgtctccctcctcaccctcacaccttggttgtcccaatgctgtgacttgctttggcgacctgcaagcattatctgcagaaggggcagctaggtgtcagcactgtcactttcctaatcctgttcctaagatacaatgctttaatgtgtttatcatacacagcttttttttttttttttttaaagaaaaacttagaggaaaatcagcatggaaggtaaaataactatacctaaagtgttaaaggaatctgccgctgcagttttgtcagattgactgagcatttctctaacagctttggaagagtatctcactctttctgtaactctgtgaagtagaggaaaagtacaacactcgtagtaaaactaatgccacccatgaaatgtcttacttagagccttatttttttcaagattccagggaaatattaattcttactttttcttataaatcagtagcatagatgcaaaacttagtcagctgggcatcaaggctggagcttgggcttctaagcaaggaagcgccctgggtttcctggaataccttagagcctggtgctctgttaattttatgtttccaattctatttacacagatgcttgcattgggcaatcaggttggcaaactgtatgtttgggatttagaagtagaagatcctcataaagccaagtaagtatagacatttctaaaatggtctaaattgtagctttcttatgccatccttaaatcattaatttttgtggtgctgagggtcaaactcagggccttccttatacctgccaggcaagtgcactaccactgagctgcgtcatagcctaatttcaattaacttatttatactgtggtgacagaaacatataccaaacgtgatgaaatttgagaatgaatccttgggggagggtgggtgttcgagacagggtttctctgtgtagccctggctgtcctggaactcagaaatccgcctgcctctgcctctgcctcccaagcactgggattaaaggtgtgcgccaccactgcccggctgggaatggattcttaatgaagataggctggttttatactacactttttcttcttcgttctttaaggtaaatgctgttctgtttgctgtttaactcttatcatgtttcccctagatgcacaacactgacccatcataaatgtggcgcggctattcgacaaaccagtttcagtagggatagcagcatcctcatagctgtctgcgatgatgccagcatttggcgatgggatcgacttcgataaactattttttcctagtaaaaattagtctgttgtctgtaaaatagaagtaatgtatcttgctagtaagggcacatagagcatttagacttgtttttcagcattcgatcaggctgagctgaatgtagtgatgttcacattgtttacattctttgtactgtcttcctgctcggactttactgcttttaataaaaatttatttttgtaaagctgtgttatttttattgtgatggaaacaaactggaagaaataaagttgtaccat

SEQ ID NO: 421 - DNA, 2385 bp, Mus musculus
cagcagacagaaccgaggggaggaggggccaggaggcggcctgtcgtctccgtaacccagcgcgagaatacgcctcagcgcatgcgcacctgcaggtgggacccgtccatgtgcccgatgggggaggcgagcagggaacagcctatagattttgaatctctcccttcaaaaaaagaatctaggctgtgagaagttccgtaaacactaactcgaagttgttctcccgagctccgcatcagggaccgtagacacagaccccctaaaacaagaggtgacttctctttcctcccccctccctcgggagcagtggtgggccgatccaggccacagactttcgttcgtttgcagcgggtcggagatcgaaggattgagccaattgcggatgaaacgtcttggccaggaagggggtgagggagcagccctttgagttccgcctcgtctctaggcgctggtggggaagggggacgtaggaaacccctgccctctgagccagcagatccgacgcctcggtgcaaagtgtcgagagggcggcgggaaaaccgcccgcccggaccaagggacgggaagcagccgggaagccgtgcgggagggcgcgcgcgtgcgcgcccctttttcagcagtgtggcggggtcgcacgcacgcccgcctcggcggctgggcgcgatttgcgacagtggggggggcggcggcggtggcggcgccggcagctttgcggcaggctcgggccgggcgtgcttgacggcggtgtggcggaggccccgcccgaggcggcaagaacctggagggaggcggaggaacatgtccgagagggaagtgtcgactgcgccggcgggaacagacatgcccgcggccaagaagcagaagttgagcagcgacgagaacagcaacccggacctctcgggagacgaaaatgacgatgctgtcagtattgagagtggcacaaacacagaacgcccggacacgcccacaaatacgccaaatgcaccaggaaggaaaagctggggaaagggaaaatggaagtcaaagaaatgcaaatattctttcaaatgtgtgaacagcctcaaggaagatcataaccagccattgtttggagttcagtttaactggcacagtaaagaaggagaccctctggtgtttgcaactgtgggaagcaacagagtaaccttatacgaatgccattcacagggggagatacggttattgcagtcctatgtagatgctgatgcagatgaaaacttttacacttgtgcatggacctatgatagcaacaccagccaccctctattagcagttgctggatctagaggcattataagaataattaatcctataacaatgcagtgtataaagcactatgttggccatggaaatgctatcaatgagctgaaattccacccacgagacccaaaccttctcctgtcagtaagtaaagatcatgctttacggttatggaatatccaaacagacactcttgtggcaatattcggaggtgtggaagggcacagagatgaagttctgagtgctgattatgatcttttgggtgaaaaaataatgtcctgtggtatggatcactctcttaaactgtggagaatcaactcaaagaggatgatgaatgcaattaaggagtcttatgattataacccaaacaaaactaacaggccatttatttcccagaaaatccactttcctgacttttctaccagagacatacataggaattatgttgattgtgtgcgatggttaggcgatttgatactttccaagtcttgtgaaaatgccattgtatgctggaaacctggcaaaatggaggatgatatagataaaattaaacctagtgagtctaatgtgactattcttgggcgatttgattacagccagtgtgacatttggtacatgaggttttctatggatttctggcaaaagatgcttgcattgggcaatcaggttggcaaactgtatgtttgggatttagaagtagaagatcctcataaagccaaatgcacaacactgacccatcataaatgtggcgcggctattcgacaaaccagtttcagtagggatagcagcatcctcatagctgtctgcgatgatgccagcatttggcgatgggatcgacttcgataaactattttttcctagtaaaaattagtctgttgtctgtaaaatagaagtaatgtatcttgctagtaagggcacatagagcatttagacttgtttttcagcattcgatcaggctgagctgaatgtagtgatgttcacattgtttacattctttgtactgtcttcctgctcggactttactgcttttaataaaaatttatttttgtaaagctgtgttatttttattgtgatggaaacaaactggaagaaataaagttgtaccat

SEQ ID NO: 422 - protein, 439 aa, Mus musculus
MSEVSTAPAGTDMPAAKKQKLSSDENSNPDLSGDENDDAVSIESGTNTERPDTPTNTPNAPGRKSWGKGKWKSKKCKYSFKCVNSLKEDHNQPLFGVQFNWHSKEGDPLVFATVGSNRVTLYECHSQGEIRLLQSYVDADADENFYTCAWTYDSNTSHPLLAVAGSRGIIRIINPITMQCIKHYVGHGNAINELKFHPRDPNLLLSVSKDHALRLWNIQTDTLVAIFGGVEGHRDEVLSADYDLLGEKIMSCGMDHSLKLWRINSKRMMNAIKESYDYNPNKTNRPFISQKIHFPDFSTRDIHRNYVDCVRWLGDLILSKSCENAIVCWKPGKMEDDIDKIKPSESNVTILGRFDYSQCDIWYMRFSMDFWQKMLALGNQVGKLYVWDLEVEDPHKAKCTTLTHHKCGAAIRQTSFSRDSSILIAVCDDASIWRWDRLR

SEQ ID NO: 423 - DNA, 2437 bp, Mus musculus
cagcagacagaaccgaggggaggaggggccaggaggcggcctgtcgtctccgtaacccagcgcgagaatacgcctcagcgcatgcgcacctgcaggtgggacccgtccatgtgcccgatgggggaggcgagcagggaacagcctatagattttgaatctctcccttcaaaaaaagaatctaggctgtgagaagttccgtaaacactaactcgaagttgttctcccgagctccgcatcagggaccgtagacacagaccccctaaaacaagaggtgacttctctttcctcccccctccctcgggagcagtggtgggccgatccaggccacagactttcgttcgtttgcagcgggtcggagatcgaaggattgagccaattgcggatgaaacgtcttggccaggaagggggtgagggagcagccctttgagttccgcctcgtctctaggcgctggtggggaagggggacgtaggaaacccctgccctctgagccagcagatccgacgcctcggtgcaaagtgtcgagagggcggcgggaaaaccgcccgcccggaccaagggacgggaagcagccgggaagccgtgcgggagggcgcgcgcgtgcgcgcccctttttcagcagtgtggcggggtcgcacgcacgcccgcctcggcggctgggcgcgatttgcgacagtggggggggcggcggcggtggcggcgccggcagctttgcggcaggctcgggccgggcgtgcttgacggcggtgtggcggaggccccgcccgaggcggcaagaacctggagggaggcggaggaacatgtccgagagggaagtgtcgactgcgccggcgggaacagacatgcccgcggccaagaagcagaagttgagcagcgacgagaacagcaacccggacctctcgggagacgaaaatgacgatgctgtcagtattgagagtggcacaaacacagaacgcccggacacgcccacaaatacgccaaatgcaccaggaaggaaaagctggggaaagggaaaatggaagtcaaagaaatgcaaatattctttcaaatgtgtgaacagcctcaaggaagatcataaccagccattgtttggagttcagtttaactggcacagtaaagaaggagaccctctggtgtttgcaactgtgggaagcaacagaacagggtttctctgtgtagccctggctgtcctggaactcactttgtagaccaggctgtcctggaactcagaaatccacctgcctctgcctcccaagtgctgggatcaaaggtaaccttatacgaatgccattcacagggggagatacggttattgcagtcctatgtagatgctgatgcagatgaaaacttttacacttgtgcatggacctatgatagcaacaccagccaccctctattagcagttgctggatctagaggcattataagaataattaatcctataacaatgcagtgtataaagcactatgttggccatggaaatgctatcaatgagctgaaattccacccacgagacccaaaccttctcctgtcagtaagtaaagatcatgctttacggttatggaatatccaaacagacactcttgtggcaatattcggaggtgtggaagggcacagagatgaagttctgagtgctgattatgatcttttgggtgaaaaaataatgtcctgtggtatggatcactctcttaaactgtggagaatcaactcaaagaggatgatgaatgcaattaaggagtcttatgattataacccaaacaaaactaacaggccatttatttcccagaaaatccactttcctgacttttctaccagagacatacataggaattatgttgattgtgtgcgatggttaggcgatttgatactttccaagtcttgtgaaaatgccattgtatgctggaaacctggcaaaatggaggatgatatagataaaattaaacctagtgagtctaatgtgactattcttgggcgatttgattacagccagtgtgacatttggtacatgaggttttctatggatttctggcaaaagatgcttgcattgggcaatcaggttggcaaactgtatgtttgggatttagaagtagaagatcctcataaagccaaatgcacaacactgacccatcataaatgtggcgcggctattcgacaaaccagtttcagtagggatagcagcatcctcatagctgtctgcgatgatgccagcatttggcgatgggatcgacttcgataaactattttttcctagtaaaaattagtctgttgtctgtaaaatagaagtaatgtatcttgctagtaagggcacatagagcatttagacttgtttttcagcattcgatcaggctgagctgaatgtagtgatgttcacattgtttacattctttgtactgtcttcctgctcggactttactgcttttaataaaaatttatttttgt

SEQ ID NO: 424 - protein, 262 aa, Mus musculus
MQCIKHYVGHGNAINELKFHPRDPNLLLSVSKDHALRLWNIQTDTLVAIFGGVEGHRDEVLSADYDLLGEKIMSCGMDHSLKLWRINSKRMMNAIKESYDYNPNKTNRPFISQKIHFPDFSTRDIHRNYVDCVRWLGDLILSKSCENAIVCWKPGKMEDDIDKIKPSESNVTILGRFDYSQCDIWYMRFSMDFWQKMLALGNQVGKLYVWDLEVEDPHKAKCTTLTHHKCGAAIRQTSFSRDSSILIAVCDDASIWRWDRLR

SEQ ID NO: 425 - DNA, 54919 bp, Homo sapiens
  misc_feature (1)...(54919): n = A, C, G or T/U
cattgatctgattgatttttaaattcaagtaagctttttttttaaatacaaaagtaatacatgcttatgacctaaattataaagaggaaggaaggaagagagggagggaagaaaggaagaaagaaagaaaagaaagaaagagagagaaggaaagaaagaagaaagaaagaaagagaaaggaaggaaggaagagagaatggagaaaggaagagaaaggaaggagggagggaatgaaaaagaaagaaaaagaaaggagggaaggagggagggaggaaagaaacaaaaggaaggaaggagaaaggaaaagaagaagggagggaaagagagagaaagaaagaggcaagggaggaaggaaggaagggagggaggaagggagggagggaggggagagaagaaaggaaagaaagggaagaaagaaaagaaagaaaggaacatgttgacaactcagcgggatgccatatggtgaagtgataaaaaaaactcaggtctgagagttaggctgtgtggattcaaatccagctccaccactacctctgtgacctggagttagtaattcaacttccctgtctcagctttctcatttgtaaatacagatgcaagaatgttatgaggattaaataagataaattgtgcaaacctgcctgtatagagcaagccccgtcaatgaatattatctctcagtacaactttctggatcctttttgtcttagtgtttaaacagggacactgctggttttgatttacatttgaaaagagcactgagaatctcagaagatagtcactaaaaaaatatatttttcttcagactttttcttactgtgtaagaggaagattgtggataaaattttatcgttcataaaatcaaggctggtaatttaaaagcaggagcaaacctttgtttcaaaaattgaaatatattcattgttcaacaatttttcctccaataataaatggtttaagcttttccacacacatattgtcccacacactttttcacacaaacatatttttaaagaacaaaatatttggctgggcatggtggctcatgcctgtaatcataacactttgagaggccaaggtgggaggattgcttgagcctaggagtttgagaccagtctgagcaacatagaccctgtttcgaaagaaaaaaaaaaagaaggaaagaaagagagagaaggaaggaagaatggaagagagaaaggaaaagacagagagagaaagggaaagaaaaggaaagataaaatgtacaagacattggaattacatccattttttcggccaattattccttttaattagtgataggcattgttgttggcctttacccttaagactatatttgggtttagggagaagttaaattatattatgcttatcttctcaacactaaaagttaaaaattccacctacttctcctcctattttctctatcttagttagagataccgtgatccaggaagtcagctaaactataaacctgagtcatcctaagcccctcacggtccatgaattattgagtcctgttgattgcatttttaaatatctctggaaccaaccccttgcttttcatcttcattggcactgctttagttcacgtctgcagtactgaaatagctgaaatagcccctgagcccatctctcagccttaccctctgacctttgccaaagagaaaacccttctttggctacctattactttacagaccaatggcataaggcctttcatgatgtgacccctcctaaactagacacttattcatgaaccatttgccaaagtattaaagttatgctgtggatacttaggaggctgaggttggaggattgtttgagcccgggactctagcctggctacagaacaacactttgtctcaaataaacaaatagaagagatgctgttggctgggcacagtggctcacgcctctaatcccagcactttgggaggtcgaggcgggcggatcacaaggtcaggagatcgaggctaacacggtgaaaccccgtctctactaaaaatacaaaaaattagccgggcacggcagtgtgtgcctgtagtcccagctgctggggaggctgnnnnnnnnnnnnnnnnnnnnnnnnnnnnnnnnnnnnnnnnnnnnnnnnnnnnnnnnnnnnnnnnnnnnnnnnnnnnnnnnnnnnnnnnnnnnnnnnnnnnnnnnnnnnnnnnnnnnnnnnnnnnnnnnnnnnnnnnnnnnnnnnnnnnnnnnnnnnnnnnnnnnctgtggagtatacctctccagtgactggaatacgaatatccattcttttttctttctttctttctttctttttttttgagatggagtctcgctctgttgcccaggctggagtgcagtggcatgatctcggctcactgcaaactctgcctcctgggttcaagtgattctccctcctcagcctcctgagtatctgggattacaggtgcccaccaccacgcctagctaattttcatacttttactagagatggggttttgccacgttggccaggctggttttgaactcctgacctcaggtgatctgcctgcctcggcctcccaaagtgctgagattataggtgtgagtcacagcacccggcccggaatgtccattctttagggcactttctattatcgaggaaaccagaaagctgaaatagcactcataagatagcatctctctctctctcttttttctttttcttagagacagggtcttgctctgtctccaaagctgcaaccttgaatgcctaggctcaagtgatcctcctgaatcagcctcctgagtagctgggactgcgggcacacgccaccatgcctggcttattttctcattttattttattttttaagagatggggtgtccctgtggcccaggctcgtctcaaactccaggcctcaagcaatcctcctatctcagcctcccgagtagctgagtcatgcatccctttaacaacaagaaaggctttatgccttgtgctacattgcgctaccatgttgttactgccatgacatcaataggcaataggaaatcttcaactccattaaaatcttatgggaccactgtgcatgtagtccgtcattgtgtgacatgtcattaggcagcacatgactgtatgtggtaaacaaaggcactgcataattataagggagatttcactcaagctataagtgatcctaatcaacttttctttagccacaagacagtgttctttgctaatgctcagaatgtagtgtttgcatccaatggattgtctgtctctcagacttttgtcagggtaacactgacaaaaatttactttccaagctaattctcacctcttcgtgatgccttctcatatttccaccaagttactgccctacctgttctgtcatagtactgtatgtattctctgttgagcatttgtattatagcactaggtagcactaaaattatttatgaaggttgtttttctaacagagacctgtaagtattagtgtttaaaaggaccagcacttgggtcaatgagatctgggttcgaattctgattctcccacttacttgttgaatgtcctttgtctaatcccttaatctgtgagctacaagtcatctgtaagacatggataatatagtaccagatttatagtgatattgagaggattaaatggcatgctgtgtagaaagcattttgcacagtaccagacacatggaaaacacttagtaaagtaggtcttactgatcacctttgcagttagcttgacagtaaggaatcccgtgtctgggacatccattatacagccttgcttttattcctagtggtttatctacattagtttttgtttttgttgttgtttgtttttttatttggttgggttttttttttttttttgacacaaatctcactgtcacccaggctggagtgcagtggcatgatcgctgcagccttgacctcccaggttcaggtgatcttctcatctcagcctcccaagtagttgggactacaggtgcatgccaccatgcctggctaattttttcgtatttttatttatagactcaaggtctccttatgttgcccaggctggtctcgaaatcctgggctcaagcgatcctcccgcctccgttggcattacaggcatgagccactgcgcctggcagtttatctacttcggaaaacaaaagcactttctctcttttaaggttttattccattagatagtgaacagattttctaagacaactagtgatactcatttggtttacctctgtcttcccttactagactataagttactagaggagaggcgtgatgttttatttttgaatcccaccacctagaaagtgcctagcacatagcaggtactttaagaaagtgtttattaaatgaacagaaaaattccttgaaactgattataagacatttctgatttgtcatctagaccagtggttgtcaaagcgtgatctttaaatcagcagtactggtatcacctgtgagtttgttagacatgcacattgagaggctggatcccaacccagtgtatcagagtctctggagatagggcccaggcaactgtgatttaacaagctatccagatgtttctgaattgttacaatttgagaaccattgacctagacagtattttcctttaaaatacagtatttttctttaaaagctaataacagtttttgtttttgttttttttgagatggagtctcactttgttgcccaagctggagtgcagtggcgcaatctctgctcactgcaacctccacatcctgggttcaagtgattctcctatgtcagcctcctgagtagctgggatttcaggcacccacgaccatgctcagctaatttttacatttttaatacagatagatttcaccatgttggccaggctggtctcgaacacctaagctcaaatgatccgcccacctcagcctcccaaagtgctggcattataggcatgagccaccacgcccggccataaaagctaatgacaatatttaaaagctaaagatagtatttgaaagctaaaggcagtatttttctttaaaagctaatgtcattttatacatctaaaaaacattatgctgagcaaaagaagccagatacaaaagagaacatactgaattattctatttatatgaagttctacaataggcaaaactaatatgcaaatataggcaaaacagaatagtggctgcctggggagaaagagaggagaggtttgactgggaagaggcatgagaaaactttctgaggtgttggaaagctccatctgtatcttgatggtgtgtggattatatgggtgtatgcctgtgtcaaaacacatggaactatatacttgagatctgtgcatttcactgtatataagtgaaataaatacaaacagagttaaaataatgccattctaattccttctgtataagtcttatcaacaggagatacatgttaatagacttgtcttaagaaggtctataagatcctccacgatctggccccttaccttcttttctagccttctctgttaccacacttttgtcaccttctcttttcagtccttcaccagcactgacctttcagtgtaccaatggcgtttgtactcttctcatattcctgcgccaggacttttgcacatgctgttatcactccctagaatgtttctccttctcttcttaatgggagactggttaactcccattcttcttttagttctactcttctgtctgtttctcagggaaaccctcccatgtctcactttattacacacgtccatggaaactttgtccagctgctgtgtatgcctgtgcagcttgttcatctaaacaagggttcccagctgaggtgacaactaaaactaaaatcaaatttgtgctccactcacaaagccttgcacacggagcagggttgtatcaatctggaaaagggggtgccttttctaatttaccaaagtcattgtttgcttgccaagctttacctactctgggctctttctgctatggccttttaaaaaatagcacaaagataccatatgggctagcagcagccctgaccttgtacttccccttcataccacttaccacggtaatttcacatttatttggttaatgcttgtttctcctacttgtcaataagcatgatgacagcaggaaattgtctggttttgcttattgtcaagtttcctcagcacctggaacagtgttgggcacacagtaggtactcagtaaatatatattaaatctattcgttatttttcttttttttttttttaagacagagtttcactcttgtcacccaggctggagtgcaatggtgtgatctcagctcactgcaaacctcaacctcccggtttcaagctattctctcacctcagcctcccgagtagcagggattacaggctccagccaccacgtcaggctaatttttgtatttttagtagagacggggtttcgccatgttagccagactagtctcgaactcttgacctcaggtgatccacctgcctcggcctctcaaagtgctgggattacaggcatgaaccaccacgcccggccccattcgttatttcttaacgctggatgaatattaggctgtttgaaggtagagactgtgtcttattttcttttttattgtcccctcctccccattgcccctggaattatcctactgctttgcatgtaaatggcattcagtaaattcttcctgattgatttgaaaacgttcaaataagccatatgatgttctgttcatagaaaaccagatctgcaagcatatgattacacattgcatgaatgatgatgaacagctgctatttatgaagcagaagagacaaaaatgttgaatgaatgagaaatagactccagttgaaatgggaaggatttaatttagcttttgaaactcatttcctgatatgaagcttacaagataccaggagacaatgccaaggaacgctgtgaattttctttttctatataagtaaatgatcttggaaagttccaagatggatcaaccacttacttgaaggctaaggggtatttcttactgaattctcaacagccaagtatgagatagatattttaaagtaagtttttattttggaatacttttacagaaaatttactaagaacaaagatagcatagagagttcctgtattcccctcatccagtttccctcattattaacatcttacattaccatgttacattggtcaaaattaagtaaagactgaaatccgtacattactataaactatgctatagattctttgtttgttttcccagttgtatcttctttctgtcccaagtgagatagctttttaaagttctttgatactttataaacaattctgtggtctaaagaccaagctctgtgcatagaattacataaatttagagctgcctgggtccctcatcttgaggtaaaagtgctttggctttccaatcaattgaacacaatctctagtactgccacttgaacagctgtgtgtctttgggcatactgtttacttatcctaagtcttagtttcctcatttgtaaaatgtgggtagtaagacctctccaactgtgatggttcctgagatctttcacagtaggagaatgcagtgttgagaaacgtacaaatttttcttttttagagaagtaggtctccttatgcagcgcagcctggctttgatatcccgggctcaagcaatcttcctgccttagtctcttgagtagctggaactacaggtacacatcaatgcactcagcaaaacttatttttaataggtaattagacttttatggttattaaattaataccacaaaagtagtactctgcatggaacacctatgacattttacatatcttaaattagtaacaaagactctcctctgagccctcttctccatcttcctgtctagcttgcctggctcagctgtagcaagaattctgcatcagtttagagaaaaacccataccctggatatctgatcaccccggccttttttagcacaaattctgttaagttggtgtagcaaaagtttccccattcttgatgtctcttcttagtaattttccaaccaccaacccctccaactttgctccttgactatacatccccactccttgctgtaatttggagttgagcctgatctctctcctattgtgatagtcttgacagctatcaaaatagtcctgaattaagtgttccttactattttaacaagtgtcagaatatttttcctttaatgtagtgacaataacgtagtaatataaactaatttccatttatcacccctgattcatcagaaacattttaaaaataaccccttcaagttttaataagcctctttaaactatttttgctttgttacagataatatgaatgctgtaaggcatttttctaccatatgtgtcctttatccaaatgttcagcacttttctaattttatgactagacgttgactcccacttcccagctcccactaatctctcacacacggagtaattttaatttgaaatgctttagtcaattatcctttacttgtagaactatatttcagaaacgtccttccctttgttgggaaagatgttcttaacaaagggaaggatgtttctgtctgctgatgaaaatgtcatgccaaagcacgtcttactttgtcaggagcttactctactccagtctcatctcttctcaccaactgaggagtgcttagtagtgcctggaacattggaagtactgaacaaatgactgccgtcattgagacctcaactttaattttttttcggcttctttatttcaaagtcttcactgcagaaacctctcattctgacctgcctttgctttacttccttttctcattctcaaccaagagttctctctttatctacaaaagaaagagtgacttgcaatctgcagataaggaaactgatgtcctggttataaagttatcatgcagaaataattcaagtatactagaattttatggatggtgcactctaggtgggtaatgaggtctagaagagaaaagatatacaacatcaagcaggtgcccaagaaatggtaggtccctttctcccttcctgcctcctcatttttacagatgaggacatttttacagaagcccgaatagataagtagtcacaatcatgttctaagaaaaacaaaaaaaaggtggcggatgccgtattttatttttcgtcatcactctccttttcctgctgctcattcagttatggtttcatgacccatataataattccacaaggctcaccaatgttatctggcacctgctagagaatagatatagtaacagaggcaaatattttggtgaagtttaacagttgtgttgccttctagaatttcattgtatctgatgtgcaaaaacaagcaaaacattgtcggttaagtatcacaatctcataatggagatgagcactgattcttaggccttggcgtagttcagggcctatcctttagcagctaaaaagagcactttggctgtaactcattggagtctagtctcataatgttaggatatttctatttaagtcttaaccactattggtagcaactggaaggataatcattcattacaataaatagtcaacagaataaatatccgacaagaatttacgaagcgtctagagtataattcggtagcgctttgaaatccaccctgggattcggaaaccgggtagaaaactacctggttcagcaaacgagaattcaaacagaggaggggcttggaggaggcgggtttcgacgaacccagcgcaagagtacgccacggcgcctgcgcatcccctgacgggtactttccattcgccagatgggggaagccagggggaagcaggttactgtttttgcatttctatcttcaaggaagaattaggttatgaatagttccgtgaatagtcaggaagcgctgtcctccaagttcaagattaaggaaacgtggcatgcacagctaaagcaagaggtgacgtcttgtatcttcccccgtttcctgggacattggtggtgtagcccattccacagactttcgctccctagcagcgggtcggagatcgaaggaacgggccaattgcggctgaaacgtctttggaaggaggaagggggtgagggagcatccctttgagtttcgcctcttctcgaggcggtggtgggaagggagacatacttaatactgccctcttaatccaacggaccttacatcgtgtagactgccgggagggcggcgggaaaagggcaagacgggagttggggaagggaaggagccaggaagccgcgcgggagggcgcgcgcgcgcgcccctttttcagcagtgtggcggggtcgcacgcacgcccgcctcggcggctgggcgcgatttgcgacagtggggggggcggtggaggtggcggcggcagcggcaactttgcggcaagctcgggccgggcttgcttgacggcggtgtggcggaggccccgccccaggcggcaggaacctggagggaggcggaggaatatgtccgagagggaagtgtcgactgcgccggcgggaacagacatgcctgcggccaagaagcagaagctgagcagtgacgagaacagcaatccagacctctctggagacgagaatgtaagtgcagcttctggcagttacgagactgcggagtgaaagttttaaattcttttaaaacggggggcgcggggacgagcgggctgctgtggggggagggagaggtgtcactcaggaaaacgcgggcgtgcgggagaaaattgaaattgcctacggggattttgatgtggggccgagagcaagcaggaactaggcaaaggagagtggttctagtgattgcgtgggtctgagaagtctgccctgaaatcagtttgcatgtgatggggagtgttttggcctttggggggatttaaggggagagtgcgggtctgagattctagtagtttaaaaggcacgttagagacttttctaagaaagttggaaggacggggcagagttagggaccctgttaaaggagcgtaagggttgtcactctaagacccttgtggaattttcaggatggaaagtgatcttcgatttgcggagtttgggagactttattaaagggggttttgtgtccgcctccgtcctgtccgcggagaccgggtgcgcctgaaggtcgccttttctgtaggaggagccgaattgagaggatcgatttttgatttgggggtggggagtgactacctttgaggaagtaagagtgggtgatttcttctttgaacgtttttacttaagataaaggtgaggggggtggcgacctggaagattttgggcaacagtggtataggcagatgtatttaagtgtgggttcctggcttcgccaagtgcgcgatgttttgcaatcagatttttttaagctctgaaatgggtattcgtaatcattcggtaccaacatttaacccaactgagttttaattgactcgccagtaagagccgaattgacataaataagttttcagtttcatgttttaggttgataaccagtaaggtcaacgaagtatcttgacaatttattcaaagatactactccaaaatgtgattctccttctcatgatatataacaacttgtgaatatcttttaaaaaatccttaaaatgtttcagaagagtggcgtaagttcttcattttctcagtttggctagttttaggaataaatgttacatcttctacacgcagtttctaaattctgtcataattcctagctgaaacatataatgatgtcatgactaagattttcacggaaaagatgggaaaggattctttttgcagagacaagatagatattcttgggattgtcagtttgtgggatcttagacttcaaatttcagaaaagcttgggtgttaagtgttacttttgtatttttcacccgattgtgcgccccaatctcactgtacattgggatctaacattttttaccctcttctttttattatttgaagaccgttcattttatttctgcgttttcttaaatttctctaggcagattagagtattaagagcacagatgctggatccaagtgataggttaaaatttctgttctattagcttgacctcgagcaagagactgacataattgtcttagtttcttaaaaatgaggatggtggtgtatggtatttacctcatagagtatttgtaagcattaaatgagttaatatagctaaagtactaagaagagtgtctgccccatagtaagtactatacacatgttatttatttataataattactactactaattttatgattacatagaataatgtttctggctcttccacatacttaataatcaggcaaaatataatgaaactgtcagacctgtttagaatgaagaaacttgcaaaggacaaaataaagcttattttcttcttgcagacccttacaggaaaacatattctttgctgcaattttaaagctgttcaagaccaaatgattggattagttttgttttggttcctccatttggatagccttaattttgtgtgtgtgcgtgcgcatgccttggaagccttaatcttgtagagtcttctcaaaataacatttttagatgtatgaaatacaggatatgaggttacaaacaaattcaattataaaattgtacaccatgttataaaatatttctaaaacaaattttagatgtagtcctatactatatgtactttattagcacattaagtaacaagatctagcagcgggtctgatagtagtgatgggtataaacactttttcgaagtgtaatataaaaatacttgatttccattggtggcagagtcacaacttcagtaacattaagcatgtgttacctagataataatagaaggaagtgctaaattttaaaggtggcaaaaattaagatgcaattttttttccccatttgagttcacaagccttctgaatttcatccatgtacccctgacttaggggcagtagtaaggtaagggagtagagaacattgtataaaaatgagtttagaaaagataagggcaatagttttactcttgagggagccaaataatggcaaaaggccaaagcagatggggtgtgggggaatatgtttttgtgttagagttcaggtaacctgagcagttactactgttaatgtgagtcagagaattacaggcacatattttacatttattgtgttacctgccattttattgaactttttgagatcatatgactgcagagtagttggcttctgcgagagtactaatggatgccttggtagtaagatcagagggctgaatctggagacttgtctttttgcttaagcaaaagcaaagatgcagggaatccctgtggcaagatgcaggtgcaaattactgccctgtgtctctttcctcgttgggcaagtgaagatggtagtaccatgtctgttgcacagtatcattctttactttgagaatggaataggatggaggtcaccctgtacatatattagacactcagcaaagacttgattttagtttaaagataaaatggaagcatggtggctgtattacattttcatttgattccatcttgatttgccttgggaggagatgggtaaattaagtcatcagaagtaaaataagcaacgtgccctattaacgaatgttttgtgtggcctctgtattggcagctcagtgtttagccagaatgtaaagaaactgatatataaaaatgtcttagagtttttaaaatttcagttctctagtgttaaaaggtaattttacagaaaaaatggcaagtgaacacatgttgaaacttttactcagagggaaccaggcaaatgttatacagtaatggttaacccgcaaaatcaaaacagtacaaatttattaatatatggagtaaaggaatggagagatgaattccaaatggagacagaaacttttttttcccttgagtggaagggaagacattttgaacctctactgtagagacaaaatttacatgtctatcagttattcataatgaaaaaagagttgtggctgggcgcagtggctcacacctgtaatcccagcactttaggtggctgaggtgggaggatcctttgagtccaggagtttgagaccagcctgggcgacatcgtgaaactctgtctctaccaaaaattagctgggtgtggtggccagctcctgttgtcccagctactcaggaggctaaggtggggggaagatcacttgagtctgggaggtggaggttgcgttgaaccaaggacagagtgggtgacagagggagagcctgtctcaaaaaagagttgtaagatagctcaaagacatagtggagggctatagtctggtaacttggaaggatgtgctatatagataatgcatagttttccactgagatacagaattgttttctacgtttgatgttaattatgtgaatacaactgaaaaggtggagagaaaaagagattaaaataccacattttctatttctgtaaagactaatgatattcacattaaattacaattcaaatatttgttgagtacgtactgcttgctacccgcctattatttcatttatgatattttttaaccttctatataaaaccaactttaggaagcaataatttaaaaatagcccctaaagcagtgtttcctaggctgtttaataggcatttcatggaaaaaaaaaaaaaaaaaaggcttcctctggaatgtattttagaactgctgccctaagatcctagattaaataaatcttttctttccaaaggagacattggaatctgtaatcaggaggtagtggaatcctcttctgagattagagagctgagattagagggccactcgtgtgtgagataaggtatgaattaggagaattttcaaggtttcctgcagtcatttcttttttttggaaggatttactttaattgtgattgagagtctctggagttctgatttatgagtattattactttagaacaatgagacagttttaacttgtaaatagcatagaatatatgtagcactttaaaaaaattctaaatgttttgcgttataagcagaatttgaataacaggattttaaaaagtgacatctaatgtagaagccattaacactcctgcttcaaacggctccccagctccatgctccagactgagcagcagtcaaatacattatgaagacatatacatcagtcagatttaagagtcacagctttgggatggaattaccagccaagagaccagttaggctttttcagcacttccagtaccttttgtaaagagctgtaaagattcactgatacagtgtattaaagtgactggaacagaccagtgccttattaaagacagtattactcttccattattctcattagtatttatttcattttcatttttgttgaaatataaaatatctacaaaccttctaacctgtagctggattatgtttatccttatgtggaggcaagaatacatttttttcttcttgtagaaattatttctcttaggtcagtcagcatcttcccagtagagttatttactgctaaaaacagtattgctgtttcatgtaatttttcctcatttactgcttacaggatgacgctgtcagtatagaaagtggtacaaacactgaacgccctgatacacctacaaacacgccaaatgcacctggaaggaaaagttggggaaagggaaaatggaagtcaaagaaatgcaaatattctttcaaatgtgtaaatagtctcaaggtatgtgcaaaaaaagatcctttgggctgaatgctaggcttcagaaattatttctctgtggcacgcatttcgtactcaggatactctgtcaagttgtaaatattttaaagttacaatgttttctgaagggtttttttttttgtagttcagactgcgtatctattttagtccatcccatgtttagttttttggttttgttttttgttgttttaatttaaatatgtgacagtgttgcaggatgtttttgctttattgtttgcattcaaattataagatttgggtaactattactctttatattttagtaaaacttaaaaaacataagccacttctggcatcagtttttaaaaagaactgaatgtaacccattaactttgactaagtataaattgaaacagatgttttactttgtacagtttctgtcctttgttttatttataactgttttcaaagaaaaaggtgtaaaaaatttttaaactttttaatattaaatatttagggaaaagggggttttggttatttaaattaatctgtccccaatagtatttttatttactttataaaaggggttactggtgtttaagatattttcttttatatatgtccagtttgttttttaaatgtgaggctatttttttctatactgaggaaaaatgtgtattatctcatacatatgtaagttaaaaccttttctaaatatccaaatatattttttataagtaaagttttgggaaagcataagaagctatgactatgacatttttctgtctgtgtagcaaaaattcgatgctcagtgtgtcagattttgctcctgtaaaaggagagaaattaatctcagcatattttttaaaagtcaattatagtttcatgtgcatatttatttacattaacgtactacttttaggtactgtacctggaagatgtttttagctgccttttatacttaaggcagtatttcaaaatcctaaagctgtggcttttcaaatgatgagaaaacgaaagacgtactttaaaagtgaaaacagtgccttaaactgcatctgaaagtcagtgttaaatgccagaagttggccagtaaaatcctaaagctgaaaaataactttgtgaacaaaagtgcataattgttctttgtacatctcctatagcctcctggtaactgtgcagttacagtttatttcttcccctagtccccagtgttcagatattctcattctgactaacagaaaacagtgatttgaatggagtctgctatgcttcactttacaagggaaaaatttagccttataaaatttagtgaatgccagagaagctattaaggccatctgttaatttcctgtttcagaaaaataaattgtgtccttttgtatccaccaaaattatccagtttattgtgattcagaatatgattggcttattaagaaaaaggcaaatattataagtgttttcgtaggtaagcggttattacctaacttgtgatttcagcctttggttgtgataaaactttatcatacacaatattttaaaatgtgaaaactagactagtagacatcttttaattttagtgtcaaaagttagcttatgtatgatacacaaaataatgtattgcattttggaaaaaagaaggggataggttagtttactgtcattttctggtttgtaagatacattaatcttttcttatttcatgattattttataggaagatcataaccaaccattgtttggagttcagtttaactggcacagtaaagaaggagatccattagtgtttgcaactgtaggaagcaacagagtgagtgttaaggggtctatttagtatttggcttgatttccagatctggtgttaatgtaatattgaaatagaataatttcaaagtgcattttgtgaagctggtttagcaatatgattctttcatgtaagagtgaaggtttctagaaattaattaaaactagtatgcatggctgaaaatacatctatatttaatatattacccctaattatttatgaaacaggttttatacttgtatttgtcttcataaatacttggttgaaagaattggcgttcctttttttttttttttaattggcgttctttttaaagtgattttggtatttatcattcaaatagcgtaagaactggctgtgatttttttaaaattaaggtaatgaatggctctataaatgaagcataaatccagtggatttaaataagttattgagatgttttaattacttgcagtaaacatttgagtttgctgggtttttttgttttgagacaggtagtgtttggtggtgattgttgttgttgttgttgttgtttgtttttgagagagagagagtcttactccttcctccaggatggagtgcagtggttaatcaaggcttactgcagcctcaacttctggggctcaggtgatcctcccatgtcagccttctgagtagctacaggcatgcactaccatccctggctaattttttttgtagggataggttttcaccgtgttgcccatgctggtcttgaactcttgggctcaagcaatctacctgccttggcctcccaaagagctggggttgcagtcatgagccaccatgtccagccttttaaggaaattttataatgacatgtaaggctctaggccttttactatttgacaaggtcaattcattgaaactctaaatatttttaagttaccactgaagttgataacatgaaataatagctttttttcttctgtttttggtgtttagtcaaatgtaggttttaagataatgtagtctgcttatagttgtttagttcctagattctttgaaaacaacaattcagaggaaaaattttgcggttttaagaaaaggttgaggttatttttttcctagttgggaatgtagtgcattaattaaatttgagtccacttttaagacaccactgtaaacctaagttaatatttagctttgatagtattataattggtatagtttgtgctccagtgtgctgattgcagtgttttaggttttctaacaaaaagaatccctatttttatttaaagtgacataaaggggtgtcatatagtttattgaattataaaaagttctgctgttagaatttctttaaaaggaagaaagaaaacaaaaacaattaccacataagacataacctagttagcagccatataaagaattttttttgaacattaacatagaggagataatgaattaataggttgtgatgatacacaggatcttcagaggtcttcagtactattataaaataataataggtttttgctaatgtgactgactataagctataagaaaaatggggccgggcacagtggctcacgcctgtaatcccagcattttgggaggctgaggcaggtggatcacctgaactcaggagttcgagaccagcctgaccaacgtggtgaaaccctgtctctactaaaaacacaaaaattagctgggcatgatagcgagtgcctgtaatctcagctacacgggaggctgaggcaggaggatcactggaatccgggaggcagaggttgcagtgagccaagatcatgccattgcactccagtctggacgacaagagtgaaactctgtctcaaaaaaaaaaaaaaaaaaaaaaaaaaaannnnnnnnnnnnnnnnnnnnaaaaaaaaaatggaaagaattttataaaagtttagtattacaaaattgtgtatggtgtatgtatagttttaattttagagtatgcaacaaatgaaaaaggctatcatacatgtgaaagttaatgtttgattatctgtacccatgagaaaataattcattaagcaaattgtagacttttaaatatgtaactaatatgtaaatactccaaaactatccaaagacttatttttatttgaatttttattttttatggtttttttttttttttgagactgagtctctctctgttgcccaggctggagtgcagtggtgcaatcttggctcactgcaacttctgcctcctgggttctagcgattctcctgtctcagcctcctgagtagctgggactacaggcacatgccaccacacccacctaatttttgtatttttagtagagacggggttccaccgtgttagccaggatggtcttgatctcctgacctcgtgatccacccgcctcggcctcccaaagtgctgggattaaagacatgagccactgtgtccggacttattttattttatttttttttgagacagagtttcgcttttgttgccaggctggagtgcaatggtgcaatctcggctcactgcaacctccgcctcccgggttcaagtgattcaccagcctcagcctcctgagtagctgggattacgggcatgtgccaccacgctcagctaatttttgtatttttggtagagacagggtttcaccatattggccaggatggtcttgatctcttgacctcatgatccgcatgccttggcctcccaaaatgctgggattacaggcgtgagccaccgtgcccggcctaatatttattttttaatagagatggggttttgctatgttgcctaggcaattgaatggatgaaatataagtttaaaagattggaaatcgaaacgactattactgcaatatttaatatgctctgtgtattatgtaaaacattcagctttataatggcttctttaagctcacaggaggtattttaaggcagtagtttctgtagtatatttaagataggattgcgattaaaatatgtttaaaagttggagagagtatgttttctatacttgagatgaaatttactgtatttttattttcattaggttaccttgtatgaatgtcattcacaaggagaaatccggttgttgcaatcttacgtggatgctgatgtatcctttcctgggtttttaatatctttagtcaaaggaatttattttcaataagtgcaccaaaacttttataaattaatcatttccctaaagttattgttctttcttaaccgatttcttcactatcacccaagagaatcctgtatctagttttcctgacccttagaaatccattgtggtatgtgtcaactcagctaggcaaaaagaaaaagaaaagaatccattgtgggatggatgtgctggttgggtgcagatgtctatagagataggagcattagaaatctagtaatagaaaatattagcaaagactgattaaaacctcctttttctttgaccttgcctagaatatatcatttcattgtagttataatgatgaacttggcttgtgactggtagtcattctaagtatttgatcaacgaagcctaggaagaaaaaaaaagtttaggaaaaataaaatatataaaaataaaataaaataggaaataaaaattgcaaaacaggttcataaagaaacagaaaaatttgaaaagcccgagttagagcggtaaaagctaagtaataagatatttcttccagatccatttgaaaaacctagcaaacaagacaaggcaaggacattcagtcttctctaaaagatattgaaatgtgacctgttgttgtattgagactgtctcacaaagaaaaaagtggaaaactgaattgttcttttttagatatttatagaggtatggggatagagcagaggttaaactacagcgtgcaggttggtcacctgtttttgtaaagttttgttttgaacacaaccatgcccattcatttgtatattttctgcagttattttggtactgcaactacagagttgagtagttgtacaagcagctaaagagtaaacaaaattgagtggagagactgtaattttgtttgatcatttgttatggattttagacctcaaatcaccattgtatatatttggttgtataaggaaaattgagaactttggtgtcaaaaactttagcagttctttataagtttctattataattattgacatgtttctttttcaaaaacattatgtttcttaactgtggaatttcttaggctgatgaaaacttttacacttgtgcatggacctatgatagcaatacgagccatcctctgctggctgtagctggatctagaggcataattaggataataaatcctataacaatgcagtgtataaaggtgggtttttctggttaaattgtagatctgcttcttttgaatccacaactgtaaaaacttgtaatgttaaatttaaaactaatggtatgaatgtaacatttctcatttgatttgtacttttcttactgctctctttggatgagtcttttgagacatttgtcacatttgggtaatgtaaattaaggaataagtgggaaaatgttaatatttgtagtgctttctttttaaatcatttccctctttcacccttgtcatggtttactttgagaggctctaaatgaacaataagagggagtccattttccaagacacctaaactggaggggtgttatcaaagggaccttgtaacgaacataaaggtgaagcctaggaagttgataagaagacgggtttttcaaatcactttcatcacctgtttttaactgttgggctacatcacactctcctgaggatgcttaaaaccctacgcatattggagcctccgctaatccgatcagaatatctgcaggtggagttttgagcatctttttttttttttgttctgagacaggttctgactcctttgcccgggctggaatgtagtagcatgattatagctcactgcagcccgtctcctgggctcaagcgatcctcctgcctcagcctctcaagtagctggggccaatttttaatttgtgtgtgtgtgtgtgtgtgtgtgtgtgtgtatgaagatagggtcttgctgcattgctctgactggtcttgaactcctgacctcaagcgattctgccttagctttccaaagtgcttggattaaaaacatgagccacccactgtgcctggggtcttttttttttttttttttccttttcacctcaagtttgttgggtgattttagtatgcagccaaggttgagaaccactactttaagtgaaactatttttacattctctaaagatttatgaaaaaaaatttactgattttgagataggaaacttgaaatgttttaaatttattgtagcactatgttggccatggaaatgctatcaatgagctgaaattccatccaagagatccaaatcttctcctgtcagtaagtaaaggtaagtgaagcaaatgtttcttgagtctgtgcaatttgtcagaattaagatggagtcactaatgtcaagaaaaccctgacaaataggaaaaaccatgagaagagagtccacatgcttgtatgtctgataataaaaactcacaaaaaaacacaaccacaaccttgcacaaaggccatcacagccttacacagaaaatactggcagtaagtgcctctccatcctgagactggcatcacccttgttactgattttgtggccaatcttatttcaaaacaattatgtaatccttctcatttttttctttaaaaacctctgtctttcctttacgtctcggagaacacacatagtttactttggcatgtacattctcattgcagtgcattatttccatataaacatcttttattttagagagcctctctgttacttaggttgacaggtcctgttttattttaagtctagtatctgttagttatttttcctgatcttcttactcctcccaccctctaccctccagtaggccccagtgtatggacagatagtgttctaaggaaataaagccaaattaaaaaaaaggttataacagtacattttagtaggaaaatcccaggctatgttagcatatccaaatcattttgtccaatcatgtaataataaatactacatatgaaaattcatattgcttttttattttttaaaaaagcttttgttttataaaggatttcctatagaatttcttaaaaatgctacgtttttcaggataagttatttgaaatattcccataaagggaaagcattgcattttggaaatcactacctctaggaagagttgattactttttcttgtctcttgataacactaattggggctcagatatttctgaacaactgtatagaccgtaatgcctcacttgttctaaatattacaactttttttttctcttttttttgttttttggtttttttttttttttttgagacaaagtttcgctcttgttgcggaggctggagcgcaatggtgcaatctcggctgactgcaacctctgcctcccgggtttaagagattctcctgcctcagcctctcgagtagctgggattacaggcatgtaccaccatgcccggctaatttttgtatttttagtagagatacggtttctccacatgggtcaggctggtcttgaactcctgacctcagttgatccgcctgtctcagcctcctaaagtgctgagattacaggtgtgagccactgcgtcctgcctctatttatttatttatttatttatttttgagacagagtcttgctttggcgcccaggctggagtgcaatggctctatctcggctcactgcaacctctgcctcctgggttcaggtgattctcctgcctgaccctcccgagtagctgggattacaggcgccctccaccatgcctggctaattttttttatttttagtagagatgaggtttctccatgttggccaggctggtctcaaactcctgacctcaggtggtccacccgcatcggcctcccaaagtgctgggattataggcgtgagccactgcgcacagcccaacatcacaacttttaaccctggtcttcctctattgtgtcagtaagagcatttttaaaaatcagaagtttgagcatgaataagaattttgctccaagtgatactatcaagaaagtaaaaaagcctactcaaaaggagaaaaaatatttataaatcattctgataaaggactttgatttttattttttgtttttggagacagggtcttgcccagtcacccaggttgagtgcagtggtgtgatcatggctcactgtagcctcaacctaccaagtagttaggactacaggcacgtgccgccatacctggctaattttgtaaaaaatgtttttgtagagatgaggtctccctgtgttacctagactggtcctcaaactcctggcctcaagcagtcctcctaccttggcctcctaaactgctgggattacaggcatgagccatgattcccagctaataagggacgtgtatcaagaatttttatagctcaacaataaaaagacagcccaatttaaaaatggccaaaagttctgaatgacatttcttcacagagcatacacagatggccactgagcacatgaaaagatgtttaacatattaatcattaaggaaatacaaatcaaaaccataatgaaataccacttcacacctacttagggtggctgtaataaaaacgttagatactaacaagtattgactggcacaagaagaaatcagagccctctcagacactgctggtgggaatgtaaaatgtaactactttgaaaaacaatctggcagttcctcaaaatgttacagagtcactaatcctagatgtttacatatgtatgtatatcctagggttgtgtgggtgggggtgtacatatgtatccccaacagaaataacatgtccatacaaaagcttgtacaaaattgaaatcaaggaatcatttttacagcactgttaattttcacatgtattactacctctggggtgtttatgtgatgcatttatattcacagacagaatgaacattgttatatttcaagcttacatgacgtgtctttgctttacattctttcttttttttaaatactgttttagagacaggatctcactctgtcaaccaggctatagtagagtgatgtgatcacagctcactgtagcttgagctcctggcctcaagcaatgttcccacctcatccttctgagtagctgggactacatgtgcacaccaccatgcctggctaatttttaaaaatttttttgtagagatacggtttcattatgttgtccaacctggtctcaaactcctggcctcaaaagatcctcacaccttggcctcccaaagtgctgggattacaggtgtgagctactgcacctggcctgctgtacattctttattaatgtttaatataacattgctcaaattatagctgcataatttttgaagagggactgtcattctataaaattgtgcatgatatatgtagttatgttttcagcttactgtaaaaatcataaatctcagtcccctttcaattttttaatgtgagtatggtgaagggaaaagctagtatcttgttctgtgggataaaattgcttatgtcaaatctgtattttatttcaaaagtatatttccatcaaattaggttatttaaagaaagttatttgagataaatatgcttaaaatatttttcagaccacatgaatatttctgaacttactgtcttagtccactttaacctggcattagaaagtaagaacaagaaattgaacttgaagccttttttttttttaatatataattggaattaattcattcataagagtggtactctcatgacctaacgcttctcattaggtctcatctcccaacactgctgcattgggattaagtttcccaacctgctttttcgggggttcatttaagctgtagcattctgcctctagcccccaaaattcaaatcctcaatcagatatgggtgagactcaaggcaggattcctgctgaggtaaattctccatctgtgggtctgggaaatcaggcatcttatctattttcaaaatacagtggtaggataagcataggatagacagtcccttccaaaaaggagagataggcaagaataagggtaactggtcccaagtaaatccaaaactcaacagaacaaacaagattaaatccaaggcaccagaataatcttccttggctccatgttttgccttctgggcatgctgggtgtggagtttgggccccagaggccttgggcagccccatctttatgggtttgccacgtgcagcccacatagcatcttatgagttggagtcgggtgcctgcagctcttgcaggctggtggtgtgccctggtagctcagcagttctgggatttgggggatggctttttccccatggctccaccaggtgttgctgtagtaggaactgctgtgtggctctgcccttctgaaaagtttctgcctggagccccaggctctttgtgatgtcttttgaaatctagagaggaagccgtgcctccacagttcctgcattctctgcatctgcagacttaacaccacatggacactgccaagatttgctgcttgtaccttcagaagctatggcctgagccatacttgagccccttcaagctatggggtgaccaaagagcactgccttggaatagggggagcaaagtgctgaagtggccctggacagtgaatgtagaggtcccatgggtgctactctggaaaccttgccctcaaggtcttagctatgtcttgaagatctctgaaatgcctttgtggtcattatcccattgtcttggtgaatagaacctgccttctcttccctattaatctccttagcaattagtcacttagctacatccttaatattctctctcaaacatgcttttttattttatatattttttgaagagacaaggacttgctatgttgcccaggctggtcttgaacttctgggctcaaatgatccttccacctcagccttcgaaagtgttgggattacaggtgtgagccaccacacccagcctgctttttttttctttacatggccaggctgagagtttataaatgtttctgttttgctttcctttttaattacaaatttcacctttagatcatttctcattttatgataagcagccagaagaagccatgcatcactgtgaatgctttgatgctcagatatttcttctgccaggtattggattcattgctcttaacttctgccttccacaaagtcctagggcatggacacagtcctgctaagttcttcacaactgtattgcaaggatggcttttatttatttatttaatttatttttttgaggcaaggtctcattcttgtcacccaggctggagtgcagtggcacaacctctgctccctcacaccctctccttcccttttgctgtgagacgattcagcatgaaggccctcaccggatgccggcaccatgccagtgatccttccacttcagcctcccgagtagctgggactacaggcacatgccaccacaccccgctagtttttgtattttttgtagagatggagtttcaccatgttgcccaggctagtctcgaattcctgagctcaagtgtccacccacctcagcctcccatgctgctggaattacaggcatgagctaccacacctggcctggctttttttttttttcttttaaagacagggttggtctctgtcacccaggcagtgcagtggcatgatcatagctcactgcagcccaaaactcctaggctcaattgatcctcttgcctcagtcccctaagtagctagaactgcaggtacacgccaccacacctggctaatttattttctgtagggattgggtctcactatgttaccccggctggtcttgaattcctggcctcaagtgatcctcctgcctcaatctcaaagtgctgggattacaggcatgaaccatcacaccctgccaacagggatagctcttactccattttccaataacttctcatttctgtctgagacctcactgaatgagaccaacctcattctgtctgagaccaacattgttctaccaacattctgatcacaaccacttaagtaatccttaagaagataaaggctctgcctgaagctcttgtcttcttttcagccctcactggaattaccctcaatgctccactcacaccaatataggctttttctagcctgctcctccagattcttccagcctctcctcgttacccagttccaaagtcatttccacattttcaggtatttatagcaatagtcccgtttctgagtaccaacattctgtctgagtccattttgtgctgctataacacaataccacagactaggtgactgactgatggattaattaatttcttttctattgctcaggcttcactaatttttaaattttttgttgagacagggtcttgctatattgctagggctagtctcaaactcctgggcttaagcagtcctcccatcttggccttctgaagtgctggggttacaagcatgagccaccgtacctgactgggtgatttataatgaacaaaaatttatttggctcctgtttctggagactgggaagtccaagaacatggtgccggcatctggtgagagccttcatgctgaatcgtctcagcaaaagggcaggagagggtgtgagggagcaagagattgaatttatagcctcaggcccttttataatcagtattaatccatttgtgaggatggagcccccatgacctaaatacctcccattaggccccagctcacaccactattgcattggggattgagtttctagcacatgcttttgggggggcctattcaaactatagcacttacctagctaattctacatctgatgtaaacattttaagttgctatgtaatatggattccatttttaggctttactgtgcataacttacatctagactttagtagtttttctttcacaagatgttgaaagttcacagtaaataaaaaacattcgcctaatttttgtatgtttatactagatcatgctttacgattatggaatatccagacggacactctggtggcaatatttggaggcgtagaagggcacagagatgaagttctaagtgctgtaagttggaaactgcagggcaatgactttcaggtttacatagctgtgaacagtctccatggaactgtttccttataagaaagtgtgtttcatgtagcctgtcaggcagacattcacttacatttgacatagaagattttaatctccagatgaaggaataaaacaagtaaagactatatttatttatttattttttaaattacttgcactgtataccaatccctggagtcttatgagagcagtatgatcttgctcctttccttttaatctaaaatcactaagttaatgtttgttttgccatttcgcagttattaaagaaaaaaattaaactatgtagccattaaagtgcttttccatcttttgtttgaagttgaaacataacgttttttgctatttggaagtgttttattgtgctcacactgttttaggtaacttatttctagccattctctttgggtggcgtggtataatacaagaccagtttaaagataaataccacctttatattgatgtattgtaatccattggtccattatacaagtgtttttagttaggtttcagattttaacattatttttgcttatgttccatatttagctcatttgattcctgtagtaatttcacatctcttaggttgttttccattaaactatgtaaaggggcaccatattttacagcatgtaacattttagttgaaggtactaaaatattcctatgttgaagtttggattcctttgtgagaatcataccttccttcgaataccttgtcaacttggatttcctaaaagttgcagtagcattctacgtctggctttatgtgtgtaaaagccaagtgaactgttctttattaataactccaaattagtggtattgtctcgaaggatgtcttgttgctgttgacagtgaggtaattagaagtaccacaactgtgaattcaataaacatcaagcctaaagttcttaggctcttataaaatggtgctcataattaatgcaaaggctggattaacatatagtatctaggttagtaaggaaaatatactccttcaatagaactctctactgttatttcttagaatgagagcaggagacagtatgtagctcttctgtgtaatacaggagttcactggaggtggataggtgtgtgagattttcattactcattatgtgccttttgctaaattaaatagcatctctgggccttagtgtctgcctatgaaatgaggttgttacaatagatgatctgttacatgcctgttaaaaattagtaaacagcaaatgaaaaaagttaaaatctgttttttattagacttttaaaaattcacttaaaagtgaactctaaaactaacttcaaaatattttgacttagaattataaagtaagatgtcagctctttaaggattcatgtattttcacatgcacatgtcagtttcattggttggttgaggttggataggaaaagtaatatcactattcagctctttgtgtcagaataattattttaacttagtattcaatttaccttcaaaataagcaaaataaatattttagtgtaattgaatagataaaactaagtttaagtaattttttcttggtttatacattgtaaatgctcttatattccgatgttgacaaactaattaaagctgtaaatcttgaaagtagtaaactctgatttatggcctatttagatgaaacccaaaatgtagtttgtattgtgatttgaaatacagttttcactatgttgcacattaggcaaaaattggataaatataatttggagctgtaatttatataaaactttttggttttgcatacaggattatgatcttttgggtgaaaaaataatgtcctgtggtatggatcattctcttaaactttggaggatcaattcaaagagaatgatgaatgcaattaaggaatcttatgattataatccaaataaaactaacaggtaacagttgtggtatttgaaacaatttgctatgttgtgctattgaatataagttttattttttcccaaaattgctatataagccccaacaatgagtttagaagaccttcttttaactttaagggacaatttacatactgtaaaattcacccctttaagaagtcctttatttgcagtgtttgtggcttagttttcaaaatcccctttaaattgtgttgtcatcttaacttagtagcacattttacttatttgtattttggtatgcatatgcttggccttttaagttataaatgtaaaagttttaaatcacttaagcttattatggactagggagagtaaaggacactttagaataatgttaactttttttaaatgatgctaattctaattcaagatggtaaaccacagttttaaacaatggagttcttagctctaattcatgataatgtttttccctaaatgatgctcacttgattaaatggagagaattcaaatgcaggagcctcacttcatggtactataggttggggaattttgcagttttcttagtatatttttgaaatgtctcaattcttaatgcagtaactgtctttagaatcttatcaggctgtcattaacactttcactataaacgttgtatgtctgcatgttaactttgttggcacttttgttttagcaaagagctagaattcattttctggttatcaagccagattgttaatagattattaaatttgtaagcatcagtaaatatttcaatgcactaacattcatcagacctaagtgtcctctaagaattattaaaagttttacctttctcctttaaaacaccaggagctagtaggacaatgttaaatttatatttttagattattttctagatatctggaataaatacaaactatatttcagagttttcaaaaaataacagttgtactcgttttttctttgagagaggtttggccatacaattatagtatgtatttagctaaaaagcaattaatataattatagcagagttaagaatttatatcagatcacgaataacattttaatgtttcaacaaaatatcccagaatttgaattggaaggattgttttgagttgctccaatccaaagtgcttttttacatatctgagggaaaaggtaaagagaggacatatgaattgcctaagacaactaattcatggcatattatacttatacagctatttctgatttaaaactgagtatattaggaatgttaagtgtactgttaaataactccagaattaatagcagcttgttttgtttcttctcacaaatatctctaatgaaaacagtgttgccatttagtttcctaaatacagaaattatttggaaaagtcctaggaaattttattttgttctatttgtttttttgagacggagttttgctcttgtttcccaggctggagtgcagtggtgcaatcttggctcactgcaacctctgcctcgcaggttcaagcgattctcctgcctcagcctcccaagtagctggattacaggcggccgccaccatgcctggctaatttttttttttttttttttttttggatttttagtagagatggggtttcaccatgttggctagggtggtctcgaactcctgacctcagatgatccacctgcctcggcctcccaaagtgctgggagccaccgcacccacccccacttaagaaattttaaattcctgtaaggcatcattttcagaaattattgctcaaggcaggactgtagatgtatctttagcagactttggaatgatgtttagttgttcctggaaagatgactatcttttgaaatagtgtagatatattgactttcatagattattaatgcttaattttaaggactgagtaggtagcttagtatattttcagtgagaaactgatcaggcctttattattggttagggtacccagaattgaggtgattaattttgggttatatatagtaaaacgcaggaaactacaatgtttataaacaaagtatctatcataggacaaagataaaattggataataatggagaaaaataaacaaaagtggaatgagactttagctttcaataaatagataaggtggttggttatgtaggaacacagaggaattaatagtcttacattttgtttttccaagttttataaatccaaaaatgaaaaagagtatgattctactataattttttcttttaactttttacatttccattcttccttcaggccatttatttctcagaaaatccattttcctgatttttctaccagagacatacataggaattatgttgattgtgtgcgatggttaggcgatttgatactttctaaggtatggtaactgcagttaagctgtacttccatcgtgtgtgtgtgtgtgtgtgtgtgtgtgtgtgtgtatgtgtgtgcgcatgttggaacttggcagggagcactttatgtagtttattaaattgaatggcagctgggaagttgccttttttaaagtctcatattttgatatatttagaaacttgttttaagaataaaacatgccattgaattataattctttgtgctccagtaagatgagtatagttttataaggtgatagtattctctgatagtcagtattgttacaagataaccagtaactaaagccaacagaattggcttttgtttttttgtatctctgtgactattttagtaaaattttatttataaaaacaggtggctggagttggcttatgggctgtagtttgccaacccctgcccctgttgatggatttatacagatgctcctcaacttatgatgggattacatcgtgataaacccatcataaattgaaaacgcatttaatacacataacctactgaatatcagcttagcccagcctatcttaaatgtgctcagaattagcctacagttgggcaaaattatctaacacaaagcctgttttataataaagcattgaatatctcacatactgcatactgctagcccaggaaaagatcaaaattcaaaattccaagtacttcaaaattgcagctgttttgtaccattttggtaaagttgaaaaattgtaaatcagaccattgtaagtcaaggccatctgggtgtgtgtgtgtgtgtgtttgtgtgtctgtgtatttttttgtagctgataatttagagaagctattggtgatgttacatgagcatttaggattatcaaatttggtgaaattgctgtccggtttcttttcttgatgtgaatttcaggccacttcacattttcttgggcagagcctgatttacttttttcttggctttatgtgtaaactgtttttttcttttttctttaaacttttgaccttcaaataacttgattcataggatgtttcaaagattgtgcagagaggtcccatatgatctttatccagaatccaaagtttatatattatataactgtaatacaatatcaaatccagaaaattgacactggtacaatgtgtgtgtttagttttatgtcattttatcacgtgaattttgtcatttcaagaatggtacagtttgggaccttttaagattgtttttttccactcaaacccttgagatccatccaggttgttgcctgtatcagtagttctccttttttattgctgagtagtattccatggtatggattaccatagtttatgtaactatctatggtaggaggttttggtcgtttccagttctgggctattgcaaataaagctgctaatcagcagttgtgtccaggtttttgtgtggacttaagttttcatttctctgggtaaatgcctaggagggcaattgctgggttgtggttaagtttgtttagttttttaagaaactgccaaactattttccagagtggccgtgccattttacattcccaccagcaatgtatgagagatccagtgtctccgaatcttcgccagcatttggtattgtcattattttttattttagctgttctgataggtgtgtagtgatatctcatcgtggtcttaatttgcatttccctgatggctagtgatgttgaacatctttttcatgtgcttatttaccattcgtatatcctttttggtgatgtcttttcatatcttttgctcattttctaattggattggttttttgttgtgtttttttttttttttaactgttgagttttgagagtttgaatatattctaaatatgaatcctgtatcagatacatagtttgcaaatattttctttcagtctgtagcttgtcatttcatcctctttaatagggtctttcacagagcaaatgtttgtagtttttattaaatccagtatattgattttttaaaattattttatggattatgcttttgatgttttgcctgagaactccttaccaagctatagaccttaaagattttctcctgtgttctcttgtaaaagttttatactgctatgttttacattaaatgtgtaatccattttgagttgatttccttatgaaggtgcgaggtttaggtggaagttcatttttctcttatagatactcagttgttccatcagcatttgttggaagactattcttccgccattgaattgcttttgcacctctctcagaaattgtttggctgtacttacgtggggctgtttttgattttcctgttctgtttcatctgtatatctgtccctccaccagtactacatacacagtcctcattattgtagctctataattattcttggaatctgatagatttttcccgcttttatttttttcataattgttttgagctattctaattcctttgtctttctgtgtgtaaattttagaataatcttttctacatttctaaaaatcttgctgggagttgttttgaggagaaggagtttttaactggatttgtattaaacctgtatatataatttcaaggagaattaatattgtgctgagtcttctaatccatgattgtggtatgtctcttcatttatttacaacttctttgacttttgtcatcagcattttatagtttttagcatataagtcccatttttgctctgttagatttatacctaagtattttttaagcaattataaactgttttatatttttattttccatttttatgtgttcataactaatatatagaaatataattgatttttgcatattgatcttgaatcttgtgacctagctagactacatattcaaggtgtgttttgtgattttctctgtagactatcatgtgatctgcaaataaggacagttttatttcttcctttgtgatctatatgccttttctttttttgccttattgcgctggtgaactttcagtcctgtgttgaatagcagtgttaggaacagatattcttgacttgtcattcagtctttcacaattaagtatattagggtttgttttgttttgttttgtagatattctctatcaagttgggaaagttgagaactgtttcctgttcctaaatttttgagagctttttcatgaatggtgttttgtcaaatgctttttcttcatcagtttatatgctcatatggtttatcttgtgttgcctattaatatagtagattatattgattggttttttgaatattgatccagccttggaaccctggaatacattcctacttgatcatcctgtgtaattttttgtattgctgagttctgtttgctaatattttgttaaggatttttgtgtctgtattcgtgaggtatgatactggtcttaacttttttttttggtactgttttttctggtttgggtattagtaatactgactttataatgaattggcaaatgatctgtttcccattttccagaagagattgtgcaaaattagtgtgattttttttttttttttttttttgagacagagtcttgctctgttgtgcatgctggagtgcagtggtgcagtcttagctcactgcagcccccacctcctgggttcaagtgattctcttgcctcagcctcctgagtagctgggattacaggcgtgccccacgcccagcttgtattctttagtagaggtggagtttcgccatgttggctaggctggtctcaaactcctgacctcaagtgatccgcctgccttggcctcccaaattgttgggattacaggcgtgagccactgcccggctagtgaaactttttaatgaggtccattaacttaatagttatagggctgttcaaattaactacttcattttgggtcatactgggtgagctctagtggtttgtgctgtttgaggaattggtacattccatctaaggtaaaatctatgtgtacagagctgtttgtaatattccctcattatcctttcaacatctgctaagtctatagtgataacccatttctttctctttttttgagacagggtattactctggctgtggtgcaactggctgtggtgctcagtgcagcctcgacttcccaagcaatctgcccacctctgcctcccgagtagctgggactataggcgtgggccaccatgcctggctaattaaaaaaattttttttgtagagatggagtcttgctttgttgccagggctggtctcattttagaaattggcagtttcgtttttgaaattggcagtttaggtcttttttagggtcagtcttgctagaggtttgtgaattttattgatcttttcaaagaactagctttttattgtttgttttctgttgtaaatgttattgatgtcttctcttttgtttgctgttggtttatttttttttctttctttcttttttttttttttttttgagacggagtctggctctgtcgcccaggctggagtgcaatggcgcgatcttggctcactgcaagctccgcctcctgggttgacaccattctcctgccttagcctcctgagtagctgggactacaggagcctgccaccacacccggctaatttttttatgtttttagtagagatggggtttcactgtgttagccaggatggtctcgatctcctgacctggtgatccacctgcttcggcctcccgacgtgctggggttacaggcgtgagccaccgcgcccggccactgttggtttattttgctcaacttttatcagtttcttaagatggtagcttagattgttgagtttttgagaatttgttttatggctctattttagatatatttgatgggagcttgaaaagaatatgtactctgttgagtggaatgttgtataagtgtttaattggttgatgatgtcgaattcttctatatccttgttcggtgtctactgttttatcaactattgagagacaggtgttgaaatcttcagttacaatgtggatttttctctttctcctttcagttctgtcacgttttgcagttctattgttcatgcattcacatttagtattgctatgtctttggaattgtctcttttttcattacataatcttttttcaaacttttaatctatgtatattataattgagtaagtttcttgtagatgatatagttgggtcattttttaaatctattctgcctatgtcttttaattggtgtatttagaccatttatatttaagctttatatcagttattattttaagtctgccatttttctttttgtctttttcatttctctctgagttttttcccccctaactttctgggttacatgaacagtttttagaattccatttttatttctctatagtaactcattagtctactatattatcagcattttacaatatttttttttctccagaaataaaatctcactcagtcacccaggctggagtgcagtggcacagtcttagctctctgaagcctgaaactcctggcctcaagcaatcctcctgattcagcctcccgagtagctaggactagaggcatgcaccactatgctcagctaatttctttaatgtgtggaggtggggatcttgctatgttgctcaggctggtcttaaactcctggcctcaggtgattcccctgcattggcctcccaaaggactgggattatgggcacaagccatttgagtgaaatttagaatgcttccttccctttacatcactttattcttctccatttataattgtcttaaatatttatttgtatttgagaaccatatcagtttttttgttcttcaaccatcaaacataatttagaaaacccaaaaggaaaaggagaatattatattgactcattttgcattttctgttgttcttccttactgataaattcaaatcttcttaattaattttctttctgtttcgaaaactttctttaaccattcttttagagcaggtctgctgttaacagattctcctagtttttctttatcagagcatggcctcatttcttctttatttctgaaggatgtattcactcgatataggattctggattcacagttattttctttcaacacctgacaaatgtttttgctccctctttggcctccataattccgatgagaaatttgctgtcactggaattgtttgtcccctgtaggtaagatgttctttctgtcttactgctttcaggattgttttctttgcctttagttttcagattgagcatgagtatatttagtttgaggtttgagtgcgatatgacttgatgtggatttctttgggtttgtcttgtttggggttcactgacattcttgaagaatctgtagtagattgatgttttgtcccaggtttggaaagttttcagccattactcaaattgtttttcagccctgctctcttccctcattttgggactctgattatatgaatgttagatcgtttgtttggtccctaggactgtcttttttctttttttttttttgttcagattgggtaatttctattgtactgtctttaaatttactgactcttgaccctcttctcttttgatattgagcccatcaattgagttttttatttgggttataatagtatattttagttataaaacttccagttcattctaagtatgtttgcattcattgaagcatttttatattcctgccttaaatctatgtcagatctgacatccatgttatctcagtgttggtatctattgattatctttttaaagctgatttttgtctttttaaaaagttgatttttatgattcttggtatgaagagtgatttttgattgaaacctgggtattttgggtattacgagactctggaccttatttagatcttctcttacagcaggctttctctgataccttttcagctggggaagggaggcgcattgtgttgtgccagattggggtggaagtctgggttccccactcggttgaccttgtgttggtgcttcattactgctcagtcggggtgggagttaaggctctccgtaggcctcagctgataccaccctagctgggaagggccaggatgcctaattactgccccccctagtggtctccatttacactctgggtagttggtggtggctttaccaatgaatggttatgaatgtcctaactctattaggcctcctctgataccaccctagcccgagaggaggcgggtcaccccattgctataagaggtacagggagagtcatggggtaggcacttggggtgcttagttacaacctgagcatgggttttcactggttcagatggaggtgggtccacagatttttctagggtgtttggctggagtagagcattgttgtctgaaaattttgtcctgttaggctgctactttttttggttcattggctagaaaaagcaggcttttattgttgttgttgttgttgttgtcttcactcattagcatttgtgagttgctgccttctctcttatctagtctggaatacataaggcaaaagaaaacccgggaaactcaacggttatcgtttgtgttccaaggtttctaacttgtttgccttttctctacctttccaagtcttatgtttgctttgtgtatgatactccgacttttaagtggacttacaggaaaaaacacatctgctacattgttccaccagcagaagtaaaaagctattagctttttaaaatttctgctcttagaacttagatctctggaaaggatttctgaattttaggtggtaggctgaactgaaatatattggtggtctcaaatctggctctgcatcggactcactaggagaatgttagaaaaatagatttcctagacctcaccttcagaaattctaaatctggcgcaaggccctgggaattggtagttctaaaaagctcttagatgattttgaagtgcagccatccattagctctggcaacatctttttacctcactttgctttagtttttccatccagggactccagtacttaaaaattcttcaccggtgcagttagtaagaagcacttgaagagctattttacagttcttctgctttggcctttctcttagagactctgaatcagtaggggctgagagactctgaatcagtaggggctgagatgagtcttttgagaaaactccacagactattgatccaattttgcatttagccaagagtcatcacactgggtggtttctaaggtcctttacagttaaaaacttgaataatagatgtcatatagcactaggatttaaaaagtctaaataaaaaaggtagagaagaaaaatgtgttgtctcctccctaatcttcaagtggccatactattaaattatttaaatgcctgtgaaccccacagggctgccacctgtcactatattatgtaggctgtccagtaaaactctaggggcactgttcacttacatgaggatttctgaatcctggtgctatttagtttaggccagataattcttttttttgtagggggtttcctgtgcattataagatatttagtagcatctttggcctctacccattagagcacagacacattgtcaaatgtcccttcgtgggcaaaccactgacctagacagtaatatgaatagtgcccacagttttgcaattttttctcattgtattctttaccacttactgcttaggtatgtgcatacaaatttgattttataggataggaaaagtataagtttgaagcctatttcaatcctatccccatatgagtgtcttgatgttaaacaactgctttacttgccttcgattgccctatttataaactgaattctaaggctatttatgtgagttcatcaactttcctaagatacctgttgagtacctactgtgtggcacagatactggatgaaggaataatagttaataaggtaaaggaaaccacctgtgattagaagcgaaatgggagactgcatggggaaagatgaaactagtgaagtaagcaagagccagattaatgccggattctgaaaagccatgtattctaattctgtgtgtttgtaattgacctgtgctataaaacacttaaagtctctgggtgtcagagtatctagagctgaacttggtttaacttgaaagagaaatgttgacttccaaaatgaatatttcagacaatgtgattcttttgtattatcgaattctgttgataatcagatttcttgtccttaagtatggtcattgactgtaaatataaatgaatgtacatcactgtacttgatagatggattaaccaggttctaagagctgtgaattccaaaacaatagaaaagccttgtttttactttgtaagattcagttcctcattaacatttctttttctcatttctctctctgttttagtcttgtgaaaatgccattgtgtgctggaaacctggcaagatggaagatgatatagataaaattaaacccagtgaatctaatgtgactattcttgggcgatttgattacagccagtgtgacatttggtacatgaggttttctatggatttctggcaaaaggtatcaacatacttttacattttgaaatgatctgacttatgaaagaccattgtaattctagctttttctgttgtgtccatgttctttttcctttacaaatctaccctgatgttttgtattgattactttgccctttgatgtcattcatcaaatactttggtgttattcattctacttttgtggctctgcatatgatctgcagtgcttactttaaattaagttggcagttaggtatcaatggtggaaattaggtgtttatgttccataacataaacattatcataacattactaagacttaatgttttagtaattagattgtcagtctacctatgtaactgtttcctagagaaaaatcaggatagaagacagataaaatactagttacctaaaaatttaaataaatctattgttaggattttctggtaacaaattacttgggtatttatttctgtaagaaaagtttggaaggctttccacagcatttgctgtatttcttgaaggcagaagaaaaagtaagtaccatgctaacaatgtaaatttgtaaggcccttcataaatttgcacaatgccttcttacttgctcaagacacttgtgatgtattaattgctcttattcatatttacgaatcaggagtataagacccaaagaaatagccaagagcacagaggctggaactgagctttttctgaaacaagaaagctgtctgaggattcctccaatgctttagaacctggtaattttattaatttgatgtttttaaaaatatgtttatacagatgcttgcattgggcaatcaagttggcaaactttatgtttgggatttagaagtagaagatcctcataaagccaagtaagtatttagaaatttctgttcaaaatttcaggctttttctccacacttgtatgccaatgtagagaagatcatttatatttgcagtgccatccttaagtcatttttaacatttactgttttcagagttaaagttattcttttttattccaataatttttgtttttcctaagtaccttggtgacaagtcatttcttgtttttatacaaattatgtagtgcttgttgaacttaaaatatatctaaattttataaaatttgagactgagctcttagtgaagtatattctggttttaagtgcttttcgtatgacttggaacatctgcttattttctaatccgctgttttagggtagacactgacaacgttatgtgtggtctttaacctgttgtcatgttttttccctagatgtacaacactgactcatcataaatgtggtgctgctattcgacaaaccagttttagcagggatagcagcattcttatagctgtttgtgatgatgccagtatttggcgctgggatcgacttcgataaaatacttttgcctaatcaaaattagagtgtgtttgttgtctgtgtaaaatagaattaatgtatcttgctagtaagggcacgtagagcatttagagttgtctttcagcattcaatcaggctgagctgaatgtagtgatgtttacattgtttacattctttgtactgtcttcctgctcagactctactgcttttaataaaaatttatttttgtaaagctgtgtgtttagttactttcattgtggtgaaaaaaagttaaaagtaataaaattatgccttatctttttataatggttgttttttgtagttctcttaaccagagaaagttttgtaatacagagattaagtataggctctagaactaaagtgaattcaaatcttggctctcctactacgtgaccttggataaacaacttctcaatgcttggttccttgtgtataaaacagggataataatacttgccttggggttattgtgaggatcaaatgattcgttatgtgtgagacagttagaacagtatttgacatataataagccctaaatgtattctgtgtttataattattggagattatagttcctatggttttatattttttaatgatttcttatgtaatagtttcataagtaatatttaaaattctacagagttagaacctctgataatgtttaactgtaacctttctttatagtttaaaaaatattactgccattagatttggaactaggccattggtaaccttagaggagatatcattagggcaaaggaggagaggatatagaagtttaaatgcagtgggttggatcatgaaagagatggcaagtatgtccatgtagtgagttgttgccccttttctagaaggatgttactggctaagagggattaagtagattgagatcataaggttgggaatagttggttattttgtctccaacataaggcacactgcatttatttgtgggcaaaaattccctaaagagtgaagaccaagatcacatgtggaggggttaacttgaagcagaggagtgaagaaagcctgaatgatcataaagctaaggttggaggtgaaatgaggtgagccagagaaaaatacaaaagactgaattttgtcaggtttttaaaaagattcatgaacttgtttctataaatatgtatatttttaaagtttagttttgatatcttgtacagtgtttgatactgcccctttttgagctatctctgaagcacagtttacttctctgataatagtataatgcttaagtctgaataaacaggaaaacttactgccttttactgtcttggtccaatgaacgcttcaattgttttttagaaattttaataggaacttcaagaagtaaacctttatagcaagtaaattcttacgtacagcatcacaaaagacaaggaatactgtcatatccttttagcaaaatgagattgcctaggttcttgttgcaaaataccacataatgaaatccttcctgttgcatgattaactgggtgagaatatcatctttccttttggtccgtagaaatgtattattcactactccattcttgaggtttgttttttaatttttttggagacagtctcactctgttgcccagtctggagtgcagtggtgcggtctcagacgtctcactgcaacctctgtctcccaggctcaagtgattctcgtgcctcaccctcccaggtagcttggattacaggtgtgtgccacgatgcccagctaatttttgtatttttagtagaggcggggttttatcatgttgaccaggctagaatatcgagtgttaaagttagtgcagataatgaaagatccaggagtcagaactcacaggccagttatcagccacatgtttatactctatttttgccctctctcctttccctgaaatactaaggaagtaacatctcttttcctaatggatgttatccagaggccccagtcaccagttatctcattagcctacaaaaacacattattttcactcaagtgatctcaaggttcttagaagttatatcaggaaatggaaatcaagaagaaattatattctcaagggtcttagaagttgtatcaggaaatagaaaccaagaagaaattatatatatgtctttaattgaccattgtgtatatttatagggtacaatgtgatgcttcatacatgtatacaatgtagaatgagcaaattgggctaatatatccttcactttgttcctcatcttaaaggaaaagcctccaacttttcactaatgagtatgatgttagttattggcatgtcacacatggcctttattgtgttgaggaacattcattccttctatacctattttgttgggagttatcatgaaagggtgttgaattttgtcaaatgctttttctgcctctattgtgataatgtacagtttttgtccttcattctggtaatatggtgaatcacatttattaatgtgcatatgttcaaacatccttgcatcccagggataaatcccacatggtcatggtggatgattcttttaatgtattgctgaagatgatggtttgctattattttgttgagtgtttttgtatttacgttcatcagggatattgtttctgctagtgtccttggtctggctttggtatcaggctaatactgtcctcgtaagatgagtttggaagtattccttgctcttcatttttgggaagaatgtgaggattggtattaattctttaaatgtttaatagaaacagaaaagtgccgtcttgggcttttctttgatgagagacttggtgtattaacagttgtaatatttcctctttcatttctgatttgagtcctttttttcttattaagtgttgctataagggtttgtcaattttgtttagctttttgttttttcatttttttattttctatttcatttatttctgctctgatctttgttatttccttccactaacttgaggtttagtttgttctttttctagttccttgaggtgttgaggtttaggttgttggtttgcgatcttttttaatgcaggcatttaatgctataaacttccctcttaaaactgtttttgctgcatcccataagttttgacatgtgtttccattttcatttgtctcaaggtatctttatatatgtttctagagtcggggtcttgctatgttgttcaggcttagagttcagtggctattcgcaggtgcagttatagctgtcactgcaccctcgaactcctgggtccaagtgatccattcctgccccagcttcccaagtagctacgactgtaggcatgcatcactgtgccaggctttcaagacatctttcattttctcttgtagtttcttttttgacccaataattgtccagtatatttcttacacagtgtcttaggaaagataaaaccagctttgatatgttgagtattatgtttccgaaaagacaagacagggttgtttttcttaactttatacttgaaagtttcaaacatatagaagagtgaagagagtagtgaatactatgaaccaagtcaagcttcaacaattatcaatacatagccaatcttgatttatctatacatctacaccagattgtttcgaagcacatcccagactttattttaactgtaaaaatttactctatatttccaagaaagactttaaacaaaatatcaataccatgctcaccctttaaaaagtaatttctaaattatatatgcagtttatttagaagtataaagaaaaaagtaaaaactacctttaatttttgtacacagaaataattgcttttagtgatgggatgtattttgtgtgtgtaagtttaaagaattgtgattgtctgaatatattgtttatatgctgcattttcagattcccagtaattcttaacagattattctgcttgcatatcttttaatacatttccatgaatgtaccattatctatttaatgccttgttgttggacatgttcatttcttccagatttttgctattataggtagtattttgaataacaggccagtacacaagtctttgtgtaactctcaggctcattttataattagataggatatttctttcttattaagtttgtaccaaattacacttgccccaacacatatggtagtacccattccagttttgttgttactagtttcctgtatattatctctgcagatcagggtgttttttctgtaaagagctagatagtacatattttaggccttgccatacagtctcgtcataactattcaactctgctgctgtagggcgaaagcagccgtagacaactgggtatggctgtgtaccaataaaactttacttaccaaaacaggcagtggtggagcatagtggctcatgcttgtaatcccagcactctgagaggctaaggtggacagattgcttgaccccaggagttcaagaccagccggggcaacatagtgaaaccccacctctactacaaatacaaaaaaaaattagccaggcatgatggtgcatgcctgtattctcagctacttgggaggctgaggcaggagggaaaaaaaagaacaacaaacaacaggcagttggctagattctgtccacaagccatagtttgataaccccttcagtggatactagttattaaagcaaaacaaacaaaataagtcttaaggaggcccctaaagttgttgaagatttaagtcaaccgaatagtttataatcaaagatcaccagattgacaatgaagcaagctctatggctgagggttgaaacaataaaaaataaaaaaataaataaaaatagaccaccaaagactttagatattgcaattttcaggtaatataaaacagccaccttattttaaaattgcaactctccttcctctctgtactttctccttgttttgttactctccatttcaattatcacctactatactgcgtaatttgcttatttggtttattgtatttcttctgctactgtgatgtagtctatatgagagcagggtttttatttcactgctataaccccagcacctagagcagtgcctttcatgtaacaggggtcagaattaaacagtcataaaaataagctaacagtaagaggctatgatgactgacgaggtgaatatgagagggaaacaaatagaacttttacaaatgaaaaatacatttgttgaagtaaaaaattcaacggacgggttagattagtcacagctgaatagaaattagtgaattggaggtgatctgtagaaattaccagaatgtggcacagagaatcaagaaaatggagaatatgagaggttaagaaatatagaggataaaatgaaaagatctaacaatatatttaattggagatccagaaaaaaaaaaaaaagagaatgaagtgaaggaaatatttgaagaggtaattatcttacttgctaccaggatacttgagtgccatgtgggcatgtatgatagagctaggagaaatagcaggtggttctggcatcttccttaccatcgtgtctcccactttgactgcagtcgtgaccactgatgtgccagtctgcttcagtctctaccaagcccagaacttcaccctctatcgggtcctgaggaaaagcagcttccacggtttatttcaagctggatgaggatccaattgatgccatatccctgttgtagccttttgtggtgagacaaggcgctcatcaggacagcagattcttcaaagccttccacaccaatgtgaaggacagtaagatgtggaagttcctgggttttgtttttggacaatgggaaccaagggtggcatccctacactccatagtgtagggcctgacacgatgtaaactccctcctccagtaatcattcatcaagagtttcagtgttgtgataacctgtgagttctccacatagtggcacatcatggacctcatttccttcctggattacaactgcaccttggacagtgagggctcttttggaagtgcacacctagctgacctgccctccaactcaaaagtggacaagacctgttcagaggtgttaagcacccccacactcaatgtccattcaggccaaaagtatgctctttgccccaagggaaccaaagtcatgatgacatatgccagagcttgggtaaaggatacagtgaggattcttggatttcagaacaaagtattcctggagccccctgtacttcatgaagcctatgtccagcttgttgtcaaagaaatgtagattaattcaaaaggaacacaggattctatcggtccttttcctagtcctgaagacaaggtcagctatgtaatatccagggcccagtgcaaaatgaaaaggcaaactccttgggccgggtgcggtggttcatgcctgtagtcccagcactttgggaggctgaggtgggcggatcatctgaggtcaggagtttgagacagcctggccaacatggtgaaacctcgtctctaccaaaaatacaaaagttagctaggcatgatggcatgtgcctgtaatcccagctacttgggaggatgaagcatgagaatcacttgagcccgtgaggcagaggttgcggtgagctgagattgtgccaccacactccagcctgggcaacagagtgagactctgtctcaaaaacgaaaaaccaaaaaacagaaaaggctgggcacggtggttcatgcctgtaatcgcagcactttgggaggccaaggcaggaggactgcttgagcccaggagtttgagaccaccctaagcaacatagcaagacgctgtctctacaaaatatttgaaaattagctgggtggagtagtgtgcacctgtagtcccagctactagggaggctaaggtgggagtatcacttgagcccaggaggctgaggctgcagtgagctgtgatcacaccactgcaatccagccagggtgacagagcaagaccctgtctcaaaaaaagaaaaaaaaattaaaaggaaaaattaggttaaaggtactaactataaagctttttccatcctttaacaatttctcaactggtcgtggttttaaattttgctacttaatgccattctaagtaaagtaaaattgttagcatgaattttattattcattttcatattgtgtaatgatcattttatttttttgagacagagtttcgctcttgttgcccgggctggagtgcaggggtgtgatttcagctcactgcaacttccgcctcccagtttcaagagcttctcctgcctcagcctcctgagtagctgggattacaggcgtgcgccaccaagcccagctaatttttgtatttttagtagagacagggtttcaccatgttggccaggatggtctcgaactcctgacctcaagtgatccaacctgcctcagcctcccaaggtgctgggattacaggtgtgagccaccaggcctggtgtaatgatcattttaaatacaaacataagagcctttacctcttatgtgaaattagaaattacagaattgatatttgtgtctcatacacacaagtattttgttcttaccaggggagtggaaactctgcacaaaagtaactccacttttatttgagacagagtctcgctctgtcgcccaggctggaatgcagtggtgcaatctcggctcactgcagcctccacctctcaggttcaagcaattctcctgtctcagcctcctgagtagctgggattacaaatgtgtgccaccacagccagctaattttttttttttttggtatcgttagtagagacggggtttcgccatgttggccaggctggtctggaactcctggcctcaagtgatccgcccgcctcagcctcccaaagtgctgggattacaggcgtgagccactgtgcctggctgagatgacaaataggatgaagtcttggggtgtttcgaaggaaaaaaaatggggtgagaaaggaataagaggtggctttgagtatatcatctactacaaaatactggaaaaaggctggtagaaactcagtgactttaaaattatctttaagcaaatgcctgagaaaggcaaaagtctaaagaaatgatggtcactttttccagaagtgcttaaagaattgaaatgctcctttgaggcaaaggggacagtcattctgcttaattgcatcttcaggcttgaacaaggtatcatctaggacagtaggttttaaattttttttaatgcaacccacagtaagaaatagactatacaggccaggtgcggtggctcaggcctgtaatcccagcactttgggaggccgaggcgggcagatcacgaggtcaggagatcgagactatcctggctaacacggtgaaaccccgtctctactaaaaatacaaaaaattagccgggcacggtggtgggcacctgtagtcccagctactcgggaggctgaggcaggagaatggtgtgaacccgggaggtggagcttgcagtgagccaagatagcgccactgcactcctgcctgggcgaaagagcgagactccgtctcaaaaaaaaaaaaaaaaaaaaaaagaaatagactatacataataacccaatcatacacacatatagaaagtcccatgaaacaatatacttactaatatgatgcattctgaaattttctatttctttttttttttctttttgtaatgctggttgtaactcactaaattgatttcacaacctgcccatggatctcagcctgcagtgtgaaacacagtaacctagggaaaatgagtctagatggcttttaccaagggtagtggaagtggggcccacattgtgagaaatacaaccataagtaaaaagtgctaaatggcctctctttaaccagagaccacagtctgtaacttcccctgctttcagtggttacctctgggtttcccctgttgtgatttatagaaaatgactatcactttggaattgagctggtggatttctacaaagattcttggtatttcatggttattttctgatgtagagcaagacttcatgtgaatgaaagcagattcattttgcctttcttgcttgggtaccccaggctgatgtggaataaaaaattgttgggtgatttctcttacatttctgcataatgagtgagggaagtgtgtgtgtttaattccgaaaccaataaactgggttgccagaaaatcattgatcataagaagtgtatggcactgaactgacaccctgtgctatatgggccattatttttcttcattgcaaaatcactattttttatttatttattgtttttgagacagagttttgctcttgttgcccaggctggagtgcaatggcgcaatctcagctcatggcaacctgtgcctcctgggttcaagcgatgctcctgcctcagcgtcctgagtagctgggattacaggcatgcgtctccatgcctgaattttgtatttttagtagagatgaggtttctacatatgggtcaggctggtctcgaactcccgaccttgacctcccaaagtgctgggattacaggcatgagccaccgcgctcagccatgcaaaatcactttttaaactgttaatatttcatataagaaaggcttggcttatcttactgaatctggttgcaaattgtcttaataatcccagttctgaatagcaacctgcaggggatggtggctcaggcctgtaatcccagcactttagaaggctgatgcaggaagatcacttgagcccaagagtttgagaccagccctggcaacatagcgagattccatctctacaaaaaacaactagccaggtgtggtggcacatgcctgtagtcttagctgcttggaaggctgaggcaggaggatcgcttgagccttgagccatgatcccgccactgcactccagctctggtgacagagcgagaccctgactctaatgaaaaataataaaatgaataacttatgtaagagttctgcattattccccttaatccctgagtaaatctggctgaaatacagagtttgtgacccttgggaagtcaaaactctctgtgaaggacccttcaaaatacttttttgcctttgctctaaaatgttagctcctagtagacaggagagaatcatttattcatgtatttaattggccaggtgtgcaaagcactgtattagtgatggccctatatagacctttattatgcagtggttcccacatgtgaaaagagtgaatgtaccataatcatttagggagtattttaataataaactctcaaaagttttgctaaactgcaattttatattggctgggcacaacacaaaacagcccaaag

SEQ ID NO: 426 - DNA, 2005 bp, Homo sapiens
ctccctagcagcgggtcggagatcgaaggaacgggccaattgcggctgaaacgtctttggaaggaggaagggggtgagggagcatccctttgagtttcgcctcttctcgaggcggtggtgggaagggagacatacttaatactgccctcttaatccaacggaccttacatcgtgtagactgccgggagggcggcgggaaaagggcaagacgggagttggggaagggaaggagccaggaagccgcgcgggagggcgcgcgcgcgcgcccctttttcagcagtgtggcggggtcgcacgcacgcccgcctcggcggctgggcgcgatttgcgacagtggggggggcggtggaggtggcggcggcagcggcaactttgcggcaagctcgggccgggcttgcttgacggcggtgtggcggaggccccgccccaggcggcaggaacctggagggaggcggaggaatatgtccgagagggaagtgtcgactgcgccggcgggaacagacatgcctgcggccaagaagcagaagctgagcagtgacgagaacagcaatccagacctctctggagacgagaatgatgacgctgtcagtatagaaagtggtacaaacactgaacgccctgatacacctacaaacacgccaaatgcacctggaaggaaaagttggggaaagggaaaatggaagtcaaagaaatgcaaatattctttcaaatgtgtaaatagtctcaaggaagatcataaccaaccattgtttggagttcagtttaactggcacagtaaagaaggagatccattagtgtttgcaactgtaggaagcaacagagttaccttgtatgaatgtcattcacaaggagaaatccggttgttgcaatcttacgtggatgctgatgctgatgaaaacttttacacttgtgcatggacctatgatagcaatacgagccatcctctgctggctgtagctggatctagaggcataattaggataataaatcctataacaatgcagtgtataaagcactatgttggccatggaaatgctatcaatgagctgaaattccatccaagagatccaaatcttctcctgtcagtaagtaaagatcatgctttacgattatggaatatccagacggacactctggtggcaatatttggaggcgtagaagggcacagagatgaagttctaagtgctgattatgatcttttgggtgaaaaaataatgtcctgtggtatggatcattctcttaaactttggaggatcaattcaaagagaatgatgaatgcaattaaggaatcttatgattataatccaaataaaactaacaggccatttatttctcagaaaatccattttcctgatttttctaccagagacatacataggaattatgttgattgtgtgcgatggttaggcgatttgatactttctaagtcttgtgaaaatgccattgtgtgctggaaacctggcaagatggaagatgatatagataaaattaaacccagtgaatctaatgtgactattcttgggcgatttgattacagccagtgtgacatttggtacatgaggttttctatggatttctggcaaaagatgcttgcattgggcaatcaagttggcaaactttatgtttgggatttagaagtagaagatcctcataaagccaaatgtacaacactgactcatcataaatgtggtgctgctattcgacaaaccagttttagcagggatagcagcattcttatagctgtttgtgatgatgccagtatttggcgctgggatcgacttcgataaaatacttttgcctaatcaaaattagagtgtgtttgttgtctgtgtaaaatagaattaatgtatcttgctagtaagggcacgtagagcatttagagttgtctttcagcattcaatcaggctgagctgaatgtagtgatgtttacattgtttacattctttgtactgtcttcctgctcagactctactgcttttaataaaaatttatttttgtaaagctg

SEQ ID NO: 427 - protein, 439 aa, Homo sapiens; identical to SEQ ID NO: 422

SEQ ID NO: 428 - DNA, 142642 bp, Mus musculus
  misc_feature (1)...(142642): n = A, C, G or T/U
catggtgctgaagatgacattttttaaaaaaattatttatttttattttattttattttattttattttattcaccttggtatgtttttgcctgctcgtatgtttgtgtgaggttgtcagatcttggagttacagacagttgtgagctgccatgttggtgctgggaattgaaccagggtcctctggaagagcagtcaattctcttaaccactgagccatctctccagcccccccctcaccctttttttatttttttgagacagggtttttctgtgtagccttggctgtcctggaactcactctgtagaccaggctggcctcaaactcagaaatccacctgcctctgcctcccaagtactgggattaaaggtgtgcgccaccactgcccagctccaaccccccttttcattacttttaaaaaagatttactttttattccgttaagtgcctgtgtttgctgtatgtatgacgatgcccacagagaccagaagaggttgttatatcctctggcgttggagttgcagggagttgggagcctccggagctaggtgggtgctgtgagctaaattcaggttccccagaagaacagaaagcacttttaacatctcagccatggatccagtcaaggtagagctttttgataggaagttatgttgctttatgtaagctatagaatttcaggagaacattacccaagaaaataaataagtttatttctccaattaaggcaaaaactcaccttgatgtgagacttctgaaagtcggtcagcacttagggactacttctctgttcttgttcataatctatcttttcttatatgttggattttcatgtctttttttactttttgtttattcccagattttaaatcaccagttttttaataattattcattttcctctgctatatatttcatttgcatcattttgtatgaaatgtctaaagacttgattgtaatttaggcaagtcataatgagacacgcctttaactgcagcactcagaggccagaggcagagaccaaggcaggcggctctttgtgagttcagggcattcctggtctatactgagaattccagaccagccaaggatgaacagtaaaaacctgtctcaaaaacaaacaagcaaacagcaacaaaaacagaataatagttgtttttataccttttttagatttgaatcatcacagtgttgtaggtgtagtggtaaacagcctgtgcatagagacactaatattagccaatgaagaggggggattttttttttttttttttagcatttgtgacagtttcagaaagtttatttttctttgtttgaaaattacaacaaaacttaatgtgggtttacttttaaactttaatttttatttgttttatataaatggtgtttcatctacttgagtctatgtagagttagagatggttgtgaaccattatgtgagtgctgggaacttgacttaacatctgcaagagcaggatatgctcttagctactgagccatctctccagcttgtgtttatttttatttttgtcctttgagaagggtcagtgtgtagctctggctggcctggacgttgatttgtagactaggctggtctgaaactcataagagaaccactggactctgtctcccaagttgtgggatcaaaggagcgcgttctcatgctcagccccctgtcttgtttttgaagtaaggaagtaaggtcttatagtattaccagcctggcctcctaactcaggtcctctagctggtttttggtggtttttttttttgcttcctgagggctgggattacatgtctgtgccacaatgctggatgacctgctttcccatggatacagtttgtctaacattgagtgatgtctccagcccttaagtaaatgccttttcaatattttattttgtttattgttgttcttttgagtagagtctcatgtagctcaggctggcctctagcttaccctgtagctgaggatgttctgaacttcttaaatccctctgtcccctctgtgctgaggttacagatgtacatcactatgcctggcttaaagagttttaaaaatgatttttcccagagttatttttgagattcttgatcttgtaggattttatatttagtggtaatggtcttttgaggtttcgtcatttgggattatgttgcttgagattgtttttggtgattaggacctaattccctaagtgagaagccccaggggattagagtcctggtcttggttattttggttatagtctttaccttgagcaagcctgcttaatttttctgggcttcattttctcttgcgggtgtagactgggtgatctgtattagctgctcttagttcaggtctagaaatctgcatatatatatatatatatatatatatatatatatatatatatatatatatatggctgaagaggttgcttgttgcttcagagtcattgccacttgcagatgacccaggttcagctctagcatgggctccctcaaaaccaccagcaactccagttcaagggattattttaagtcttctggccaccataggcaccaggcatgtttatggtatacatacatgcagggaaaacatttatgtatataaattttttaaaaatagtttaaaaggagttgtttgcaattctaatagggcatgtattcttcgttttagctaattatatggcttaataaaaatacatttcttatgtacccaaggtttgatacaagttcctctatcagtattatcctgtgtttatagtggtcattgttatgcaggaagtgtatcatcttaggtggttttaccatttcctccttccttccctccctccttccctctccctccctccctctctccctcctcctctccctctctgtttttgtttttttttttttgagacaggacttctctgtgtagtccatgctgtgtctggaactcactagaccagcctggccttgaactcagagatctacttgcttttgcctcttaagtactgggattaaagacatgtgccaccaccatctagcttactgatttttcttatttaaaattttttgttacatttatatatttatgtgttgtatgtgtgtgtgtatatgtgtgtgcatgtgttatcacagtacccatgtggaggtcagaggacaacttgagggaatccattctttccttctagcgtgtgagtttcagggattgaactctggacgtcaggcttgacagcaagtgcctttaactgagccacttagggatacacaaaagattgagattgactgttgactaccacatacaaatacggtactgggagcttgaaagtgtggctcttgtgcttggattatagtataatataggatgggctgacagagagttaagttgtagctcattatatgtgatattggatatactgagtataaaagaggaaacagcattggaaatggggggatgaggaacggtcttgaggaattactatccaaattgggagggaatctaagtgagtgtgggcagagtgtaattacagagagaaaatactggataacgagaactaagtacatgaaagttgaagcagcataggtcttgtgcctttaagtaattggtaagatgtaatttgtgtggagtaaggatagagctgtagattaagttcaagttggctaccatactgtgttttgcattgtgtaaaagctgagtttcctttttaggcatagtgaggagagaggcagagtaacatttcttgaaacagttttaaacatcaaaacaaaacaagggtgttctttagagctcaggagtgaaatgtctgcagctcagtagattgtctgaacacccacacagtggtcaccgtggtcagctttcttcttcagaaaaagtaaccagtgtcctctgcaggttagccaattgggtcttcacttcctaaattggttagcgtggttttgagtgtgtcagtagaactaaggtttccatataacattctggaagattctggtgctgattgtagtagttggttattttcattgctgtctggctgtgtaggattctttttatagccatctcacgcacatatttattcacctgttcattttacctgtagactttttggattttacttactcaattttgtgtaggccaagagttaacattgggtgtctttctcagtcactctccacgtttttttttttttttaattctgtcatttattttgcttatgtgtgcctgtgtttctgtatgctgtgtatttgggagtgtgcatgtggaggtgagaagacacctttgtggagttagctggttctgaggatcagttcaggttgtcaggctgggcagtgagcacctgtgcctgttaaaccatcctgcttgctctttccactttttatttttctgagatagcctctcactgaccccgaagcttactgatccctctgcttggctctagagatcctcctgccttttctttcccagtgctagattatagatgtagattatagatgtgtgatacttttatgtgggttctggatgttcaactcatgtcttcatgcttgagcaacaaacactataccagttgactcatctctctagtcccctaaatagtcatgcttttgtttgtttggataaggtctctggagctcagaatggccacaaaactgctagtagccagatatttaacctctggcctacaatcttcatcctttgcctccctggtgctaggatgcttgggtctggggtgtgtttgttattgctgagcattctgttatgtggctgtgtctcacattatttatccatccacacactatgctttttgtttgtttggctcttttgagacagggtttttctgtatagccctggctgtcctggaattcactctgtagactaggctggccttgaactcagaaatccacctgcctctgccccacaagttctgggattaaaggcgtgcgacaccactgcccggaccttgttgtctttaaaggtaaagtcttatatattttgactgacctagtactctcactgtgtagtctaagctattctggaacttgatgtaagctttctgccttagcctaccaagtgctgaagttacagacacatgccactgtgttagctgatttgtctgttttgaatatttcacatgtatcctttgtgtttggcttctttcatttgtataatttttaaaaagaccagtctacattgtaccatgtcaggactttattcctttatgtggatgaaaagtattccatcgtatggctataccactgtgtgtgtgtacacttgttactggattttaggtttttttctatttgctttactattgtaaaaatttgtgtataagtttgtgtggagatatgttctcattcttttgaggagtatttacataagattggaattgcggagtcaaattgctggacttcaggaatgactagattgttttattcagcggctgcttttacatttctaccaatggtaaatgagagtttaaatttttccatagtcttaccagtattatttatttatttatttatttatttgtttagagacaagttcttattatgcaatcctggctggcttagaactcatttatgtagacaaagctgacctcaaaatcatagagatctggctcctcttttgagccttcagttgtcacactagttaacatcctatgtcctgtcagtcctggctgtgtgcatcattttccagcggtgctgaactgataaggcccatccatgctgcggctgatggcccgtggcatctgctcctggaatgaggctacccctgggaggccacatgcctcccacttgtcagatgatgcttcccactgccctggagtgactcagccggacagacaagcgcagtagggctctctatcagttttttatttcactaggagatcatgatgctgactgagcctgagtgttttctggcagagagaataaatttggggaggtcaaaatggggttaaaaaagaatagttttcacttgtgttgtgaagtgtgaaaataaaattggtggctctttttatttaaaaaaacaaaacaaaacaaaacaaaacaaaacaaaacagagatcacaagaccacttgcctctgtctcctgagtgctgggatcaaagttgtgtaccacatctgacttacaagtattttttttttgtctcatttttttaaatttgcttgtatacctgcatgtgtgtgcatgtcaaggtgcctctgtacaggtaggatcaggcttgggtgtttgttctcacttcctaccttgatttagacagggtctcttgttctccattgcacactttggggattcgcctgtcttcacctttcatattcctctaggacagtggttttctgccttcctaatgctgcaaccctttaatatagtttctcatgctgtggtgacccccaaccataaaagtattttgttactacttcataactgtaattttgctacagttatgaattgtaacataagtatgtgatatgcagaatatctgatatgcgacccccaaaggacttatgactcacagtttagagctgctgctgtaggatactagaattgcaggtgcatgccatcccatctgactttttgagattcatgtgagttctgaggttttgaactcaggtcttcatccctggtgcagcaagcacttgacttactgactcatctctctagcccaaagaattgtctgtctgtctatctatctatctatctatctatctatctatctatctatctatctatctatctactgtatatgagtacactattgctgtcttcagacacaccagaagaaggcattgactcccatcacagatggttgtgaaccgacatgtggttgcttggacccaggtcctctggaagagcagtcagtgctcttaaccactgagccatctctccagccctgcttctttacatcttgacaggtggttttgctatctaatcttagattggtatttttctttgcttgtcttctggctcccattcttcatgactgtcagctggacaacacccttaggtttgctcttaggaagtaatgtgtcttcttgtttctctgttcttgttctctggtactttctagagttccctctttagttttcatcagaaatactgtgatgtatatggttttgtttctttgcatctcaatttcatttgaagtgcttgggtccctttgccaggattggaaaatgtcagttatttgctgtttcttattcttgcccattctggtttctttccccttcttggatcacttatatctgtaaatattttagatcttatatatataggttgccatgttagatcattatggttctttgtcgtttgtcattctgttttgaacagggatattttctttactaattcttaaaaaataatatcacacaaactggacatggtagaacatgcctttaatcatagcactccagaggcagagttaagaaaatatctgagtttaaagtcaccctgttcagccggggggtggtggtggtggcgcatgcctttaatcccagcacttgggaggcagaagcaggtggatttctgagttcgaggccaccctggtctacaaagtgagttccaggacagccagggctacacagagaaaccctgtcttgaaacaacaacaacaacaacaacaacaacaaaaaacaaaacaaaataaaacaaaaaaaatcctgatcttcataatgagttctaagctagtcagggctttatagtgaaattctgtcttaaaaaagaaaaaaagaaaaaaaaaaagagtctaatccatcaaacctatacctggactttcttgatttagttattgtacatgtcatttttatttttgttttaaaatctgtctctggtaattctctcatttgggtcttgagggcctgtcctgcatcattttgttctttcccctacacacataggttttctcattgtagtcttggctatcctgaaactcactctgtagacccagctggctttgaaattagagatcagcctgcctctgcctctgccccccaagtgctgaggttaaagatgtgcacttccacaggcccattggggcctattttaatgtcagtttcctccttgagttttgattgtttcttagagtgtccatttattttttttacgtggtgcaataattgaataggaaaagcattgctgatagctttgaggctctgagtgattattatagaatccaaaaacatcagcataattttttaagttgtaatgaagggtcaacagtcacggtagaaggaactgctaaaagaatcatgttaggttttccatctgttagagaaggaattgtgagaaatgagaagaaaatggctgtctttcggtggctgtggtagatggaggtggctgagaggacagcccttcccatcacaacagaaaggaaggtgggtgtggtggtgctcctcagtagtcctgcactcaggagcagagccaggaggctctgaaattagaggtcagcttaggctcatagcaagtcagagatcagcctcgaccacactatacaatgagagcgactgtctcaaaaacaaagcaaaaggaaaaatgaaagtggaaaaataactggtgttgtgtgttttgagtttagattacaactcagccccttaaggttgaaaagtgttttcagttatttttaagtcatatgcaggttacctctttttttttttttttttttggacacaaggtctcactctgtagccttgggtggtctggagcatcagactggcctcaaactcacagagatcttttttgcctttaccttctagttctgtgattaaagacgtgtatcacatgcctggcactatgttaacctttttgttgttgttgttaaagatttatttatttatttatttatttatttatttatttaatgtatatgagaacactgtagctgtcttcagacatatcagaaaatagcatcggatcccattatagatggttgtgagccaccacatggttgctgtgaattgaacccaggagctctagaaaagtggccagtgctcttaactgttgagccatctctccagcctctcactatgttagcttttgaaggaagtaaataatgatgcccacgggagaatttcagtccataccatattttgctacttttgttgtttctatttcttttgaaattattatttttaaacactttccttttttaaatatttattaatttattttatgtatatgagtacactgtagctgtcttcagacacaccagaagagggcattagatctcattacagatggttgtgagccaccatttggttgctgggatttgaactcaggacctctggaagagtagtcggtgttcttagccactgagccatctctccagccccttgaaattattttatcataataaacagcataattgggtgtgggtaaagaacagaagccactatgccttcgccataggcaccacacatctgaggaggttcctgcccagcagatagtaaaccctcaagcctagtcatccttgtctcgttctctgcagaaactgggtcctgccgagcctctctcaggtctttcacaaagatctaatagaatatgtgaaatagttgaaaaagtgaaaaaaatgctatacaggtgtattatttgtaaattatgtggctggtagagaattaaataatttataatttgctgaagcaaaataacttaaaaccaactcactacatatacatttaatttattcatataacttaattgagttaagtaaatgtgagataaattcttgtgtgaatttgagcataacagcatcagaagttaatattatattttcagctcaaaggcttacatattatctttgagaaaataaatttccttttgaaaagaaatcagatattacaaaagcaaaaaatttgttgtggatttaagcttttgctttctgtatagaatataataaaaactttaaacatgcgaataactggatattctatgacatttgatctacagcaaagttaaaattactctagtattcaaagaatatgatagctcataagtaaaaaatactgttttaaactaaattatgaaattatttctctgtctctaggtgaaacatggtttctctaatataactgggattgattattctccttctgcaattaagctttctgcaagtattttagagaaagaagggctatctaacattaacttgaaggtaactattaattatattaatattttaaaataagctatagtgtttaaatgttacaatgttcatttgcttacttttttgcatttataaattaatacaaactgaaacatctaaaagtaaatactaaaattttaatctagtctacggaaattttttctttcattttgtgtgacagagtcctactgtgtattccagaccagcctcaaacttgccttcttctgcctgtctagctggatgttaggcatgtaagactatgctttgttggaaagtattcttctttgtgtatgtatatatgtgtgtgttcatacaatatcttccatgtatgtttgcaagatcatacagtagctggctctggattaatcagattaaaaagttataaatgctagctgtccctgtggtactgttttctgcctgaggttccaccagaaggaaggctacagccacttaaactgtgaggatggcgggatttggttatgcttgtgtctcaaataaaatgacttctattttaaaaagtcaacttataaatgtataggatgttctgccgaacattgttatttaattcttcatccttgttagctttgccaattttgtatagcctaaagtcaccagagataaaagccttactgaagaattgtctagatcagattggcctgtgggcatatctttgggcattgtcttgattactaattgattcaggaaggctcagtctactgtgagacgtgtcatccctagtattcctgggcgctataaggaagctactagttaagcataagcctgtgagtaagtcagagtgtgagctagctttaggttcctcctttgccttcctgcctagattcctggactataacctggaagtgttagataaaatgagccctttcctctcagagttacttttgctcaaaaggaaactagaacacttaaaacacaaggagtcgaccacaattcttctcttttctttcaatcattttgcctcaccactctcaagcttacagacctcagatccatgtacctaccacaaagtagtatttttgatctaaaatgaaaattggcttacattactgttttgttcacagacctccattgggtcccctttgcattctgcacggaacctaacggctacagctagctttcggaagtctgtccttgtgctagagtcaaatatattctctggcatgtgttagacagacactctgccgctgtactccgtctttagcctgcctgcgctcctttctttctttccttgcacagggtttctctatgttgccccgactatcttagaacttgctttgtagactaggctggtcttgaactcagagatctgcttgcccctgtctccctctagtgcttgaattaaaggtgtgtataccactgcctggttcactagctctcattttttaaccctttccgtttattcagtatttcagtcgctggctgtattgtttttgagatgtgttaagcttgtctaaggttttatccttgctatctctgcctttctttccttaggtttctcagcaggccaagtttgttcccattattcacatctctgttgaaatagcacctccttagagaggccttcaaggctgcttttctccccacacccctttccttctccctccctaccccctctcccccctcccttcccctctctccctttctttctttttttctttttcttttcccccaaatttcttgcctgcaggtatgtctatgtaccatctgtatgcctggcccctgaggaggccagaagagggtgttctattttgtgggactagagttacagatggttgtgagctgggaatcaaacctgggtcctctggaaggacagccagttttaactagtgaaccatctctccagcccctttaggctgcttttgttgttgtttgtatttttgagacagcattgctctgtgtagccctggctgtcctgtaacttgctctgtaatttaggttggcctgaaactcagagatctgcctgcctctgcctttcaagtgctgggattaaaggcgtgtgctcaggctgattttatatatatatatatatatatatatatatatatatatatatatgatttatcttcctagtcactcacaatcttactagtgttttctttctttcttttcttttttaaccccacaagattagggtgcttccctttgtagcctcaactgacctaagaatctcactgccttcactttgtaaagacagactataggatgcatcatcttggctggctcatgattctttgttttgttttattctattgagacaggatcttctatagttcaggccagcttcccgcatgctatgtagctgagcttctggttcctgggcctctgctttcccaagtgctgtaattacaggcatgtaccaccatgctgttttttcctctttaaaattacactcatgtatttattgtaggtgtgaggtggatacgtgtgccacagtacacagtgaagggtttcttttagagtgtgagtatgtgttggatatatgtgcacagtagagggtctcctttacttgtgtgtgtgtgtgtgtgagtgtgtgtgtgtgtatgtgtgtgtgtgtgttggatacatgtgcacagtagagggtctcctttcagcatgtgggcttcaggattgaactcagtttgttgggtttggtggcaagtgcctttatttcctgagctcaggccctatttttattttatttaagatttatttattttgatgtgtattagtgctttgcctgagaaggccagaagatggctgcatagtccctatgtcttgagttacaggtgatagtaggtgatggtgctgagaaccaaacctgaaaccactgaagagcagccagtggcttatttccaggccccatttttgctttcttaatagcactgtatctgaaacacctttttttttgttgttgttgtttattcgagatagggtttctctgtgtagccctggatgtcctggaactcactctgtatagaccaccctggcctcgaactcagaaatcctcctgcctctgcctcccaagtgctgggattaaaggcttgcgccaccacgcccgctgaaacacttttaaagagctgtttcatggtataccattattaaatggttgtaatttattttttaaaatttaaattgctttatttttgtgtgtatacttgtgtgggcataaatgtgtttgtgaattgagatctgagatcagcttgctccaattgcttctctcctttaatcatatggaccccagggctaacacttaggctttcaggtttccctgctgagccattctgctggccctatctgaaatagtattgctatcttactacatacatctgtttattttgtgtggtgtgtggatgcacccctgcaagcttgtgcaggtcagaggacacttgagggagttagttctaactatcatgtcagtcttagaaattcactcagattgcctagcttggtgacaaaagctcttactcactgagtctgaaagtttgaaaaaaatgtctctatgtgagtgtgtacatgggagtgtgtgcatgtgggtgtgtatgagtgtgcatatgggtgcatgtgagtgggtgtgagtgtgcatgtgagtgcatgtgagtgtgtgcatgtgtgtgcatgtgggtgggtgtgagtgtgcatgtgggtgcatgtgggtgcatgtgagtgtgtgcatgtgaatgtgtgcatatgggtgcatgtgagtgtccatgttgttgcatgtgagtgtgtgtatgtgaatgtgtgcatatgggtgcatgtgagtgtgcatgtgggtgcatgtgggtgcatgtgagtgtgtgcatgtgaatgtgtgcatatgggtgcatgtgagtgtccatgttgttgcatgtgagtgtgtgtatgtgaatgtgtgcatatgggtgcatgtgagtgtgcatgtgggtgcatgtgaatgtgtgcatgtgaaggcagaagcattaaacttccaggagctttcattgtaggcagttgtaagcaacctgatatgattctttcataagagcagaacccaaactgtatctctgcagctgcttgaaatacttcctttatgagtttgtttttgttacctttttgttactatgactgaacaacatagactaggtaatttgtaaagcatagaagtttattaactccacagttctagtggctgaaaagtctaggattcttaaatgatgtgataaggggccttctttctgtgccatagcaaagcaagtaagccagagagttttcctttataacaaagccagcccctcattagcccattaatctgttcacgaagagagagacttgatgactcagtcaccttccagggatctcttcctaatcctgatagcatgtgactgtgtttaggtttccaatgtgtgtattctggatgattctcttcaacaatagcagcttatttgttgtttgtctctccctgtagaaagcacaaggttattctattccaacacagatttctttactctctcccttgctgctgtatcctatatttaataagtagaagtgtcatgaagcacctttggaataccagaatgtcgtacaggggcttagggtgaggatgttccttcccgctgaggaagctcttcatggagtctttgttttgattcaaatgtcatgaattctatactttgggtatggagagtgggaaattccctcttctaatcgaagtacttgtcgagggtagcgtgctggtgcacctgcaactgtagtagatctcggagagcctgggctgcatgtgttagaccccgtcaccaaaggaagcagctcagtaccaatacacagtgtccactttaggggaattgttttagatagttacttactaattaaaattatatgaatgataatcggctaattgcttgattttaaaagtattttagaattaaattcattggtaaatttgtgtattataaaatggaagcacatctcaatttcaaatattgtagttgtattaggttattaaaaccaggatactgatgaattttaaaagctaaagtgcaagacatttactgagttaagtaatcatagtttaaatagtcccttgatttcttaggcttcttggtttttgttctatccattagtagctttgtgagctgctaaatcaaaacaaaggaacttttgataattccttgtttactttaggcgctcaagtggtagtataagccataagtcttatttccaatgacttgggttccaaataaattttgtcattttgataaatatgttgaatattttcataagaaacaactttttataaactgggcttttgagccagtattcctggctttgatttgtttccaaatttgtagagatttgaaatgtccaggaaacactatcaacctctcttctaattttggctttaatgatctaggaaacaaagcacataaaacttcactataaagttcaaaatatgtttattatatgtaaagggccatcataatgggcccttttatctctaaacttttatatgctgtcactttaagttatgtaaaaattgtgttaattgttctcatatggacactcatttttaatataggtagaagactttttgaatccctctacaaagctttctggatttcatgtttgtgttgacaaagggacttacgatgccataagtcttaatcctgacaatgcaattgagaagaggaagcagtatgtgatgtctctctccagggtgttggaagtaaaaggcttttttctaataacctcatgtaattggaccaaggcagagttgctagatgcattcagtgaaggtaaccgttttgaatgtgtgcttccttaggttttatacttgtgctcggctcccctgtgggtacagtattttacatttctgcttgtgggaattgcctgcttttcttctgtgttaatgaccttggtaataactttgaactgtgtatacagagcacagaaaagtaaattggttgggatccagagacctttttaacatttttcccagaaatcctggcagttaagtactaaaatttacgagcttgtaaagatcaagctctttatttaagcgatgcaatcttttatttaagctgtatgatctgctgtccagagactcagagcacatgcactatgcttttgacttcagtgcaccaacttatttgtgaatctataatcatacaaatggaagtacatgaccaatgttttagttttatatgtagtttatatgatttgctttaggggtcatttaagtatttaggatttgtctttttgtttccagtatatatggagcaattatttataatattgcacagaaatgaaatggggaatgtatagcagttttacatactggttcttaaggaagtcccctttgtttttttatgtcaggcaggactttttctgtctcattagccaaaggtaattaagactctactactaatggggagtcttgtgagcactaagaatctatagctatacagagaacatttgaagttttctcagtttcttccttggacactttaagaagtatttttaccttctagtttattcatgtagcacacaggcattcctgggaaagtattttgaaattttttttggtattcgtctgccttttccttagagtctttcttcaggttagtactaattattttatagaggaatggaaagaatttttgggatgaagtattaagtaaatggttctagactaaatatttggctacattttgacccgtcacagctgatgagagattagctacctcaagagtttcctgcacactgttttctgtaaccatgttgcatcatattgaatgcacctatcttagattttgtcttccttttagtattaaaggactaggcagagagaatatatcctgtgtccccttgtgtacatgcagtgaccttggtaggttttataatggaaaacctgaagtgtttgttcctgaaaatacgagcttttggcttcattactgttacttttagaaaactagaattgtgtgagatttactgtcttttattttgtcgttcattttattaccctacatgctacatttgtttctcttagaactgttcggttctagcaataatccttccttctttgcaaagctcggcagttttaataaatgctcgagagttctgtgcagagcaagttcctgtcttggttcttaagtgcgggtgttctctcctcacccgggaccggtagacagaagcacattgctctgtttttggtaatgagggacaggctttaccctggaacactatgctttaagatgtgaatgtgtctgagaactgttaagtaaactctatattatattcagttttagaactaaatagaaaattataataatgaaaatattataataggaggtgttagagaaacaatcacatagnnnnnnnnnnnnnnnnnnnngagaaacaatcacatagcattaatgagttttaaggattgatttacttagaaaatggtgcttggacttagatgcaagacagcagcggagctctgctgcagagcctactgaaggcctccgctttagctgcttaggttggctgctgcagtcaatctaagctggtttagaatgaaattcacctcactaatctgtttcttttttaattgaaaaaaaaaatttcataccgtgtattttgatcacgcttcctcccctcccctaacttctcctaggttctctccattgctttatccacccaactttatcttcttttttctttaaaaacaaaaccaaaaagccgggcgtggccctgcacgcctttaatcccagcacttgggagacagaggcagaggcaggtggatttctgagtttgaggccagcctgatctacaaagtgagttccaggacagccagggctatacagagaaaccctgtcttgaaaaaccaaaccaaaccaaaccaaaaacaaaaaccccaaacaaacaaacaaacaaattaaaaaccaaaataaaacccagaagggggggaaaaaacaccaaaaaaattcaacaacaacaaaaccaacagcaaaatctctacaaaaatggaaatagaaataaaaacgcaaaagtgcctaaacagagcataaggagacaaaaagttgccgtgtgttggtggcacaggcttttgatcacagcactccagaggtagagcaggcagacttctgagtttgatgttatataaaaccaagacaaaacaaaaccaacaacaaaaactctaccaaaatactgtgactatgttttgtgttggcctactactcctgggtatgggttttgtccggaagtccagtgacagtccattgtcgagaactgagtttttctttgccagtgggtattaagtacaaatagcttgttgtgtagagcctgtgtctacatcagcctctcagtgctgagactgcgtggcttgaaccttttgagggcctgtgtgtgtgctgccgcagtatctgtgggttcatgtgccacactctgccagtctttttaagggtctttggttttttgatttttctatatttgaaaggaattgtgcagttttccttggtagtcctgttcatacaatgtaaatgtctttatgctatttgtttatttatttgttttatttattccagattcaagcctcatacataggaggcaaaggattctaccactgaaattctctgatgagttttgtgttttgttttgttttgtttttgagacagggtttccctgtgtagccctggctggaactcagagaactgcctgcttctgcctcccaagtgctggaaaggcatgcaccaccactgccctgcttccctcttatttttaatgaaaaaagaaaatcatgtcaggtggtggtggtggtggtgctgcctgcctttaatcccaacattctcaggcagaggcagagaggcagtgagagaggcagaggtgagagagagggggggggggcaggcagggagagggagagagaggcagaggcacagagaggcagaagcagtgggtctgtgagttcaaggctggcatggtctacataccattctctttctgatgtgattgagttcctacgtataaagccacataagaagcagtactagcatgtgacagtaactcagtgtgtcacagctacttcctaccaaggagatagtgaaatagactaagggagatggaaggagggaatggcaagcaggactacaggaaatgaggaaagacttccctgccagttgtgtttggtcctttttgtttcctgtttatttaaaaaaaaaattgggggtaagctggaaaataattgcaaaattaagtttagaaaagatgtgaaagaatattgttagtacagatatctctaacaaatattttaattttgttttataggatttgaactttttgaagagctgccaacacccaagttcagctttggaggtagatctggaaacactgtagcagctttggtttttcaaaaaagggggacttccttggacaaaatcagttagctttctagaagaaactgcaaagtcaacctgatacagaagaaggaagtgcaaatagtgcttagtaagtacccaggcttagtaagtgcaaatagtacttagtaagtacccaggctacacagactgaataggaataatgggttgatgggaagccacacgcatgggaatcagtacttagatatcaactaagaataatttaagattttcttttgtatttaaaatataaattttttattgtgatttatgacagttttctgtagctgttaatcagttgagaacttcaaagcagtaaatgaatttatagaaagaatctgtttttggtttttgtgctttgatacagttaaatatgtctatttatgaagacttgaacaaacagtttcaaggccagaatagtgaaacttttttcatgcgttaatagaacatgatgtatgataaacaatgccattttaggtttatagctgggagagctccgtgatgtctgtgatgtgtattaagcaaaatcagagaaatcgattaaatacacttatttatttatttatttagagataatgtctcactatgagccccattcggcctagagttcacagagcctctgcctcctcagtgctgagactaaagatatataaaataatatgtatatatacatatcatgtatatatacatattattatacaaaataatattgtattagtttatatataggagagctacagctgagatagaagacacttttgcaaggtaccagacggagccaagcttgggtctggctgactctagaacccttcttcttctaacagtctacctcccaggtgccagatctctgctttgtggtccctgtaagtcagggctacatatgcaattcatttgggcctaacttctaggagctctgtaaccctctgtcattggtggtcactaactggctagtccactctgtggactttgaaaacacctgagtcacttgaaatccattataatttcttatcaactattggttttgaaagactttcccttagcaggaactgaattttaagtaaggcatgacacattgtaattttagctctcaggaaggtgaagaaggaggtggagctgtggtgtggtgtggggcagagagctgggggcaattgccatataaacatgcagaccagagtcagatccatttacctatgtaaaatgctgtgcatagcaatatgcgtttagagtctcaatgctcatgaggcagagacagaaggattcctgaagcttgatggtcaggcagtctggttgtgagtcagttggctccaggttcactcagggatcctgcctcaaaaaataaagttgaaagcaattgagaaagatacctgaagacctctggcttctacacacacacacacacacacacacacacacacacacacatctatgcacagtgtgcacacatgtgagcacgcacacacagaagaaaagtgaaactgaattttgttattcatttttctgtggaaggaggctgtcagctttaagaactgtcaggcaaaggctctctgggagctgatctggagaatgtttatatattactttgaaaaggtaaactgtgtcttatataaatatctaatatttagtaaaactgtatttgggacagtattttagtattggaatcttaaatttttttttttgttttttgtttttttattatataacttttggggaaatggagaggtggtggctcagcaggcaagagcatttgctgcttttctaagaggacctgaaggtggttcacatcatctgtcactctagcttgtaggggtccagtaccctcttctgacctctttgacaccagacaggcacgtaagaaaaacacctgcatacataaagtaaagataaattcttaaaagttgtatgagttttgatgattttcagcttttttcaggtaaatacttttccagtagttagcctagtctggcattatacagttttctgttttgaggaatagaagaagacaaacttagatcaatgtgaccaataaggaccacttgtcatttgatctagagataattacatggactttgagcaaaaataatgaacttggaatagcttttaatatgcaaaaaatgagaaattattttaaaatatatataatgtaagcttttcagaaaattgtgctttatgggacacaggatcttcttagagtgtatgaacacatacaggcaagtgcataggtccacacaaggaggccacaggaagacttttagtgcctttctgttgtttcttgagacaggatctctctctttagtcctggctctcttgtaactcactatgtagacagagagattcaaacccagagatctgtctgcctctgcctccctgatcaggttctgggattcagacctgcggcaccacacctagcccaaatgaggtaagtaccttagagtgggtaagtttcaagtgtgactaagcaccaacccaacaaatcactttctgtatgagcctgcgtgtaactctcagcttgggatatgtctgttgaaattgattccaaccctcctatatgggacatgtttgttccttttgcaaaagtagaggcttttcctgaatccattgtggagctgttgataaggtttaaaacaacaacaaaaacaaaaaccttgtcatttcttctcagcactttaatctttctagaagccagaactttaaggactgaaatcagaacaaatagaaggtctgaaaatgctaacaagaaattagtattaccaaacagctaaaatcctggttactaagtatccctaagttaatgaaataaatactttaaggcttaatactgtaaactcttgaaatatgtgggcacatgaatgaagtgatgcagttacaaaaaaggaacagcaaatgatgtaatgatgactgtgctctgtagctgagaaactgggattgtaattttattttaatcaaaagtcgttttgaggaaacttgtttgaaatgcaaatgagaactgaggcttttcctggtgatgctgctgcagcacaacaggaggtgtctgtgggagcctgcagagcctggaattacagaacttcaccatcacacccaggtcaaacctatgcactttcatttgagagagagagagagagagagagagagagagagagagtgtgtgtgtgtgtgtgtgtgtattaatgtgtcagactttttctctgtctagtagcccacactgaaaataaggaaaatatgactaatcagtttgtctctaggagagagacctgagttttgactttgtggttttgcctctgtgaactagactttatctgctgcagaaactgcccagctttcagggcaagagaccaaatgtcttgtgttgcacagtagtaaccactccagctaatcttagggggtatggatggcctctgaaaggagccttgtcagtatattttactggaagaagactgctacaacctagaacttgattgtgggaaataaggaacatggtcaacttaaaaacataccggggggaaaaattagaaaatcctttagacaggaaacagagatgtttttacatgaagggagaattcaggaacatgtcttattaacagctaatagaagaaaattaatgctaatttattcttcatacacaccatgcaatttgttagaaagtaaaggaatagtttgacattctttggtcaattgatggattcctatgttagggccatagaaatgaaactcaacattaagcagacaaataccccagcccacaggctacataaatgctgaataaaaccagctgtacaatggaactctgaaaagcactgggtaccaagcctaatgaatgattgaatatgaccttagcacaatccctggagtgttgttgaaagatcattcatttccagcttacatgtcaagatgggctctagtaaccaggagagaaagagggctccagtgggtacttaccaaggttttaaaatctttataacacagtgagttagactaatcattaaaaaggcttctctagtagaatttcaagctataactgtatggacttgtagcttatgtccagggaagccagattaaaaagataggaataattcctaagacattaatgtatcagtattctgcttttgtgcagtaggatttcaaaaacagggatgtctaagctggtagaatgaacttttgtcatgctgatactgttgtgaagaccaagtaatccattgtatcttcaagtgtttgtaaattactgcctggtgcctcccctaccccccaatctacagtgttcattttttagaggaaattattttcttgttttcctgaagaaatgtgacatttcaaaaacaacttttaatttactatttgtgtgtctctgtagaaatatgccatttggggtagggcgtacccatgtaggttcagtcccctggcactggagttgcaggcagttgtgagcttggaaccaaatctccggaagagctgcaagtgctcgtccctgctgagccgctcttccagccccataactgtgttatgtgttacctgttaatatttttacatgttgttattactgtatcagtagatgacaaacatttcagtgactgacctgtatgttgtatggtgtctggaagctccttggtaaaagcaagactaatatcttcatttacccaaagctataagcattgacacatagtttagcaattatgtatcctggataatactaggatagcttagaaagaaatatgtaatactctagttgactagggctcttccctggtgcactgtggatgaagtagtttgttgtcagggacagtagcacagtagaagctgggctggttcctgctggttcccttcttgatattttggaaaggaaagactcatgaggaagaggctaaatgtagatgagtgtgggtgcttcaagatcggatttgtttcctaacccccttgctaatatgaaaatgtcaggcctttgttcccatctaattttagtatatcctgacttaaaaaaaatattaggatgatttccagccatggaacttgtagaggcgggacacggggaggggggtggggggagagtggaggaaagagcagtttatagtgcatatccgcctgccttctgtgacaacagctagcccttaatctgttcatttgctgagggaatcaatttagatgcactgaagcaagcgtttccttctgtgtcttctgtagaagcctcgctggagtttgagtgggggaaattatagaatggtatttaatggaccgtctcacctgagtcagagcgtcatgcacaggctttggtaggaatctggagtcgagggataactcacatcttgtgctgttaagtgatagtagtaatcgttattgttgagaagatcagcgtaaaacatagttttgatatgtttatctgcttgcagaccaaagcaggcttagagggaaagctcttgattctatggaggtcaaataattgataattattgggtcaaataattgataatatagtttgctcaggaaataaaataaagtcccacatagacttagagctgtgccagttattacggttattgtttattttagaagagatttaactagattaaactaaaagaccaaactccaagtatcttacctcactttgaagtaagctgtctttccaaagcttaggtcatttagtgaggctcccatgggatgctcctatggtaaagatgctacacaaacagaagagatcattttgatattcagtttgattaatggtttgcaacaaatgaaataggtttttttgaacttgaaatgtagttggcttttcttgtttcctttcattgaatagttgcagattgtttaggtggacttattggtggaattcttatctggcatgttgaagttccttcctacctatggatctcagattccataatactataaactgggtggcataaaacggcagacatttttttcttagagttctggaagctggaattccaaggccaaggtattggtaggatatcatgatcactcttgtttttttacatttatttatttagtatgtatgtgatgaagttagaaagagctcgtaagcttagttctttccttctaccatgtgggttcccaagattggattcagattatcaggcttggtagcaggcacctttgctcactgtccatcacattcctgtccccaagtatgttttattttgtagtcttgttctttagtttttagttggctgccatttgtgtgttcacatgacctctttgtgtgtgctggggaagggaaggcaaaagagaacacacagagactttcaggagcctctatgtgagggcaccgatcccgtgaccttcctaaccctgattatttcataaaggcctcatctactcatactattgtattggggcttagggcttcaagcaatattgtatgggaaaggaaccagcaaaaatacccgaaaattgagatttaatgaacaaagcctaaaacataggcttctaatatatatgaggatgtaacatactccatttgctaagtattagctgttgggtaatttgatggctctttaaggtatctgtatattaaaaaggcatatatgtacttgtaataaaatatttgaagtaaatgagtattttttaatctgaaaaaaacttgtgcttggtgactatttctgatatgtgtttcattattcagtttgtattcatttggtcataaagatgacttgactagtaaatcaagaaatcttttgttcagtctgtttctatcttacttgtaaaaagataagattaaatgaagataaggtcaaacgaacaattgtgatactccaaggaaccttcctctgattcttctgtgccccaaatactgccacagaagactcccagctgacccacttcgttgctctaaggctttgagatacttctcttgtgcaccgcagactgctggagtctaattggtgggcctgtgcttttgtgcttttgccttggcagcctgtcagtttgctgtgtaactgcttatcctgctgatgaaaaagggtttcttttttgtactgttttgcctttttgttttggtggtgctgtggcataaaccctagggccatgtgcatgtgagacaagcactgccactgagccctatctcagttcagaaagtgaactttgttaggagcactagcatatgacctaacagagtacttgttaagacttgctttactttctgtctgtggagctggttgataggtgcagaaaggatcaggtgtggacccttccccaacagggctgtggatatgtacagttacatggcaggtaccttagtgccaaataaatactttccttcaagaatcctcctccccattggagttaacaggtgaattgttcaagctaatctattcagttccattgaaaggcgtttgtattgtaggagtgattaacggagtgttttggggtaagggaaagaacatctggaacaggtgggcctttcaaaacctctgtaaaaatcacactgtagagtgccgtccttactctgtaaaaatcacactatagagtgctgtccttactctgtaaaaatcacgctgtagagtgccgtccttactctgtaaaaatcacgctgtagagtgccgtccttactctaacgtggacaggtgcggaagcacctttttaccttagtaaaggaatgaagaacagatgccacgacactggagtttcagatgatttactgtgtctcagcctgcatggatgaatacctttcagattgagagtgtaatcttttttttccacacatttttttattagatatcttcttcatttacatttcaaatgctatcccaaaagtcccctataccctcctgctgccctgctcccctacccacacactcccacttcttggccctggcgttcccctgtactggggcatataaagtttgcaagaccaatgggcctctctttccaatgatggccgactaggccatcttctgatacatatgcagctagagtcaagagctccgggggtggggattagttcatattgttgttccacctatagggttgcagaccccttcagctcttagatactttttctagctcctatattgggggccctgtgttctgtaatcttttaagtagtaataaatggtaagaaatgtagatgtggtggtgaaaatgttacaatgtattcgaattgaaaacacatgggtatgattattgtgcacttttcatcattagatctgagccaaggcctggtcccaagatatatcagacagggacacagatcatggagccgtgacccagtagccctgggtctagtgagaatagaattggacttagattttactggttagttaagaagtagtagactggcatgttatagctagtttctggtttgtatcatccgggtttgatttgtttgttttgagtcacatttcttttcctgctataagttaactgccatttatgttgtttgatgctgagtaatagtagtttatccaatttgttcttagtttatgctgtagttgacaatagagggtatggaagcgtagtgagccacttgtttatgctagtctagaaagcctgtcttcagccttctcattgatggttaagtgaataacttcagagtgcccagcatgactgttgaactgttagaccctagccctgacgcttttattccttgatcccaggaaatttcagacctttttagtcatccttccctcgcctcccctcccccgagagcctttctgactgcttagaattcactatggagattagactggcccaagctcaacagagagcctcctgcctctgccgtcctagctctgggattacagtccggtgcagtaaattgtagcttttgttgcttttgaaccgttattttatttatttcctgagcctcactgtagtcctggctgcatcattcttcatgtagtggaggtaattgctaccatgcccaaaagtatttgttccattttagagaagttttaataaagcctgagacctctttagaacaaactgatcaagatagtttaacaaagcaatgattaactaacctagcctttagcaagatttgagaattttttttgtttttgttttttgattttttttcgagccagggtttctttgtgtagccttggctgtcctggaacttactctgtagaccaggctggccttgaactcagaaatccacctgtctctgcctcccaagtgctggaattaaaggcgtgtgccaccgctgcccggcttgagaatttttattcttttgtccctcacttataaattaatactttaaaataggaagctaacttctcatttatatcaggtatcacccaactcgtgatactggggatggatcctaggacttgatgctcgctggtcaagcacctgcctctgaagctaagcccgtcccacagctatagctatagcttccctttatgcttcaggcatggttgtgcttatgtagctctctgcgggagaactcatataaaactggcaggaaagaaaagcaaagaaccaggcatgaactgaaataaaataccttacctcttggatacagcctattgacaagctgctgaagagagtgaagaggctcataagcctgaaagccaggccagtgctccagctcatcttggtagacccagagacaacatttcccccttgatattttaaatccaaagaattcaggatttggtttgtacatttaagctctgtgaaatcatgaactatatctggttcttctctaatgaaaggacaatgtcctttgtagggggaaataggaaggctcagtagtttttaacatatcagtaagggtgaattaaaaaaaagtttgctttgaggcttttcttttcttcttttctctctctctttccctctctctctctctctctctctctctctctctctctctctttctttctttctttctttctttctttcttgtgacactaacaactacttcagttgccatcatcacagatacaccagaggtgtgctcttgttaattatttcttacatcgtttacttctgtgtgtgtgactcttttgcttatatgtgtgtatgttgtactgcatgtgtgcttggtgcctgtagaggccagaagagggcatcttatcctctggaattggagttaatgggttaatgctgggtatggaacccaggtcctttgcaataacaataagtgctctaaactgctgagtaatctctccagcaccccagcctttgttttttgaagtttagtattagaatagtaaggttggtttagttcattttctagtaaccgaacacctttgttgcacttttttctttttatttactgtgaataagctttaatgcctgtttttcatccctgtgctttcttatagcaaataataataataataataataataataataataatagtcactaggaacgttaaaaaaaagttactaccaaattgtttgagttttcaactctcgctctgttctttttagcctttagcttgccttacccagaggtcttccatccaatgagttgcaagcgtgacatttgctgtgttttcagcacctgccaacttggagaccagggtttgtgctcaggacataggcttacaacccacattttgtggtacacaatgccgtcccagctggcatgctttcatacctcaatggtgctagacattcggttacagagcggcactgcttctcatgtgcagatttcctctccaagctgctttcaactcgtattctatatcaaaagagtgagcttggtatcattaaattcactgctgtggttatttttcaatggaaacatttggtttattttttaatcaaaaaatacattttttcttttaaaaataaaaatgcttctaaataggctaaaatagcctgtgttttatatatctagcgtgtatatgttagccctagatttgaaactcattttcatggtcgataaaagcacgaaaaagaaccaaaggattaatgtgttataacatatttaatagatagggcaattagttgtaatgcattgtaaatgtgggtaaaattgcagattttcttctgagtaagatctatatatgaaaattgccccatgatgggctcagaggtttggcctctaactttgaccacaaagtttacatactttccaaagaagtatattctatcaacttgctttcagaagccaatctctttaataacatttcaggtggatttggtgacgtccttctttccataatctattataagcaatcttaaaaggttttgcttgaaaaaaaaagtcttttcagatgtagaaagaacagtgtgaaatgtgagtgactggctcttaatacaacagtgtgacaaagaggcgcagtggcttttagaagctgaatgaaagggtgggtacacgagcatctgcagactctgttggcccaggataacaacacatctgacattcagttcactttgtttgtctaaatggattcctatggttgttctcttataatttcagtggagctctcttagacataggtatagataggtgtgaaactgaccatttacttgcacggactcaaacttcaaagcttagctctttgttgtttgagcatcacattgatctggatctaaaggcacagaaataaaacacccactaactgctttagacactccttcatgcatatcaaaagcaacctttaccctcctctccacacatgtgcttaggtgaacacttcattagcttgttgatacaagttagagttggctacacccttccttaataaaatacacccttattgtctcctgttgcttaagagctgtaagcttggaattggggagctgtaacagtgatgcccagtgaaggatacatgatgcatacaatacacacaagcagccttctatttgctaggcttccttttgggggaaagccaaaagaaccagcattgctttatccctgtgtctcatattggtcttagaggaagagactaagtaatccctgtattttatactttccggggtgttgcacgctctaaatcaggttagtatttattgaagataatggcagagttacgggtggtcgttttttagatctgtggatttatttctgaattggcctgtgaatttgcgtttaggtgtctggctgtactctacgtctggttctgatttggttgaccatttagacacgaataaagactagacagagcttcctcttcccagctgctgcttacctaatcttacatgcagttgactgggtttgtgtctgtcctgaagtaaacagaactttaatacagcaacctaatggacaggactttttataataaagagccatcacatttagcattaagaaaccaagatgtgatgacgtgtatggaagactggcaaaagccttaatgtgtgtgtgtctttttagtcttgaagattcagacttagacaactccgttggttacccagctccttaaggagggattttagtcctaggcaaggtcaagaaaggctaagaaccagaaaaacaggctgtttagggttggaactgaggtgttggcgcagaggagctcccgtgacccccatccgtggaatttcatgagactaacatggttctgaaagcaacaagagtaatggctgcgataattgtttccaggcttaggacccctggcatcttgatttttttaagttgacctgatgaactagtaattgcagggataaatggaatgtttgccagcaggagtcactctaggcctcccaataaaaaaagctaagtgcattaaattctattcttacagagcttggaggctaaggtggtagtgctgtgatcaggtggcttttgggaagtgaccgtaagtgtattatagtagcctctgctttgcccatgtgcctgccttcttttgacagaacatgtggttcttattcctttaaaaaaaaaaaaaacatagcccttaacatgtttcttaaaaggaagtaatgtattatggatattagcatctttgtagtctgtgtattagcacacttggccttcttagagtgatttgattatgttcgaatcatctctctgaggtgaacacacatccttccttctgatgagcatcttcatcttatggcagagtctctgaaatgagctgtagttagtgtgaaatatgttagcttatgcctttctgaaaagaataggtccagtgtggtcacaaactgaaatatttcagcaatagccatgaaatctaatagtttcccaagtgcacacaaactcaaaaagttaattgttcatttatgtttgatactaggattgcaacattggattaaaaccaattaaatgttcctcgaagcaacagaaaaagtttcctgatttatgaatagaaccattcaaacggtgcagacacaatccatgtaaagtaatgaggtgttttgtttttttggcaaaggggaacgcaaaacaggcatagagtcttaaaaaaaactcttaaaaatctttttggataaggttaataacacacatcagcaggaaggagtgatgggaaatctaggacttcatttcacaaggaacgttatcccctccccccccaggtgagctgcacaatgaaaatactctgcttattctatcagggttacattcctgcacttgagtcaacatcctaagttacagaactaaacatgccctgcctctgcttagcaaccgcaaatccttccttccccagttgcatgtattttggatgtggcatctgaagtacaaattcctcaaattcgattgcacccagagtcaggaacagtgctttattatcctaaagtgtgaccgcaccagagtccgtgccacctccctttgcggtcttgttcgccacagattcttttaaactgctaagccaaacccggaagctggccatctgaagcccacgaggcctgagtttcaatcctgacttgtgcggtgctacttccctgagccccggcatccaggcgtgagaggtgcgtggtgcgggttcactggacacccggccacannnnnnnnnnnnnnnnnnnnnnnnnnnnnnnnnnnnnnnnnnnnnnnnnnnnnnnnnnnnnnnnnnnnnnncggcacgccgggcgccccggccgagacgccgcccgcacagcgccaccgagttcacgcagccgcggtcgagctgcccggcggcagcagtgggcattggcggcctggccgaggtcggttaaagggacgagttgcaaacagttcaggaagtgacaagtcgatttcctcctccccgggagtcgctcggtacaaagcgctcggcgccggccggagagcgtgcgcacggcggacgcgggcgtgcagcccggacgacttggcgagcgcttgcagtgacggcccgcgtccggcgcgcacagtaagcgacccggccgggcaaccgcgccagggggctggtccggagtggggtcggtgcgagctccccggcggcggcggcggcgggggaagttgggctcgcgtgcgctgcgctcgctctttccttccttaatgctgctggctttctttctccctgtctccttgttatacggcggatccggtggtttctaccggcgccgactcttgctcgccctggtgcaggcgtgagacttgtcagcgcgctggcgggggacgagcaaacctagcgctgccgaaaagtctgcgctccgccgacccagcggacggccgcggagacggctgcgtcccgagcagcctcctcctttgaggctcaacttgagccctggcttgtggcagcagcgaaggcgctgagccccgaagttccgcatcgtttgcagacaactcttttgttcacggaagtttacacccgccacccctgggatgcgggcgcgcagggacgactccaaggctacacgactgacccgcgcggtgtcgatgggggtgagagggcgctctgcctagggagggggaagcaggcggcgtggccgaggccagggcttgaggagtggggggtcgcctgtgccggcgtggtttttgcacatggcgaagagggccgtccgtcacaggatactagcctagtcacatttttttttttttctttctgccaatccttggtttgctagccggtgggagtcaggttgccagctaggggtttcacttggtggaaccgggaccaaagagacttggaaacccagaatccgaagagggtgatttgagttgacccaagtgttttctcgaccccccctcccgcccccacatacacaagctcctcttctaccctcagactaggggaacagtgcttgcgggtgagtgggacaagggcctggaattgcgtgggcaggcttgttctggaccctcgcctttggacgccccctgatgctcctgaccgccgggttcgttaacacgtactgtacttagtaccatggcgaacaaagaaaagctctttgcagcatttggtgaatgggattctgcctcctataggccacactcttgagttttccatacggtaaaattgggactctggtgttgggaaagtggcccccgtcgtgggttgcattcaggtcctggccccatttgtgctgccgctgccgcctctgccgcctcggtacttgtctcgcaggagttggtacagatggagctaggctggtggtggttcaacaggaacaaatgtttgttgaattattggacggtggagaaagggactgttttctgttgactgcttcaagagttggaatgacattgtttgttggcccaggaagccaggcaaaatgtcttgggctccttcagcatattagcagacctccaaatgacatgctagcatatgtgttcccagcagtccccacgcctggaaggggggaagccctccttgctgaatcctggactcccgttttgaacgatatgacttgatttgaggctctggggaaagaatggagtctgcgcacccgtgcaactcacgatcttgactgggccaccaagttttggtttcattttaatttttccacttagcagggacttatctcagttacagttctgacagtgagttgaaggtctgtagattccccttccccctttgctgtgcgctagattagcagaaaacttgttccaggtgataggccccctttagtgaaagaagggttgagtattaaggttagtaactgtagttgtagactcagggggtgtgcggatccagtttctggaccctgtggtagtcaagaaatctaagaggcttggggaatgcctgcggttttcttccaagtgtccacatcgggaacaagatgctcttgagaccagttcagaatagctctggtcaaggacttgnnnnnnnnnnnnnnnnnnnncacacaccacaagagtgtgatgtgcgttcattttaacatcaaagcaagcattctggaaaggctggctgcagaccttggactctaaggttgttgaaggcaggataagttcactgttttggttgataatgattctaatcagcttctctccctttgtttccagtgtagtaggtatgttatggaaagagttttagatagatacttcaaggtcttcatagaggagtcactcaactgacattttacaggaagcccttcctgggtgctcacctgctcccccaccccctttccttctctctctcctaaccgtcccctctctcccaccctctcttcctctgtccctccctcctcacctttcttttgctccttgttagttggtaccccctagcatccccatcctgtagttccatagtagctggtttgttttaagtgagttccttgagctggtgcttgacccatgatgggagctcagccaaagctagctctcctcctcctccaggagagagctgtgtctaaatgctgtcagcagggggcactgtggagcaatctggtgcctgcagagctctttaaaatgcacacccttcccagccactcctcttcagctggcactgagggttgagggctgggtcctctgtcccagctgaagtgtcattcaggcatgagactttctagggttaaatcatgcacagtctggaaaacttgtttgtacccataagaggggaaaaaaaaaacccactgaagtaaacactcaggtcagcacaaccgccaccactgtgcacacctctctgatgtgtaataaaagaaacctgcaggcataatttgttatgtaatatgctgatagtacaagttttggttttagatgggaaccagatgtggacagaccctgtttaattgctcttgagatgaggggagggggtgttaatagattaagtagttctgcgaaccccaaaggtggtttgttttttgctttgacttaggggatagccccaatctcagggctctctctccaggttactgcctctctgtcgggactgctgcagctgtcctttttgtcagactcctcctctctcaaaagagccagtttgttgccaacgcgaagcacatggctgggtctagctgggctcagcgctgcttagctctgctgggctctgttcctcctcttctctctccgtccagctgctgccctgccctccactgtgtgagacagaatggcccagggacttgggtcctgccagaagtgctgagtgctctccttcataaacattgtcctggaggagtgtgttcacacttgttcagtgaataccttttcccaaaacttgtgcacttagtcttctctgattaatttctgtttgtttcctgcccaactttatgaagatttttttttctctatacactcgaatcacctttattattctccagggttggggactgcttagtaatagctgaccccattaacagcagcttcattgcttgctgggattgtgaactttggaaacaaacccagaggcttagatatgctgatgtgccctgagacttgcttagaaaatttttgttttagtacagtttacattaacatgattaatggccatgccactgaaaagtctatattcaaaagcagctcccgttccctaggttcttcatatggtgaagtaaggttccttgccaaacaacattgttttagggtaactgggttggcttaacgcagacctctagtgcgcgtggtttggcctgaaggcttggcctttgcacgtttggagttatggttttgatggtgtctgtcttaatcgtaaggaacccaggtcagagggaacctctgtgaaaatgctctgaggatctgagcagaaaccaatgctttttgaataaagtgggagagatttggctgcaggatgttttggaggggtgctgggaggctggagccaaggacaaggttgtcccctacccctaagtgaatggagacacttgagcttttctgaaaaagaaaaaaaaaaatagagatgtccttggtcgtcctccccccacctccccctccgtcgttgttaaatgccaattgattgagagggaaagcgctgctgggtgggtctgcgggcagcctcgggaaccaagaaaataaaaacactttcgaaggactcggcaagagtttgcatttcaaagggtctaccttgtagactttcacatcacgtcaggggttacagagaagtgtgacaggcacccccactcttttaaccggtctctctctcctgctgtgggggctggaggggaagctgccttttgcttgggggatgggaacagtgtggccagatcttgctaggacttcatagaaaggagagcaaacctcagagtcatccttgaatctctaggggggggggggggagtgatgttagatcctgtgtgctgnnnnnnnnnnnnnnnnnnnnnnnnnnnnnnnnnnnnnnnnnnnnnnnnnnnnnnnnnnnnnnnnnnnnnnnnnnnnnnnnnnnnnnnnnnnnnnnnnnnnnnnnnnnnnnnnnnnnnnnnnnnnnnnnnnnnnnnnnnnnnnnnnnnnnnnnnnnnnnnnnnnnnnnnnnnnnnnnnnnnnnnnnnnnnnnnnnnnnnnnnnnnnnnnnnnnnnnnnnnnnnnnnnnnnnnnnnnnnnnnnnnnnnnnnnnnnnnnnnnnnnnnnnnnnnnnnnnnnnnnnnnnnnnnnnnnnnnnnnnnnnnnnnnnnnnnnnnnnnnnnnnnnnnnnnnnnnnnnnnnnnnnnnnnnnnnnnnnnnnnnnnnnnnnnnnnnnnnnnnnnnnnnnnnnnnnnnnnnnnnnnnnnnnnnnnnnnnnnnnnnnnnnnnnnnnnnnnnnnnnnnnnnnnnnnnnnnnnnnnnnnnnnnnnnnnnnnnnnnnnnnnnnnnnnnnnnnnnnnnnnnnnnnnnnnnnnnnnnnnnnnnnnnnnnnnnnnnnnnnnnnnnnnnnnnnnnnnnnnnnnnnnnnnnnnnnnnnnnnnnnnnnnnnnnnnnnnnnnnnnnnnnnnnnnnnnnnnnnnnnnnnnnnnnnnnnnnnnnnnnnnnnnnnnnnnnnnnnnnnnnnnnnnnnnnnnnnnnnnnnnnnnnnnnnnnnnnnnnnnnnnnnnnnnnnnnnnnnnnnnnnnnnnnnnnnnnnnnnnnnnnnnnnnnnnnnnnnnnnnnnnnnnnnnnnnnnnnnnnnnnnnnnnnnnnnnnnnnnnnnnnnnnnnnnnnnnnnnnnnnnnnnnnnnnnnnnnnnnnnnnnnnnnnnnnnnnnnnnnnnnnnnnnnnnnnnnnnnnnnnnnnnnnnnnnnnnnnnnnnnnnnnnnnnnnnnnnnnnnnnnnnnnnnnnnnnnnnnnnnnnnnnnnnnnnnnnnnnnnnnnnnnnnnnnnnnnnnnnnnnnnnnnnnnnnnnnnnnnnnnnnnnnnnnnnnnnnnnnnnnnnnnnnnnnnnnnnnnnnnnnnnnnnnnnnnnnnnnnnnnnnnnnnnnnnnnnnnnnnnnnnnnnnnngaattacttactgtagaggtttttttttaaaaaaaaacaaaaaaacaaacctagttgcctgactatgcaacttccaagcatggctggggtctggggctgggggtggggtcgggactcaagcactggtatttctaatgctcctgagttgattctgttggacacttgagactgagggacagggcagaccctaccatactttggtctctttagcaggggattaggggccttctggtgcaggcgaggagcaaaagcctttggaattttccactgctgcctcctcctccgtctctgtgaagaagaatctgaaaggtactcacctctgggcgaggtgcccactgtggacggcatccaggtagttcctgtttctgttgtcaggaacccagtctttgctcagggttcttgagatctctgagttacctacctcagtgctggggagggaaggaggccgcccaggctgtgttttcagagtggttctctaaagcaagcttcccctggactccatggaggtttgtttaacacatgatggtttcaggggaggcaggatgcagctcagggccagggcacagctcagtaatctttctatggaaatgagggtcagacctggatttacctcatagctcaaagctattcatagggttacagtgtgtagagctggccagtggccttggggagagaccttctccgacctcccagttcagactaaaggaagagagttccaccactctggaaataaggtgactgctgagattgcctgtacccccctcctctcctgagccttcacccgctgatctctcctcctgggatctcatcccagcctcagaccatctgcttccacacaggtgcaggctgaccacatcactgccgctcagagctcttcaaccaatcagcgcatactcgcttgctcttggcgggtgacagagccattttctgcctctctgcaggcccatgcttacctcagctgagaggtgggtggatggctcagtgtgctcagccagtgttcctcactgagagatggggcgggatggaaaggcccgaagccagggcaagatatgattcatgaaaaaaggtgttggcctctaagcccctagatctctgtggcagtgagtgagattagtttggacccggtacagggcagagagagggcgaattctccacgataggttttcccacgtttatcctgcagacattgcctgggtcttgctgagtgtccagcttggagataggcaacttgcttcattagtttactcgttgctcagcgcactggccccatggtattgcttagaggaatctcttgccctcttgagaaggtctctaggatttaatctcagccctcctatcatgccgtaccttctccaccaattctaaggaaacagactttttgctataagcagtgtgcactcctgccaggaggggccttgaataatccgtgtggtaggtttcttctgtctgctccattcaccttgtcacatggaggccaccttccctcccaagctgaagcacaaagtactgtccctgccagacaaaaagcccagctggaggaggctttggctgctctggcgctcacactggccaagggcctggaatcagagggaggttctgcaggcttactgtcaacagtctttctgcatgtttagaggtgaatgctaatgtccggatgcgacttgccatcttctgggtggagggggaaggactgtctcttggtgtcagtgagtagggtgtatgtctgtgattctgtgtctttaaaaggtgtagagagaatgcagggtggtctctctggcatagttctacagactgggccctgggaattgtgtctccatgaagtccctctagcagccatgtgactttcccagttgtaagatcctgggtactatactgcttcctagctaggcctcatttgtctgctactgtctctgggcctcaggctccatagcttgcttgcacgcctccagtgtttcaagaggatccagtgaggatttgggtttttttgtttgtttgtttggtttggttttgtctgtaaagcccctgtcagaaggagggtggtgccacgtggagggatgtaaaataggagatggctggcaggcagaggttctgtcatgggcccaggacagtctccttgtcaaccagggagtgggaagaagcagggactgttcattaacacaggagcttagagctaagtgtcggggaaaccattcccatatcatttcaggcaaagacagcattcatctctgggatcagtacccagctcagagcacagtctcctgtgtactgactgtgtgccctcgagcaggtgtcttctgcctccctgacgtccttcctctggaatatgataacctccaccctgtgggttgggtatgcttagagtccagtggccattagtggcaaatgtgtcaccaggaggacagtcggaggattgctggtctcatctggtaaaggacacagtgcaaagcagggggggctttagctgagctcttccggacaagcttttacgctcaccttagttagggcttatggctttctcagggagatgagttgaaattatgaattataatttagtttttagtgtgtgttttaaagcaagagttaaaagtagtgaaatcttttaagctttctcttcaagaaactaaaatcttatgtttactaaaagtgagttcatccggctcatagaaaattaaatgcatgggtaggtgacaatgatgatgatgatgaggagtcgtctcaggatcttggctcctctcagctcctctcagcctgaccgctgtgagtggattctctaggaaccttgggtgtgcctatccgggcagagggcgaggggcccatttatcacttctcaggtttggtgtcagagtttgcagttggtatcactgatagtcacttcctctctgtggggcaccatccctgacactggtgacaggtcagcactctctcagtacaggttgtggttcagctggtgcccactccccagttcttctagaaccccgctaccacctaaaatatggctgcagtctcttcaaggagcaggacttaaactaagctatgagtggcctgccatgatacttgtgtggaagtcagatgacaacttgatccagtgacacagggcagagcctatgtgctcacagtgcttctcttgatgcaagttgcccattttgtgtgtgtgtgtgtgtgtgtgtgtgtatgtgtgtgtgtgttcatgtaggcacatgtgcatatgcatatggatgcagaggccagaggccaacctggggtcctcttcctcaggcaatgttcatagttctgattgctttgggggcacatccgagtgcatgcatgtgtgcctgtgtgtctgtggcctgccctggtgtacgtgtggaagtcagaggacaacttcgtggaattagttctcttcttctacctttacgtgtgttcttggcatggagccgaggctgggctgtatcgctgtccctggcctgcccattcccagtccttctgatctctgtgtctcaggagtattacatcactatcagccataactcgcttcctgtggggagggcagagcagcacagttttcctttcccttatatttttttccttttctttttctttttcccatttgttttgtgaaaaagttttccctgggctggcctcacactcattatatagctgaggctggctctgtggtcctcctgtctcagcttccaggaagagtaccaggattatagctgtctaccaccatacctatccaagtacatactgaaattttcttctgtacttctggcagttttgggagacatcccttgacagaggaagtcagacttatgacttctgggaggggttccagttctgtgctgtggcagcccctcccacttgggggctggccttagtcatctgtcttactgtgttccttcttccaacccgtcacagaccttgctcgtcattgtgatggtataagagctacactgagtctgtcagatctggtaaatacatgtgtgacacactcttaggccccaaagagctgagagctgagaacctcaaatcctagctccacagcacggaggcttgagttatggtcatcagtgcagttgttcatagggttcctacggagggccacacagtatgattgccgtagtggagatgtgtagacacaggaacacaagagtcacacaagactgctgaagttgtagggaggtcacttggagccagctaaggggtagaggccagttcaccccttggaagaaggggcatttgactagcatcttagggatgagcggggatgtggacagatgaaggcttcagaggaggaactagccaggcctggagaccagtcgtctgcacaaaagggacagcagcagtcacaggagaccatctctctggctctcagaatgttgggctccaaggtgacatctgtgtagatgggggggagaggaagctaagctggtcaaggccaggctggctgtggggtgcaaaggggtgtgaactcaaggccaggctggctgtggggtgccaaggggtgtgaactaggagtggcaagctgatgcttgcaggtgtgaaggctctttgtctgaggagtgttggcacagggcaggctaggagcagacagcttggaggccactgtgtgacctgggaaggatatggtccacaaaggcaagaggcaggtgagggtcaggcccaagcatcaggtgcttaggtcccacccgatgagtaagacctagtttacacgggagctgggcctgcccatgtgggtatctgggccactctggaatggaagccacaggcttctccagtaggctccagtagctgctatcttgttggtgatacaactgactgagggtcttgccttgaccttggagcaggcctgatctagtttattttagtcacagggagcattcagtggggcacctaggacttgcaggaacagcttacatcttccccgtgcctggactgtattggtgcatttcggcctgacatgaattacagagatctgactcactgtaaaaaacgctccaaccccaccagcaccgaggggaaaaagcctctcgtcgtgttgatgtgatcggaacgaagcttcgctgccccttgggctctgttaaagcgtgttcttccagggtggaggagctgctgacacagggcctgggaagcagcctgcccaggtcacctgactgcttgcggctggccctcctgagtgagcctcacggccttcagatgccagcccaaattccaggcccagttgattgtgtggcatgtgactgtggcccagaggaagagaaggaagaaaactaaggagtctatgaggaggaggcggctcagtgcccagtctggccctttggatgtctcttccaagccctgtagggtttgctcaccagctctgactcctgaggtgggattgggcagtgaacctcctgttcacctagttcccaggaaggctggcaaaggccttgacccagtcaaggaaagggagaagacagagtgggcctggatgagctcccgttggcccaagggtgggctgcagtactgcagcaaagaacgccatgccagaatagaaggtgagaccctgtgtggagcagtggtaagccacagctgaatgggtgtaacttgccttggggagatacctgtccattcttttagtttgtgtgcattttagacatactcttgtgtgttgtagagaagactgcaggaagtcacaattatgtgacatggtttgctgctacataagtgcatggccagtagtctgctctcttcccctgcagagcttcctggctcgctagcttcctgctgggctttgaaccaatatgacatgcctgacccaacccagtcctctccctgtatttggaagagaacagccaagcacagccactcctgtccagcttctgggggaattaaagttgggaagggacctatgatgttggtagctgttgggctttgagtacccctggagacagaggccgagtttttggtgttgagctggggttgaagagaggactgagccccgatgctgccgccagagaggatggatgcccgtgtctcagttcgcctttgtttagtttgtggggcaggccccttgctgctggtgatgccagggctggatcctagctggttatgtactgtgcttctggagaaggtggtagtcttagtggtacccatagtagatagactgaggagaggaaaaaggacaggtactctgtctgggtggggtctaaagttctgtcccaagtagagtaagaaacaagctttcactcagttcatgttgactcagttcaggcctcctcctgtggagagttgtacgactctggaaggcgttgcagagagcagtggccaaggacaggaaagcacttttccatttccttgtgggaaagtggtgctgtgctcaacagcctggattcacctggttcttcggtgtatcaaatgtcacatgatcctgcgcagtagagggtatcgaccacaggaggctggcttttcctgtggttactggtgatggcatggagctgagaacagtatgtagggtcactcaagacatgtcagactcttaagatgttattggctcttcctttttaaaagcttgcttttattttatgtgtatgagtgtctgcctcatgtataccacatgtgtgcctggtatctgtggaagctagaagagggcctcacaccccctggaactggagttacaggtagttgtgaactgccaggtaggtgttgggaactgaacaccccatcaccacacacacacacacacacacacacacacacacacacacaatcctctgcaagagcaacaaaactcctctaactactgggccatctctccagctccgactctgcctctgtgtgagctactccactgaagtcccagattagtaccgatgatacagttggtcaagcagcgatttggtaaggcgccaccatcaattggggtggctgagaacaagagaacctgaccgggaaccaggagccccggttgtgtttgccctagccctgcccttggatcgcatttgaccttgagcactggttgtacttctctggctggagtttccctctcagcagactgagaatccacagtagaagagttacagggcggcatgagtcagatcctccaggactttgctgctttcatttaatccacaaggacctttttggtccttgtctcgcatgattagagctcaacacttaaaggaggtcgagagggagaggggttgaatgtgctacggttttttctttttatccctctaaccaccttgagaggtgaatgctttgttctggggtatatgtgtgtgtgtgtgtgcatgcgagtgcgtgtttggggatccagcccagcagagccttgcacatgcgccagcctgtgctctgttattgagccatatccccagtgttattgacacctttaagaaagtaaagggtttaaggttcagcaagatgtccaggctcatccagctggtagtgtagtcctgaggcttgaactctcaaccctatactctggtcagatgacaaaaatctggcctgctgcttgcttttacaaataaagttatgtaggaagacagccacaccgacttttaaaattttgttttttattattttcggttatgtgtaggtatgtgtgtctgcaggtgggtatgctcatggggtgcagctgccctcagaggccagaggatcccttggaacaggagtcaaggcagatgtgagccatctgatgaggctgttgggcatcaaactcagggatcctgggaaagcagcaagtgctcttaaccacagagccattgctctaaggccagccacacccatttctatagctgccttcaagttgctctgcagtttatagaccagatggactgtgaagcctaaactacttactgcctggccttatacagaaagtcctggcccttgctttgtatgatgccacgtactccaggttgtgctgctcagggtggcggtcacagggcccatgaaactaaatgggatgtgaaatccagttcttcagaaacaccagccaccagtccagcggggccactgtcattgcacacatggcacgcaaccccgtcctccctgcagactgttccagcagatagaagggttccagtcttgtttcccagtgtgtggggaaatctaaatttcagagaaccagaagtgcagcgaggtcagtctggtaggaggatggacaccagtgctccttggcctaaagacacagagttggaaatgagctcatttcctctgaggggtagggaaatatctgtccaggcagatgtggtgcactaaccaccctctgacctctaccctgtaagcagtccatagccctgctattcttcagactgtaaccccagcccctcctctcagcccagagctccccaggccctttggcctctttagctgagctgtgtcaggaaccctgtgtgtttgcatgctgggctcttcagaaatctgcagccatttcttctcctgtattcatagtgtgctctctgctgctccatctggacctgccaggacctaccagtgtttctactgaactgggatgggagggttctctgatctgatgccttggctgggtttgctataggcaaagactccttcattcactcagggctttgggtcctgtgctagcagatgtcatagagcctctaaaaatgtgtcagtggcaagcacccgagcattccagtgagtaggggggagtaagtggtagttctgttcttgcttggcccagatatgctcacatggtaatctctgcggaggctgatcagggcagaggcatttttaggtataaagatggtttccagttcactagagccagctattcaggcacgagtaccagaaccttctccatcatcccagtacctgctggtgagcggagtgtagagaaaagctgtgtagctgtttgcaacagggctggtcctggtctgagataagctgttgttaagtatacagcctatgtgaatgtccactccttgtgtagatggtccccactttatatcagaaggaaacataaagcagggaggtctctggaccttgggttggagagaaaaaaggagaagggcagatgattctgtagtactttcgtgaaagttgtgcctagtagcagggaggccgacgggtgttgggaggatgtgtatggaaaagcttttccttcgtgcttccaaagggaaaaagaggtagcctgggatagccttggaggagcagactcgaccacaggccctcctgtcatccccctgtaccttcggcagtgtgcccgtctccagctggccacttctactccactggtcctccagtggacagtgagaacatggaaaactatgctgtctcaacaccaggaaagggggtgagtcttacatgcctgcagaacaacctgggttcagctatgcgggggttacctgctcttcccttgcagagctggctttggttgagtgtccatgtgtacatcactagattgtgttgtggtcagagctgctccccagggacagaccaagcttgagcctcaggccttaggctggaacctgtttttgtcaccccgttttgtccccagtcatgtaccagtctgctatttgaaagaactctttggctattctgggtggttttgccaaccacattttctatcatgacctttgggcagagatgtaggttggtctctgtggggtgacattttagaaagtgaactccatacaaatttccctttgactgtgttgttatggtacaagaagttttcatatgtcctgggctattttgaaacaaaggaacccccgcccccccttcccgtttctatatcttgtacagaaggcatcaaagtagaaccctctgatctctgcaatgcaggaacaagggggcagctgctcaggacgacccaaaaaagccaccagcctagaggggcttctccatctgcccagcttaaatgatcacatgggacttgtctctttccccaaatcccccttaggggagaggccagaggaagatgtccaactgatgtggtgcagatcttagatgcctctggtccacactatgtaagcccactcttagaaggcatggcacagcctagaaaagactgaccatctcttcagtctgtggttggagaggctggcctcccctgggattgggaatctagtgggtcaactttaatgtgcaaagactttcacagtcagtgtaaagccttcaggtaactcagagtaagccggggagtcatgcagaggggtccatatgcctgtggatttccaagtttagagttagtccatatggctcttcgtaccagtatgaaaacttacaagtgtccaggtgtctttagggatccaaatagttaacattattaagaccacagtttgcagccggtcgtggtggcacacgcctttaatcccagcactcaggaggcagaggcaggcgaatttctgagttcgaggccagcctggtctacagagtgagttccaggacagccagggctacagagaaaccctgtctcgaaaaaccaaaacaaacaaaccacattttgcacagtggtgctctgggggctagatgtccttacaattcatttggcccaatggtgatttaccaatgcttggacttctggctgccccaactcccctgctttaaaaaaagaaaataattatttggttttgggttcaggtgtnnnnnnnnnnnnnnnnnnnnnnnnnnnnnnnnnnnnnnnnnnnnnnnnnnnnnnnnnnnnnnnnnnnnnnnnnnnnnnnnnnnnnnnnnnnnnnnnnnnnnnnnnnnnnnnnnnnnnnnnnnnnnnnnnnnnnnnnnnnnnnnnnnnnnnnnnnnnnnnnnnnnnnnnnnnnnnnnnnnnnnnnnnnnnnnnnnnnnnnnnnnnnnnnnnnnnnnnnnnnnnnttatgaagttgtttctctacacttaaatttttttttttttttttcgagaacgggctttctctgtatagccctggctgttctggaactcactttgtagaccaggctggcctcgaactcagaaatccgcctgcctctgcctcccgagtgctgggattaaaggcgtgggccaccacacccagctacacttaaaaattaaaaaaaaaattatttattatatgtatgggcattttacttttgtgtttgtgcatcacacacgtacaatgcctgtggaagccaaagagaacatctaattcccaggagctggagttcctgggaacttgtaagccgccatgtaggtgctgggaatcggacccaggtattgtggaagagtagccatcactcttaatcattgagcgctctaccctcttttgtccgacctttatatgggttctggggatcagactcaaacacctttacccactgacccatctcagcccctacccaccaccctgttcttagactggctggcatgtagcccaggcctgcctccaatttgttctgcagtcagagttggtcttgaattcttagtcttctgcttatacctaccagttgctacaattacaagcacgtgccaccatgccttgctaatattttaattgcttgacaagatttaaacatcataagatttcacagagtataatgtagcattttggtttctattaataagctggtttggggcctttccctcaaagctgcacagcatttatgtgtacctgaagcacttggcggttgataggcatatcatctgaacaacggtgttattccttccccgtgcagctatctcctcatctcttccctgtgcagccccagaaagcatttgagttttctggagtggtcaagacattcagaagacagattcaaagcttctcttaccaggttatttgctgcggggttagcagtggtaaatggcggtgggtagaaacaccctgcatattgttcttttcgttgttcaaggtctttggcaacacagtcctaactgctctacctgtaaggaaactcccaagtgagcaggagcttggagattgtatgctcccacaataactgttagtggaagtccatgcatgtctacatcccaagggccagtcttaacctaggacccatcagctctgtggtgtccctgggtcacttcatgagaccagcccacggattcttttgtcccttcccctcataaagtccctcaaggtgctttatcccatttaatcttctcagtctgagaagtgccttcacagttttcagacactgcacgactccttctaaaataaggatgctgtctttaacgtctcttgacagactgtctcgctgccgtgtataaagtagataatttctgctggtggtaaagaagagctgccgaggacaaactgaatgcgccttgcagattcttctagtttgcgtttttcggcagaggttcagtgaaactcatggaaagaaagagtgcaggtggcaattaagaatgaagcagtcctcgagttggtggcacacacatttaatcccagcaccgagcaggcagaggcaggcaggtctgagttcaaggccagcctgattcacagatggagttctaggacagccagggctacacagaaaaaaaaactttggtgtcttgcaaaaccaaaaaaaaaaaaaaaaaaaaaaaagggaggggcggggaaggctctttgggatgagagatggctcagtagttaagagtcctcttctagagtagctgggccatctgatgcccattgccaccccccttggcctctgtgtgcacttaacgcacagacatagatgtaagaaaatacacacatgtacaaggtttaaaaaaaagaatggtgtttttctctctgcgttctcccacaaatctgatagcagctagttttatgtcacccagctctgttatttcctcctctggccacagaccctctgcaaatttcttttttgtctcatttgggcctctcagtgtcatcctcggtttgcagctgaattaagagatgtgtggcatatgtcacattgcctgagagccctcttgtctccccgggttctcggcagaaatttgttgttctcatctgtgcccaccttccacaatcctaaatttcagggttggccccatcccttggtgtgttaggccaagtctctggagtcagggctcaaagacctcacaatgccagaggtccctgagtgcgttgtggagacagctgggaacagttttccttcgggtcctggtccagaggaagtgctgggtgggctgtgggatccctgcccctcttgggctcttgactttttacaagagatgcaacctttatgggtcctggttttctcctttgcaaatggccatctctgttgcttgggttctgggactgaatctacttaaatggtgaccgttggccacctccgagtgtttctgatacatcttggtcctccccaaggtcttgtttgtaatgagctttgaggtgatgctgctattgctgctgttgaagcagccgtcaaagtatgcgtttagcccaagcgtgtaggctaacctacgggttttcacccaccttgtgaggtagttctctcgtacgtgcatcaccctctgcccatccctatcccctcactttctttatccggaccttggatgccaaaggagatgactgtagtgtcttcgagtttgaagccttggtttctcagagcggcttattttacctattctctccaagaaagactgtggttgaatgactgacagaaccatcaagcattgactttgctctctgaaatgctcaagattcctcacaacagctgtcagtctgtgttggaactttattgtcccaagtggcctgaactcagggaccctgtgtaggggtgggattctttcacctgagcttctggaagggaaggacccctatagtggctgaagagtggagatctagaaccaagaaggtgtgtgctgagaccatgcagcgctgctgagacattccagtgctgctgaaggtggctgtggagacttagtgcttgctgagattgacagctaaaagccaaatggattaaggctgaaaccgtggctaccctgtgtacactgaaaaggatggactagctggtaggcagcagggagtcactttaccttcttgtcagttaaaaaaaaataatgtgtgtggggggtggcacacacatcccacagcctgcttgtggaagtttgagaacaactttacagggttggttcttcctccttatgtgggttctagcaattgaactccggtcaccattcttgtgtagggagtgcttttactcaccgagccagctcattcagttttgctttataaaggagtccctttcttcttttctccctccctccctccctcccttcctcccttcttccttccttctttgctgtcctgctccttaagagctggaagatactaggttagttgcagttggaacaactcccctttgcagtcccaaggccctgccctccacttcccgctcccagcagctgtgtcacattggcccttgtgctttcatagctataagaacacgtggggagctcgtggcttgagcacacatttatgactgtggtgtttgagacatcgtgatgttctcatatggggctctgtgtggccattctcttccccaggggagagcacagttgtcctattgtctgtggtgtagcgggtgagacatgtgggtcagcacgggattgctgggctggaagatgggagtagctgtttagcagcttttgagtccttatgtggctatggtatggaaggaggagttttggagacactctcaggagcctctgggtcacctgactttgttgagttgagtacaccacagccttgaagcttagctcctggaagtctacagaagaagcctgctggggtctggtgggcagactgcaaattagggcagaacaaagtaatgagagtgggtggaaccctggccacactgtgaagctgacacctctctgggcctcatgaggaatgccttgctggcctagagctaagagagagccctcaactctccgcttccctgcagcttgctgggtggagtgtcagacatgttacttggtggcttcctcttagagtactctgagcccaacactgactgttgaactcctatccatctatagatcccaacactcacacctgaccttctccaggaaatcccagccctttacctctctcctagggattattggctcgttcctctgtgccggacactcatcccgtggcatctattaagcctgtagttgtcctgtgtgaccattaggtcccccgcacagtcagtccagtaaaggttggagttgagacaggactctgatgccaggatgaaataatgaaggaggagacataggaaaggtgtgtgcaggatctgcctgtgcagttggagtcatctagaatgcagtagcacctgagtgcttgactcggtgggatagctctgccccttagccctctgtactcattagagtggagctcctacaaagcactctctctggcccaaaggctagcctatacacactgccttacctctgctctggctttagttggcattttctaaaagctgaacatacaggaaacggctttggagcaggtctctgtgctctaggattgcctatgactaggtgtgagcccaagacagttgagttgtagaaagttctgtgggggatgtgtgtgtctgtgtgtgtgtgtgggggggggggtgttgtttagctagtcagtaggcattctgatctgctcttctgctgtggtgcctgggcttcaagctctgtatgctggggaggtttaaggttttgagttagtgtcaataacactacttgataacatggaaacctccacaagcaagagatggctcagcactctttagcagcaaagctgagacttgacatggtgtggcgagtatggtgttcaccatttctaaaaacacaaaaccaaatcaggttgtgcccagtacctagcccaggggtccctccagctcccagtgttcctcctgctgtcgcttcccaagagctcagattcgcaggcaggcctcaccacacctggcctcgttccttctcagcagacatcttccaagtagccctgcctgccagctactgtggttgggactgacctaaggtaggtttgtgccctctagaagctctcaggtaactttgtttgaagcccagagtgatacagagcctgagggcctgtctcagggtagagggggcttcctagagttggaggaggaagcttgaaggaggttagtttggagtcagagaggggggtgaacaagtcccagccagacagtgagtagaggtctcaaggcatgaaacagtaaagagtatttaggggctgtaggagcttcctgtgttgtaagtgacagcagtgtgtgtgtatggcaccagctcagctctgaaaagcagtctggacccccagccacgcccatcttcttgttaacctggcagaactagcccatgcatgtgcaggccactctgtaagctggtaagcttctgtgttctttttatatgtgtgggcatgggtgtgcatgtgtgcatgtgtatggagtctaggagtaggcatagactacctctaatcaccttaatgctttttgggttgtttttagacagtctctcattgaacctagagttcacagactgactggccagtgagacccaggctccgtttttttctataccccttccctgaccccgcgctaaagtatacctagcacatactgcagtaccttaatttttacagttattagggttctaaattcaggtcctcatgcttgcatgccaagcactttactgactaaaccatctccatggcccttatagtttatttctattagcttctaaaaatgttctgtagttttgcatagatcaatacacagaagggcattccttggtgagtgtcctgccgcaggatccccatttgtcctccccgtggacagctgatgttagtttagttcttttatatcctttgagactcctgtccattagtacagtatccagtttctccccagtgagagctgctataccctttcttccatttccctccttttgacttggcactgtctggaaggtgttctgttgagacagccatactctcatagccctgcgcttattcacgctgctccctctgttagatggtcggggtacttcccagcctagcagcgccacatggcctgtgtactttgtcttgaaggatggatggataagcgctcaaggctcctgtgattcaccgggacatggggaagagtagcagtagtgtgggactaggacactggcgagttgttcctatgcatctcacggtggacctgctcctctccgcggcagttgggttccactgagttttagaggaagcagttttgttacttagctgcctttgtgatttctctgcagaggggcccaagcccctctgtgggctctcagagaatgaggcttctccagggggtgtggtcagtattgctcaaagacttctgtactgactctgacccttgggccacacccagttgcaggcatgaccaggccagtcaggctgaagcagcctggctctaccagccctgctcggcgggacctcaagtaggcagatgctccttctgggcacttgataggtttgtgccacatgaacatcacagctgtagtgcttgtttgccagtttgttaataagtcaagtgtacaaggacctgctcaggcagaggacatgtaagggcgtgggagggagccatccgggaaggctttgtaatctttatagcactgtggtgcaaggttttggacctcacagagtccaggtttgttacactatttgttattaagcatggactttctctttttaaaattattttacttgtgtgtgtgtgtgtgtgtgcgcatgtgtgtatgtgtgtgtagtgtgtgtggtatgtgtgtatgtatatgtgtgtgtggtgtgtgcacgtgtgtatgtgtatatgtggtgtgtgtgtggggtgtgtgtatatgtgtgtggtatttggtgtgtggtacgtgttggtatgtgtggtgtgtgtgtgtatgtatgtatatatgtgtgtgatgtctggtatgtgtgtgtggtgtggtgcgtatatgtgtgtgtgtggnnnnnnnnnnnnnnnnnnnnttattttttgagacgagatccctccttgagtcctggagctcactgatatgactaaggtgggcagtgagtcccgagaatccacctgattctgcctctccgagactgagattacaagtgcacaccactgtgtgcagatgctataaccagattttgggaatcaaactccagcccccaccttgattttgagaaagcttcttcctctgggacctggagcttgccatttaggctggactggctggccagtgagccctagggatctgttgttcctgcttcaccagagatgagattgcagacctgttacccccacagctttctgtgttctaagggctcgtctcaggtctgcttgctcttatggtaggcatttaccgctggagcaagtcctccaccccgcaggtgtgagctttgcctctcagtgatttcatttactcacccatcaatcatcaccgattcccacttcctggagcagagaatgtggctctggatggctgcgtcttctaccttaccacaatcccagcacacccaaaatactcgctcagtaagctggttgaatcaactgatgtacttgctgatcagatagacttcccatgacctccatgtaccattgactaagcatggattttgtgcccaagtgccaggttctcatctgtccttaactattaaatttcatctgttctcatctcattcgtggttaactgtgatatcattatttaaatgatttattacctgtatacagacattgtgagcctacttgagtttttattcactgtgggtatgcaggagcccttggagacctgagcaaggttatcagattccttgggcctggagttaaagattatgagccactatgtgggtcctaggaaccaaacttgggtcttctgcaagagtggtaaatgctcctaaccattgagccatctctccaacccctgttgttatttttaagtctgagagcgtgaaacacctccctagcctggctcgtgattcaggccggcagtgttggtggtttgtggagctgtcctcttccatatggctacatgtctgagctacttacttggtttgggaggtacgtggaggtggagtgttcagagcctgcagtgagccttgctgctgacgcagtgagtgggcttcctgagagcaaggacatctgcaccgaaacctggttccgatggtgccgctgagggatgacggcaacggcgtgataagtactgcagcagcctgcggccttggctgtttgtcaagcactgtcggatatattttggacaaatagaacaaatttctgtttcttctggggcataggttatttttgatgaggaagatggtgtattcatctttgggaactgggttaactctttcagggtcctttgaatctctagagatgtgcagagattggtttgaggcttgaaagaggctagatagcttcccaagatgccttgcttctagcctgggtgattggttggctaggctgtttccccagattccacccccaggtctatacactcatcctttacaggtgacttgctggagaaggaagtggagaagaatttgcaagtgagacacttgccctttcttctgactccacaccctgtcaaacataggaaggaaatcccagagagcagcctctcctccaaatttctcctgttaattccatggcctgttcagtagactaaacacctggatcgagcttagacttaagacttagtgaagcctttagtgggagtctcttctctatctaaaaatgctagagtccggtgatattttggtctatctgctaacagctggttgcccttgtacatggagggtcctcctgctgtgatgctgcagccaatgctggagtgggctttcgggagctgatcctgccctttggaacccccccccccatcctgaggaccagatagatggttctggcagtgtgacccaagaaggctggtactttagtggttcttgtctgtcatagacacacctgctgagcagctccgagcctctcagatgttgttttggcagctgatggtgttcttgaacttgaagttgcagtgatgtaggatagaggagaaaagacagaaagctcaagtgtgattggtcactctgattaatttctgtaccaactctgcaaaatagattgggtctgacaccacctgatcaggaaggggaagtcttgaagtgtgcactgaggtcaggatgtgctttatgtgtgggaagtccattgtggttcctacagagctcagaggtctgttcccagtattacctccagcgtatcacacacaaaataagtgtgatcctggcttggatgagaaggtcggctccattcacctcactgcctctgtgataaagtgctgtaagtgacagtggttaagaggctgctcagtgcctcagccttgggtctgacaagcacaggggaagtcatgcttttccttgtttggctgatcactgaagccatactgttaggaaagctgcggtgtaccctgggctgaggtaggttggcctatgagaaggaaagaacatttctacagaagggccctacacctcataagcatttcctgaactgaggagatggctgagtggggaaagtacttgcccatgtgaggagctgagtttacatctctaaaactacttaaagccagtgccatagtgtgcatcatcaaccccagggctcccaaggtgagatgggagaatccttagaagcttaggtccagccagcttggagtacacagtggaactgaacacatcccagtatagtgattgttctgggaccagtgtgggattcccatgtgcatgtaacaggtcaggaaaccgtggctcagagaggcatagagccatgtagcggctatgttcctatacttggatttctgagagagctagttgacccatttgtcaggtgagggtgactaggcttaaaggggagtgactgggcagataaggcggtgctggtcagtgagcggcattgctagggccagagtccacacttcctaagccccaccccacccttacagcccacatagccacttttctgaatgcctccatttttagttttgtctttaatttttttttagcccctcccctcccctcttttgtaaatcatggattgattaaatttggtgtagtagaaataggtctgcctgatgggcaggtaggtcatgattgtcttaggctaagtggcttaccattgcggtagcttatccctagggccctgccctgtcacagtcctgttgttcagcccatgctgctcttcatcctggaggagaaggtgctgtgtagctccatgctgtcagtaagtactagttccccggtggcctgggcccatttccttccttttgagatggcttcacacactccaggctgcagtaagttctctcacgtggcaagtggtgagaactggagtagtgcacataggagcccatccatctctttgttgtttctcattgataaacaagtgcttgacaggccacgagtgctgctggcctcagtatcaagacacagcatgggctctcttgtacccatgtgcagatctgttctgctctccatcacaggacatctgtgtcttggaataatgtcattcccttccctctcgaaatgtttgcataagaagaacagaaaatccctgtgacagtgagccagtgattggaatgccctagaaaacgtaatttactattgtgttttgtttcctcccctctattaagagggggagggggaagcaaaggccaggcccctttttagctgtgcactgtaacttccaggccttcctcaaatatgaaactccaatggactttgattacctggaattctggcccaggaagcatgtattcatcctatgactgaagagaacagcttttatgacatgtctcgttctgaagcaggcatagggtttggtccttcttcgtttacagatgtcagggtgctttgcacttgcaggaaggaaattcccctcatcccttgagcgcccagcgtcagcagtgagcacagtgacaggattttctatttttagccagttagcgaggacttcgtaagtgtctgctctctgacatgtgctaagggttttggtggatctagtggtaattccgtactcccaccaaataggacattatttcctaaccttacacctgagatcactagaacacagtttttatgcattgccttgtgtattagcaacatagtacaagctgtccagggccagctacatagttcaccttggactgatcttgtaagtacagctgtgagactttccagctttctgaggttgatcctcatccttgattagcagatagacattggtgaggctcctgctgtgtggcccaggactgagtttgaggaggccacacctaagttgcacacattacacgtgaactttgagagaagggtagagtgtgctgtggtaggcatgcaatggaagacacaggcccaggggacagtgggaaggtggatgaacgcagatctggctggagtactgtagctccctccatgcctgggaggggcttctgtatgcgcttagccgagctgcacagataaagatgaaaagtgatggctttgtatccttttttcaccttcaagacagccctcatctgttcattcctgctgcctgtagtgtggcctgtactgctgtgctaacctatattccagagggctggtgcttgccctagattgcttaagaagagctgccttcgagaggaatatgcaccatttccgagttaaagcagtgcgtgtgtgtgtttgtgcatgtaaacatgtgtgcatgtgcacacaggtaggtataggtgtgtatgtggttgtgcgcatgcctgtgtgcgtgcgtgcatgcattcatgcatgtgtattctaagacagggtccctctaattagccagaacttgccaagcaggctaggctagccagtgtgcctgaggggatcctcttgcctctgcttccctagtgctgggattatgtgcaaagtttagggcttttcttttcttttcttcctttctttgattctttctttttcaagtaagtcctagaaatttaactcaattcttcatgtttgcaaggcaagcactttactgactgggccatttccacagagtctagtagatatgacagcctttggagttcaagcagctataaattgaagctttgtgtttagtagatctaagttgaggcttgtcaaataggtaagcttcaggtttagtgagagaccctgtctcaaaaaataattgtgcacataccacacacacacacacacacaccacagatacacacacacacacacacacacacacacaccccacagatacacgcaggtagcttttcgtgaatacagattccactgtggggttttcttaaatcagcattggtactgagcatattcttaatgctaaattctgactagagaggcttcctaatcaatcttccatgagtactgcggagcctgggctaagttgaagtgtgtacagtggtggggatgcacagtctcagggcctccctcaggcggaaattgcagtagctttcttggtctggaaggtagcactctggatgaagtccctaagcagcttttcatgcaagggtaccccgctggtgggtgcaactcccttctctgggcagccaaaccaggagcaggcctgcaggacccagctgcctcagcgatgctcactcttctgacttgttgtagaatctgataacagattctatagactgtgtgatcacggagacaggcactccccaggtgttcataaatgtgttcctggatcctgactccagatgacttgtcacgaaagtttcagtgtgcataagaccttcacaaagatcgtatggccttgccagctcctgcttcctttgcttaatgaggggaagtggaatgctaagacactgtcaggaaaatcagtgtctgtggccaagtccacgcttaggttccggtcagggttccatttttaagacactgagatgctgctgcctgtacaaccacacagactgaatagagatgttaaaaggaggaagaggttcagttgtcctggcaatttctagtgtggtcagtttcttttaaaggattaacctttcaaagtgtatttcaaagtgagggaaggtgatgatggacaccttccctcagtgaactcttgcagtcttaagattcatggggaattgtgtagtttgcagagcttccgtgtgttaatccatttagcatgcactcctgccacagatgctccatatgtgctcagcatcattctctgggagccaagtgcctgacctacaggtgctatcgcatggctgctttcaagagtgtaagcccacgaacctcactgaagtatataggagaaaagcgagacagtttccagttaggaaggacttgtgtgaaagcaaagctattcctgtccctgtggtatcagagagaggcccaggctaggtgtggtagtccacagctatagtcccagaactcaagggactgagataggaggattgacacttgaggccagcctgggctacaaaatgagtttcaggccagcctggactataggataagaccctgtaccaaacagaggggcagagaagaaagcatgagtgtgctagggagggaaacagccaggagtaggcctagacttgggtgttggtcttaccctgctggcgctgtggcactggcaggttcttctggctttgaagtgtgggtagtttagcttgttagactgaagcccaacatcagaaacaggaaacagacatggaatagtggaggtaggaatacttccgtcttccctagcgtatcttgtgttgtttttctgacacatcttccaaacgcctgacaactgctagtcttcaattctatacttttatcatttcaagagtttgttacaaatggtatcatatagcaatttaaccctaggggagtcacttttttaagcccagaataattctctgggagctcgtggcgtctgagactagttcctccttttctgctgagtggtcttccctagaatggatgagccactgtttaaccaatcaccactgacggacatttggatgggttcctgatttgactgttgtgaataaggtatttgtggcaggttttgaggtgaccatgtttaattttccaggacaaacgctgaggaatgtgatcgattgctaggctgtgtggtagttgcctgagtgggtttctgaggggcacgcgtgggatggacaggtgggcgcctgtgggaagttacaagcgtgggagctgatccaccagggatccgagcccagcttttggactcagtgctggtgagcttcttcatgtgtctgtgaaatggggaaacatgagcctactttacggctaatgtgtgtagagcagcttttactagcatagtaggtaattgcatgagtttgttttattttggagtgatgttagtttcagaccaggtatgatatatttgaagctggtctggagctcctagtccttctgcccccacctctcaaattctgggattataggcatgagctataatgcctgacttgttagttcattttctgctgctatgataaaataactgaagctgggtaactttataaagaatagactttattaagagggaaggtttcatggcatggctgaagaattgtctcagctctgaaaggttggaggcaaatgataaatgataccacattatgtggaaagggagagaacgtaaagtgagacaggcgtggccaggtgtggccaggcacatgcttttataactttttttttttttaattaactcagtcccatgatacctgctaaagcaccatgcccctgccctatgcccccttaacatggctacactgggaattggtgactccttagagacacaccaaggtagtgctcagtagatagaagctgttctaagtgaggttacagagaaagccagctgggtcaagcggcagcctcaaagacagaagacagcttcaaagacagctaggtttcagtcttgtcacccaccctcctggaatcacctgtcccttattctctggaaagaggtcttcttacactggtctaggtcgctggacagggaccagcattccctgatggggttctttgagcctgtgttacttactggtcgaaagaatcctcggcaacttgagattgtgccaagctctgctggtctggattagcctctccaggtctatatatacccagactcgaagaagctgctgcgatttagcctaattccataagtgtgtgctgagctcaacttgttcaagggattgtgctgaggcatgtaaagggcagagactcttccagctgatcccagaagccagctccagccacagctcctgggagccaccatgttgcagaataaagtctgcattcagcgtggctctcagagctcagggtctttccagctctctgtcctgcagcatggctgccagagtgcataccattccccatatcgtgttctgactgcttcattacaaccgtttttaaaggccacacagccttcagccatacaactctactgtagtttatttagccagtcccctgtgagtgggcagccagggtgttcctgccctgggctccgtgcaggggaggctttaatacccccctcccccccacacacacactgcccttccccctgctctcagcttgtatatagtgctgccacttttcagagctgtgagggcaggagtgaggccacattcctttcttctccagacctttggccatttactgaccactcgggtacacaggtgcttatagtactccaccccaagtgctgcctctgccagctcccctttgtaggggctaaagtggggttggagctggtaagagtacggatgcccatttttcagctttgtgcagagctgtggctggaagggctgtcatgtttccatggcaacagatctccatagtcttgcttttactggcctcccagtttcagcagagggatggaccctgatacagccaggcccctgctggtggaatttaagtcagctgcaaaggatgactggatgtccacccctggaaagagggttgggactcctccatgaaactggcggtagtagctgctgtcagtgatttctcagatgaaccggacacagaggaaaacgcttgacctctgcttccctaggatacaataaccttaagggcagctagagttatttcttatttatcaagagggaaggaaactgggccccacagagaaatcaatatatttcaagagggaagattccaacccaaatatgctggtcttaggctccgagtttatgaccaccaaggctagcagtcacctccgagaaggaaatgctgagtttacttctcaggccttgtgccaatggctgcctgccctagagctgaattgaggttcacacccagaaggtgatggctgccatcaggcctcccctgctgaggcagcacaaagggcccttttgaagggcgaatccaggggcacccctcctggcctgttcctgatccaagcctgcagggggccagtgggcacttctggccctgctgttgagccagaactaggcggaatggtttgacattctttccttaaacacatcacacttggttgggacacacagtttgtagactgatgtggtactgaagcatgaagcaggtctcctagcgccacgggggactcttgacccaccacccccccccccccccgcctcctttcctgaacagtcaagctttataaatgcattgactaccctcctccccacccctgattttgcactttggatgaaccttgttttcgaagaagttagaaggttggtttcctgtgctcaccagccggcctgtaatagcagagtcaggagcaccactgtaaagtccagtggaagtaaacaggagaacatggctgacaagctggatgggaagtgaatgccaggtgccatctactttcacacagcagcttctaaaacattagtgctgaacagtccgtttttaatcacagattagaagccgcttttctttttctttattgctatgattaccgttattttttagattttgatggtgatcttccagtccttctgtccatgtgactttcctttgaaggtcaaatcgcaggctgatagggatggggtattaagatcagggaagtcaccttgtaaggagtggcttttcagacctgtgcagtgtcttcctttgcttggtgggacgtcatgaacaaggaggctgcctgatgatctttggcaagtgatagtgccgaggaggtctgggcagtcgctcataggtcacttggtgtggcccactctggggaaagggacaaaaccacaactgttaaggatgggacacgtgtctttaaatagaccttcctgatttgtttgtagcagttttcctaagaaggtagatgaggtaagccagtggccagctctgcatcccctgccccctttgatattggatgtggggatgaggaatattgatcctttgccagtctaaacttgtcctaatgtgagctcggtgtgcctgcaaaagccagcccagccagtgataagatgctggattgccaggaaccacatattgctagcacctcagaacctgtggtcttgaagatgtctcgtgggtccaaatttgttgctgtctctggcagagcattggctatattagatgtctaaggctagctggggtgtgtgtgtgtttgtgtgtgtgtgtttgtgtgtgtgtgtgagagagagagagagagagagagagagagagatctaagaaagtgattcttgcccttggtgacctcccagagtgcacctcctttagtaaggatatggttccatccctgtggagttctctgcattacacctgaggctttcctagtgctgagcccgttgcttgtctttttgtctttccaggccgttgactacttttggccattcccagaggccagtctgagcaactgatggggagctgtttctagtgacctcactctccggaatgcccaggtatcactgttaatcaagtcttccccgctgaagatggcctgtgcccagcctgggatgcagcccagttcctgaggtccttaccatggtgatgatcctaaggagaagcctcatcaaccagggagctgactctggagcacacaggaccttcatccctgaactggtgaggacctcaagcactgcatttctttctcctcctttgtggcattggggtgcagggagggcttgtggtgtggctgtggatgggcatctgggcctaacaacttggaagtgagcagagctctgtgagagggtcgaggctgggactgtgtgcaaaggagcagagtgtagatttgtactcagggagacaatagctggatccaggttagagccgatttgacggggtaggaaggtcacgccagaggcggctcagagtagcccagcactctgttcacctccacctcaagagagaggtggctggcgtccaggatgagggtgccagaggacgagccgagataaggctgtctcaaagggcagtgccgcatgagagccaccacctgagggtcgagagtggtagattagagagaaaggaagcgcaatttggcagtaaggtggcaagtccagctgccctctgactgcatgtctcgtcacctaccctcctcgaatcacccatttgtttgccctctaccaggtggtgatgggcttcacactcagccctttggtgggcttcctttccttgtctcatgctggccaataccacattgtgacggctgaagccccttccccagggagtttggtgaaatacttgggacctgcacgtgttctgtaggctttcacaagtgcgtgtcccgtggactggcatgggccagcagggttgaggaaccagtgtaacttggagctgagtaacttgccctgtttgtgtagagtagctcccagtctagaggtaggatctaccaagcatgcatacagtggccctttaagggccattaatgccaattcatagctgataccctgttgagatccaggtgtgctgaggaggatggcgggtctataggcatatcagaacctcacagaactggggtgctgggtgtggcctctgaggctgaaaagaagtggcttagcaaccactgggcccagtatgactttccaaacatatagttgagagctgagacctgcagcagggcagtgactgcctcagcacccacttcttcacctcattcccacccatcagccccactgcttggcctgtgtataggcctcctttcttaggctgatattggaacacttatctcttagctgttctctgccccagcactgtaggcacatgggagagagaagcagctaaggttcatctgactgaggacacctgggtcatcctagcaggagtggagccacttcagccattgcaccttccttccaattcacatataatgtgtatctgcaagatggtcacttcccactgttatccccaccctcacccaccagccaccctcatcttaatctgctggcctctctcatggagattcttgtggtaactgggcctctcctggctattaaaacctgattttcacccagcagccatgtggagttccaggcaagtctgccggacagaaccttccactggcttcctgcctccggtactgtaactttctgcttattccactcggccaataccgtcctccggcacagagatgccagccttaggccctttggatttcttccatagcctagaactcttcccttaacacgactctgtcctccttcctttcttgtgtggccactctccctcaaattcaggcctgcccacactcagacggtctgcccttttccacccaggatttccctctgtagctcataccactttctagcaggtcacctatgggtcttgggtattgagtgattcctcatgctagggcggacacttaatgaaagccaggcatttgcctttctctcctggaaccatgactattgcataatagttgttcagttagagtgcacacgttccattgccacagcttctgaccttgttgttctggtccctctgtttaatttgtagccgagggatcacacatatgcgtcatgcttgtcttgtctttgttgttagtagtaactggttttctggtgcaggatctgtagatagtgcgtgagtggtcttgggcagaggggctgcccagagtccccgggggctctgcttctgagggttgagctgtagtatttgcctccacagcgcctctgtgcttgtctagtatcaaggtaggactgggccggggctggccacagagctggtttccagtaccagggcccaaggtcatggaaggagcccttcctgagccctgccttgatgaacatggccttgtgccttccctaggggaggagccttgccttcctagaacagaagggcgggacttttcatccctccctcagggctcacagcctgcacttgcaggcaagttccaacctctgctgcccttccagggagcagccttcttgcctctgctctttgctgttggcccatgtaggcccagaaccatctgtctcctcgtcccctctgctccagatggcaggtcagtggtgagctaattcactctcttctctctctctctttctttggagagagcttttcttgtctgtgagtttgttgacatcttacatactgactgtttgttccattctgggcctggtgcaatgtaaggggaagtacagtgtggccacagaaagtgtggagagtgccatggagggtgcccgggcaagagcaagggtgtatccacctctgtcccttaaataggcaggaactgtgactcagagaactcaggatgggactgcatggactatccaggaccttttggcagtggcagagcctctgaagcttgcagctacctcagggaaaggagttgtgtgtgtgcctgaagaaagatccaaatagtgtcagtctagtgatgagctccctgagaccgagcccgaggtcagccagtcctcactgtgagcagcagggcaagttgctggggtccacgaagcacacaagctgccaccagttaacacagaaaagatcggaaacagtttcttctgttttctaattagaccaaaaagataacagaagtggaggttaagatttcaaaaaggaacaggattctagggaagctgggagctttggggtggtcgaagcggcctccggggtgtggtggtgtggcgttggctcctcctagtcacagagggaaggtctgagacaccctaggcagaacgttcccttcgaccatggagcacccccagctgctgccctgagtcctggtgaggaaagggaagacctgtggtggtctctgccctttcatggtcttcatgctctcattctctttttaagaactagtactgtatacctgcgatcgcagtatctgggaggtggaggcaggaggatcagaagttcaaggccagctttggctgtatagctagttagggaccagcctggacaacacgagaccctgtctcaaaacaaaacagcaaacctcaaattctggtgacaaaggtagactctccttgctctcaagggaggtgcaggagcaagaactgacaagtgcttagcttgttccctctgggcacaggagcccactcctctgggactgattggtatgggaataggctatcctcacagtcctggtgtggcttacgtactaggtagccatgaccatgtctggtcctctttccctggtctgcctggttgctttcctctgtcagagggcttttccttctcatgttctaacattagccaccaccactggaaagcagcccagacgtttgaccctggagcactgaactcccccagctcctgccattcgcctccatgcaggccaaaagcctgttgttgcttccagagtaaccacctccttcggccaggccaactttctctcccagcctactctaaatcctggagaccagagaagacgggctagtggctactctgggcagaggacagtatagagactgcatactgtcctcagaccaggcactgccgtctgcactgccacgttagagtgcccatcatgatgttggtagccacgttagagtgcccatcatgatgttggtagccacgttaggcctcgtgtcccactgtctaggtacagggaatctttagattctttgtgaggccaacttgacactttgacctcaacagctccaaatcccggggtctttggctgaccacagagtagctgaagtctggtgtctttcaccttgggtagatatatgttgtatagggacttttgtgcctgaggagacccttagccttgaagctggggctactttggcatctctgagtttcctgtctccattgcaatgttcccttctgcctccattcatcttttcaggcctgaattcttctcttctttctgctgctggggcttgctgagttagttctgtttgagaggcaggcatgatacaatgcttagtcttggtatgtagtatgagcatctcccttcacactgtggctctctgtgtcctgtgtcagcaaaggggaaagcggctcagttgttttaggcagtaacctttgaagaaagttgtgagaaccatgagccaggcctggcatttctgtgtgtgctagcttctcctctggagccttaattaggtctttatagaggtccaggccttcttcagtcagacagatgtccctgaagcctcaatttgatttccagctattgtctttcctaggaggacctgattccagaggcttctcttgtgacaggaaccgtctcactgagactgagccttggtgggttcagacacaaagagggagacgtgcaaaaagcaagcatgtcctcgcttccttccctgcagaccttagcgtgcagttgagctcactcttttgcagattccagaagtctcgggaggcctcacagccagagtccctttggcttggcacagtgatctgcttatcccctcttcccgctctgggaatagaggatttgaagagtaagaagcccgggctttaggaatggcatgtgccagtgggaattttattgtattattggtagattggaaacaggaaggctttgtgtcagcttggagccagaaactcctggatgccgttttgcccaaagtgaaatccttaggcaaacctgccaggggtcagcatgtgttgtgccttagacccggggagctgttgaggatgggatgttccggtactgcttcactgcagaggtagggcttagaaagcgagacagggctggatcctaacctgggatccagcatgaagccactccttctcctcctcctcctcnnnnnnnnnnnnnnnnnnnntgatgtaacgggttcaatccggtctacatctatctgaccccaagcccggtcccaactcctgctcttcctgggctggaattcccagggaaggacaggggtagttctctaagtaatcaggctccccaggcagacccaggctttaccagagggacaataatctgagaaacaagtggattcctagtctgggattgttcggggaggggatagctgccctgagatccagagggaatgggattgtgtttctctccaaaccctgtgttctctgtcagttaattgatcctgctcccaggggaagaggccgctcttcatagggaaaaagcctggcttgggtcttctgactcctacctcactctagccttctcttctgcccctcctcctcttcctcttcctctttctcctcctctcccttctcttcctcctctccctcctcctcctcctcctcttcctcctcctcctcctcctcctcctcctcctcctcttcttcctcctcctcctcctcttcttcttccttttttaatgtgtatagatattttactaggatgtatgtgtgtgtaccatgctcatgcctggtatccatgggggcccaaagagagtgtgatccttgggactagagttaaagatggttataagccagttaggagctagtgttgaaccctagtcctgtggaagagcagccagtgctttcagctgctgagctatctctaacctcggggttcttcagtagagtccatctctaaccagctcaaacaaaatgagtgttagtggaataagggtggaaaacccacaggctgtagaacggtatgtagaacatagccagaaagggcagggccagagtgagacaggtttagaaacaggtgctagggcccatgcaggcctcccttggccctctgctcctgtcagtggaatgagcagaccttgagctctcccctaacaaggcacaggcggctgtactctgcttcccgctgtgcacgtgaaatcccaagccctcgttggtgacacttgtgtgccagtagtgcacactcactatgccagccttccttcctgttctcctccactttttgtggtccctgtcttggtgtagctaactaggaaccacacaaatggatgttgtccttgagcctgggtacccctgggcaccaagtttcccttgacaggcaaggcaccctggcaggaggtcaaccccattctttctcagaacccttctctggaaagtaagcggcctctctgggttctgtaggtttctgcacttggttgtgtgggtggcacaatcctgatggcagactcccctgtgtttgtcacctgctctctgttgggtgactttggtgtggctttcagctgcacatcctgcagcactagccatgttagctgagatggaggcaggcacagcccctttgaactctttctagatatgtcagtcggtggctatagatagttatataccaaagggtgacctgacccggtggtgttgagtattgttttaagccaagaagagacctggaaagggttgtttatcatcagtaaccttgtctatcaacagcagcccaggtgttcctctggaaactgtctctgacctctacccaccttagcacacagtctgcacacccacccccaagttccatctctctgtaatgtaatgagttgtctgtgtgaccatgttctcgtggagatttgagcccctcttctcttctttgtcctcaagtctggaaaggaccgtcctgtccattaaacccctataagataaatgtactgctgctggccaagagcaaaggtactcttgccatattgggcactgggatggggtgaggaagccggtgccaggcgcctgctgtcttatctgagtgggccaggtgttgctagtcatccccaccctcctcctgggactttatgaactaacccaggctcccacccacttctcaccctaaaagccctgcctctttttgtcatgtggtcggcctggggttcctctcagaagctacaaccctgtgtaacaggctgagaacttcatttccattgtatgaccaatccctagcacagcctggatacagataactgtccgttcctgtatcctgagtatactgcaactgaatgtgaggtagccagtctctggaatgcttgaggaagaccttcctctcagggtcctgactagtatgtctgctcctcactcgccatctgagtaggccactcgacttggatgctagatgcacaagagccaccagaatattctgtgctcaacttactgtctagctgtgaatcctcagctacttttcatctgtgttcagatgagggaggtgtgggttgtgggaagacagaaagcagtggagtgggaagcccagtgaatgaacagtgcccaggaattgaacgccatagctctcaggctgagccctgacgagccagtgagtgtcttggcttcagagaggacgattgattgacagcttcactgtaaccataaacagctgtgaggcatcagccagcgttccctgggtagaagagatgctgttcctcctgtagcacctgaggagccagccaccagggagtgggtccacggctccatgctccataggagggccacctctccaagtatctttccagcacctaatgagagttggttctatcgttgcatcaaacctccccatgtccctcttgccaggagtcccaggcattatgtgtggctcagaagcccattagcctgctcagtgtgtaactctggggccttgaagcaaaggccaggctcagtcttctgcggcagatgttgcctcttaggctgctctcttccctttactcagctgctgctgcctaagggcagatcccctgtaattgtgactttagaaagaactcagtgcagagtcgcgtgacgggaagagtgaatagcttttctgcttgttttcagcacacgccaaagatgagtcaaggacctaccctcctttcctgtggaattatgggtgagtagctacacattatgggcatcttcttctagtccttccagccaggtgaaactccagaggagtcctggagaggctgcgttctgtgttcagtccccagcaggtctggggtagaccaacagggtgctgggcatgagagtggggggcacaggtgtgtggaaattggcaccatttccaaatccagcattgggttctgactggtggtaggtagttcatggtggcctttttttttttttttttttttttttttaactcagaatacctattgtggaataggaagtaaaaatcctttaaaatctgatgggtggttctcaatgttagctcctgttgttgatagtgtgtgtgtgtgtatgtgtgtaagatttgcatttttcacataatcaagtacaccatgaacataaaatatataaattgtgtttggttctgcatgcagtaattgctgtagtatataaatggctcaggtccagtatctgtatagtactgtgctgtgtgtctacgatatatggacgtgccatggcgatgtgattcttacagtcatggggtaaagcagctcttagggggttctctcagggtgcgttttggtcttttgtcatatttctcagggtagttccagaaggaagctagaaagtccagaggtcaaggacctttgtaaggttcttggtttattatacgacaaatgtcccagccaataagccctttggtctggtgtttctgtgtacgtgtgatgctgtttcttgtaaagagatggttgcgttggttgcgtgcattttgcattgccctgcagatggattctgtgatgtctaggttgagttggagaccagacctcagtgatggaagagctatagtggcctttcaccctcagtgccttgcagggccacatgagattgtcctcaccctccttctgtgtccagtggcttcttctttaatttcaaggcatttcccatagatgagactgagtgcagtgggggcctgtgaggttggacaatgccacccacatcatttgcaacttcagagccaggcaggtgcttgttcatgctgggggaaacagaggcccagtgactctgaatgatctcttagggaacagaatgggaaataaagaaggacagttgttttcttttcagtacatgctatagcgtggagaaaagctagatgtcttttttgatattgctacccaaaggacatcaaacagggaaatcacctgggtaacacccttcttggcctactcacacataaccattggtgattaatggcttttctcctccaccgccaccttcccgtggtggaaaaacctactgtacttctgcatcctggaacaggtccacaattgagctgctttcttttatgatgggaatctattatgaatgtccaacctttacctcaaacttagccccaacagagccagaccaggaaactgtcctgaagatgatgggcctccattttaaggcttttctgtgaggcttctctggccttccagtataataaagctgactctaatgggtctggtctgtgacaggtcttgtgagaactgaaccttttagcttttcagagcctcagtttcctcataggcagcatagcaccgtgggcttgtgaagaccacgatagaacgtttgtgacaagatcagcacaggagagcacagagcggaagaggggccacaatggcttcctttgggagtgggtgtgacagagttgtccatggggccagagtaaaggcctcgggaaggaggcgactgaacagcagcagctcagggtgtccaggcccatcctgctgcctgagaccacggagcccaacaggcaggagcaggagcttagaggaagtgtcaaactgtgtgtacaggctgactcttcaggaagccctatccccgtggctcccctttggctggatcctgcaggccagtgctaagagccctaccactcagacagaccagaaaactgtcctgaagatggtgggcctccattttaaggcttttctgtgaggcttctctggtcttccagtataataaagctgactctaatgggtctggagatgtgggagtgaaagtgcctagtgtaggaacaacagctccatgcccggcgtctgcctgctgctcagcttccttgactcaggagagctgtgccccatgtcacagcatgtcttaccaggactttcattcaccacacgtggtttcaggggcttgttctcatagacttgcaacgaatgtctagcatgtgctagacacttagtatagagcagaatgaaagggaccctgtcttacccacaaggaacattgtgtctagtggaggagaaagagccacggacagtaaattctgtgtgccaagattagggaggccagtagagccatggagcagcacactccatttccccattccttgatctttccccctggcaaagtctagctgctctaggtaggaggtccttccaccttctgtcccattccagcagcagttggagccggaggtctcagtagccagaggtcttcctacttccctgtgagttggagcagatagctcccatcagctctccagcccactgaccccgtgaatggagtagtttatgggctcgtcttgtgcggtcactgtggcttactgggagttgcaccctaggcagagagatttcatcttgggtgtgcctgcttttcaatagcagggaagagaacacccggaggggctggccagacttttcaagagagtttttggcccttccagggctggacaatgccgagcatagataaaatatcaatgatcataatcactaccccagccccagctcccgaagacaaaggctctgtgactcagggttttccctcctaaccccaggcccagggcccaggctgggaaccggtatggggagtttcctaggcactctgaagaagggcccagcacgtgcatcagggctcgctcgctccctaggagggcagccctgggatgctgctgtccttcctggcctaaactatccagtgcccacttcagagtccaacagagtagcttcagattttcttaacaatgcatgctttgctttacttttttaaagtacctcattcttgtgattgtgaactggataccagacccttccctatccttgtgccccacttctatttgggaacatgatacaaagtatttttatacttttctaaagtgagggagagaaaagatctgggttaggtgtagatggaagaagaaagacacagaacaaaacaaagccaacccaaccctgcccacctgctcggtacctgcctgaaggttccttcttagggtgccaggccagctcctcctagcagataacagggttccattctcacctccagatctttcccgcccacctctgtgctgaggcagaatttccagtgaggcatctactcatgacgagttgagtggcagctcccagcctgccatctgggctgagagcagcgcccttccttacatctacctacctctggtgtgttcaggaagtgtgggagggttgtcctcctgggtgtagtgaagcaggggctgcatgtgacatccagcctgagcctgggaccctctaagagatgcttgcttcatgcttgcttgtggttacatgtgctgctgccaccatcttcttcctcctcttcctcctcctcctcttcctctttctttctttctttttctttctttctgataaaacagggcaactggggtgaatacaggcccactcattacctttggctaattgcagccgttaaatgagccctatttcatcaggattgtagacaccacacattccgtctttctcaccactcaggccaggagattagaaatcacataaaatgtgagaaagtgagagcaacaccagttattcccaaaaggccactaggaagaatcgtgtaaatacacgccagtggacagggaacaaaacaattcatatgctttaaaaagaaaaaaaaagggatgaaaacccataattacttcaggagttatggtaataaattatttattaatgtaaattatttcacagacaaggaacatagaggaaacttgagcagaaggatcatacattatgtataaaaaggaattgtaaaaacattagagcggctgacttgtgcgctcggcttcaggtttgtcagcattttaattataagccccactttcagtgtttaattactcggctgttaacgtctactctgtacataaaagggttgttccccggggcactctctgaatggagttcctcaggaaaacagttggctgtgttgagctgcacagggctaagagatttcacgttgagattcagcaggctttgggttcttaactcaacctcagttgatcactgaaaatggcctgtgcttgtacctgtgtggagaagctggcattcggggctagacagtttccattgtggtcagatgaccaaaacaacattaaaaccaccaccagcaatcccggcattacacagccgggggtttatgtgtgattgtgatccctgagccaggacctcctagaagaaattgcttatggactaatacaggctagtatgtgatttgtttccagtgaaaaatacatccacatacaagtacatgtgtctgcttaaaaaaaaaaaaaaactctttacagtttgaattgatccttgttgtggttacatatgtatgcgatttttgaaatccacacaggatgcttttcagttcatgtcccttttattggttccagacagtgtgtgtggagtgaagtacagaatggaaggagtggagttggcccaggacagctgtctgtgagcctcctgggctgccctctcacaaaggtgagggagcgggagcgggctgccatggtgctgtaggccaggagatggctactgcactatctttgggtgtcggcctctcagtggagaaggataggcagtgagcaagtcgggaacatcctgtcctagtcgcaagagtatggctgtagggccgcagagcatgctcatgtctgctgtttgccaactgggtgtgccccgaggacacatggcactgctctgaagcccagtttcaccagtgggcagggatgctgtgacggcccaggatgtaaacagttgcttagagagcatgctcatgttctctcagcttcaacagggcccccagtgtggaggtaacacatctattgacagctttctaaagggctgtcctcgctttcagtccccttatctaatacaaacgcagctaaccttggtgtgtgtgtgtgtgtagtttagagatctgtctgtctcatgtgctctccatgtgccccaaacatgaggggatcaaaaaatagccaaactggcctttccagccctttggaactttgctgctatggagaatactagtttccctgacatttgtacgtactcctgggatcttgggggtagagctgaaggctcttgtcaaggttgacacagcaccttgtacaaatgaagaaacagaggcctgtgccttcaatgttcagggcagtgcagttttaaaatcttagtggtcccaccagcccctgccctctttttttttttttttttcaagactataggcttgccaaaagcagtgaaagctgcaagctgctatttgcagtccccgccctactaatgaggcaaaggccctggtagccattacacccttatctttgtcccttcttttagagcctagcaggtcagccttcctgtttttgcagatcagactgagtggagtatctaccgtcagccctcctaaccctcttgtctgtgtgaaatgaacttggtgttttgtatgactgtccttaagacatggcagggccaaaggctaaagtggagaagcctaggagcctgttttcctgactcagcttctagtaagtttccattctggtgacagcttctatctacacttcattaaaagcagatgagagagccaaatgtgatgactgtaatcccatcatctgagaggctcagagaggaggattacagcaagttcaaatccaggctgggtttcatagtgagtttcaagtcagcctgagcgctctggttttttttttttttttttaaatcaaataaccaactaaccaggtaagaccttgggggaaggctcaagttattgcctagcttgcccattgatgttcttgtcaacagatcagtttagcaaagctgcctttagtctcacacttaaagggctggtgagcttctgcccaaaacagacggtctttgcagccctggggccaagttagcacaccacagccttggggtgggggagccaatacataactgcacctcactgtcagcacaagtagacaggtacgaaatccaggagtgagtcagccacagggctggctggtggctttgcttcctggggttttgaaggctgcaagaatcagatctcttgagtctgtatgtaactacttatctagagacctcattgtgttatgactgtataccactttaaaagaatatcaaaaacacagcactgagatctccagggctgtaaaactcctctatcttttgaacataagaagtcttatagtccctcaagaatctgggcccctgggaatttcccagtctaagtgcagaaatggaaacaagaacatttgaggtcaaattctatttgtgttcctccaagtgcttttcgttcttaaaactcaaaatctgcatacccagcagcctctcctctctgtggtcagggcagcaggactggctcctataaaatgttaatctgctgtacgtgtctctttctctcaaagagtagatggtcagaaacttaaggctcagtccttgagcctcagctttggaagggattttgatcatgtggttcacttgtgggagagctgggcccatggtatatttatgcctgtgtggttcatcctcctatccataggtaaagtgatgtgctgaccccccccacacacacacacacatatttgttcacacattctcactgttgtataaagttcacacttgtgaactgggtgcactgggaacattgaggagcattttatgacacaataggaatggcataatgtaggccatgtgccattgagatggaagctcggggagtccccacctggcctgtgaaacatagatttttaaggacctgaaaagcaaagagattgttttctgtaagttccctgtcctctgtttgcccaaagcggaagcaaaataaacccacgagcttcgtcttaagaatcagttttgtggcatccaagaatctgcatctctactgcctacctccaagttctacctcctccctccagctggcaatcctggaaccataccttggaaaatccctagtacagaaaatcctgctccccctttagcctgagtccacccacagacattggtccccaggtacagaaagcagatccccaacacaaacgtgtttttcagtgttgttctttcagagttacactgatggctgccacctctgagagattgctctgggcactttgctgggcctgtgtcttcttctctcagcagctgagagagaataggaaacgtggagaactatgattcaaaccaagggccttgccctttctcactctatcaagtgactgttgctcctctgaatccatggcctttgtcactttggaaagagttccagttgtttacgaagaagtggtaatgttgaatggcagggcggggcacttgctgtcttctgctcagagctccttgtgctctatgaagttggggcttcacacatagggctgttgccattacaagttagcttctgtgcctgttcttttgtgcggggatctgacccaacgacttgctttctgggccctcagtgaagggtggaagcccaagagctaaacatagcactggttgtctttacttgtttgtatttgtacttttcaaagtgacaagattggaaaccattagaatctgtgccgcagacaacacaagtggccacatggatgctatcgatacgcaccagcagtgctttccttttgcaaactagcctttatttacctctatctagttgtctgtctgcttcatacatagccaatcaaggcccagagtaggtggagggtttggggcctagcccagattgaatctgcgtgtactgatgatagtaaaaagaactaactcgtgaacacccacagccccttctacagtttttgtctccattttgtcacccacttttccttcacgtcctcccaccccctgccaggtctgctgtgtggcacactccatgaaggatcatggaaagctgtcgtgggttgtacttgagaactggcagcccagcagcatgagcagcaagtgtagacctccatacataggatgagtctcttcctagttgatggcttttcttccccatttgacctggacacattctgtcccgtgtcccaggcttccaagcaccagctgtggtaccatgttggtccttcactgctcagtggataggccggttgttcccttcctcagcctaccacacccctgagctctgtggtgttttcagtgtcagttgcagtgacttcctggaaatccacaggagagaacccagaggaagatgagtttaggccctggttctagagtggctccttcccagaactaaggcagagcacagcaccattcgcccagcagcacagttctcacacacttactaataaactttcctcacaggaaatgtacagacaagaaaaacaaaactaagaaagcacaaattaaccagccatctcacagtcagtcattaacattttggtctgttgctttttgtttcacgtatagcatattatgtatcgactaaataggaatcgtggggctctatacacagcttctttagcagcttatctccagcattttcctggcccattagccagtccttgacactacactgctgcgtgatctgtttaaccagccacctactataggacattttaattataactttgttatacaatttgctgtcatttcttatcattttgatttgctttccacttattttttctttttttaagatttacttatttgatgtatatgagtaggagagcatcggatcccattacagatgtttgtgagccaccatgagtggttgctgggaactggactcgggatctctggaagatatcagtcagtgctcttagctgctgagccagctctccagcactctacttttttttttttttttttttttttttggatggcttttctccttctataatatgtagtcatgactcagtctgtgttgaattgtatttcttctcattctataacccaggctgaccatgcattcaaggtgatccttctgcctcagctccttgggattaagctgggtttatgccaccgtgcccagtttagtttatatttcctctgttttgaatttattatcttggttcactgagctattgccaaattaaaactacttcacagaatggtaaacattgagcaggggagatgtgtcagtgggtcaagcacttactgtgcaagcctgctgaccttaactcagatccaagaacctacagaaaagccagacagagccccgcagtggtggcgcacaccttcgatcccagcactagagaggcagaggtaggcgactctgagtttgaggtcagcctggtctacagataccccacccccaccccaccccaaatacttgtgggaagggagaatactcaagaggaagagaatactggaaggaatgtttcccaccgttactgaagacatacgcatctgaacaatgtacagagcttgcgaagggctatttgggggtccagtaaaggttatatgtggaagcaatttatcaaattcacctagaagactaggtattagagctgcctctatcatcagggtcaggaagattctaagttggagtctttgggtgttcagctacactcctgcttcattcccgctggcctgctaaatgtcagtaaacctttcttctgcctctccagctcctaaggttttcagcatttataaccctggatagtttctccctgtgtcctctgcctaggcttgcagcttctcaggtcatctgtctcatgacttagcagagtgtctgggtaggagaaactttacactaagccttggtttggcttcctctggctcctgggcaccctctttggtggctttactcaccctcttgacctaatggactcggtactgtttgggtgacactcagtgcatggtgtatctcagtggcctttgagaagtgacctttgtaaaacaggtgtggtcatggtggctcatgtcgaattccatgacttgggacactgagacaggagatttgtcacaggccagggccttatgctacagagtagcacgttgtctggaagaaataggactgagtggtgctatagagctggtttcatagttctcgttacctggagtgtgcatcacctagggatagaacaatcttttgaaacatctacattttccctgtataataagtatcttgaagccaggtcaatgtcagactggcctgggtttttactgagccatatagctgtattgcactgggtagtgtgctgtgtggatattatggtccaagaaggatgcccagtgagtggtctgaattgctgtgggtgtcagtgggacctttaaataacttagttcaagccattttcagctttatttcaggtccactgaccacctgactcaagctgtcacatttgccaactaaaacatatattcagattagcagagatagggctgagtggacagcaggtgcttctcatttttgcattttttttttttttgtgttgtaaatttgagaacaggaactttcgtctcctaacattcccagaatgtctgagactatagtggtaaaacaataatttgttcgtaagattttactgaaataaaagttcaggttcagatcttgcattccacagtcgggctagcccgtggactcatgcattcaaacagagttgcctgctcttacatcacgctgtctgtggcctaaatgttactcttacccatttcacctgctttacatatcctcagtttcatcaagaaatcaaatgaaaatgaaaacaagcgctgtgattggcagctgttttctgaaactgttgaacattttgctccaaggcaaaccccagccccattttgactgtgaccatctgaagtggccaaggcctagtgttgatcatggtcttctgctggtgctaacttgcacagctcccctgactcagccaccaactggcgcagagctcaggacacgttaccatcacgggagacagcatgggatgttgggagggaagctggatcaggaactccagggacaggcaggtctggatttgggatgctgggaaggaagctgcatcaaggaccgcaggcctgggtctggatctctggccttgtgcttccaactgggcaccttgggccttcctcctctctgggcctcagttttcatccataaagtaaggttgagctggctggtttatgaggacctttctggtgccaagggctacgttgcacacaggctgttcacaaaggaacagaatgctgttgtgaaggcctctcagatcctattttctctttgtatttatgcaccagaaaatgacagatggcgagacctggatagaaaatgccctcttcagattgaccagccaagcgccagcatctgggaatgtctgcctgaaaagtgtcaggatggctccctgtggcaccaggaggcagtgactgcctgtgcggtgaccagcctaatcaaagacctcaacataaatgaccacaatgggaacccctcagctcctcccagcaaacgccagtgccggtcactatccttctctgatgagatgtccagttgccggacgtcatggcggcccttggggtccaaagtctggactcccgtggagaagagacgatgctacagcggaggcagcgtccagcgctactccaatggcgtcagccccatgcagcggagctctagcttcagcctccctgccagggccaatgggctctcttcaccttgccaccagtcgagcctgcaccaccgctttggggggcaaccctgccaaggagcaccaggctcagccccctgtggacaggcgggtgatagctggagcccagacccacacccagtgggagggggccggctggacctgcagcggtccctctcttgctcgcatgagcagttttccttcccagaatactgtcccccctcagccaacagcacacctgcctcaacgccagagctggcaagacgctccagtgggcttgcccgcagccgctctcagccctgtgtccttaatgacaagaagatcggtgtgaaacggcggcgtccggatgaagtgcaggagcaaagaccttctctagaccttgccaagatggcacaggtaagtgccccagtggcctagaatagactccagaaacacctcactgtttctgggattctgttcctggtccagccgcttaagtgcacagtgactttcagacatgtttaggagtcagttccctaaaaaaaaaaaaagaaaaaatttcaaaggtttcgtttctgttcttttaagttttaagtacctggttttctccatttaaaaggaggcatgttctttccctgttaagctcattgctagtggaacaagagcagacagatggtgagaggcaggcattggctaggagtcctgtgtgaccaaacactaattaatcctcttctagtcctttgctggtacctcctctcctggaaacccacccaccagtgttcagtatcactcggattacgctgatccctagatcagagccatgggtaatgacgttagggaaggtgggaactgtcaaacagttagaccactcagaaattattagtctgcaacagttagcactggttgtgggaggagcctctcccacgtgctcctgttcctctgtgttgtcctctttgtcttggagtccagcattgtgccagcacttctcttgggtattgatctgaggaggatgggcttggagttagaagccatcagcaggacagttatcaaagcctgagggctggctacatttggtgcctgctatagaggtcataggatgtgaccaagatggtaaggtctgtgctgtatgtgacattggtccttgtgaccattaactctaggatgggtggctctggtgggaaaaacatggcactaccaactctgtgcctacctggaagagcctcttgctcagtgccatggcgtgagtatcagttttgggtgttatgtataaaaacattgattattgtttggtttgaggaagtgaagatctgtttgctagtgagggagtgttctctggagagttggtcaagctcttcagaccatgggcagacccaaggcaggcaggctcatagtgcctgttctgtaccaggcaggtataaccagcaagcaagcagtcttcagttcccttactacacaggcgtgcacacacgcatgcacatgcacgtacatacacaggtgcgtatacacaaacacaaacgcacacacacttctgcagtggagccgtctacttacaacaaagatatctccatgcatggggttaccctctgttcctttaattctctaagcctgtcagtcccccactgaagacaaggtgcaagtatctgcatctgaggtggcctcagagcccagaattttgagcctctttcacatatgagcccagtccatgtccaggacaactggagacaagtggtgatgtgcttgtgccacccctgcgcccactggtcaacttgggacagagttctgcccctttccatgtccaggttccatgacttctgtcttggctccgtgagagtctcttccttcttcctgtgtgggagatctttctggcttactcactggactgtaactgagcacatatgttggataccaagaagtttctatctccagatagactgaaataggttgaagggggacagcattgggtgacttctgaaggagacacagaaccctaagtgctgggtgtgatacatacatagcctcagttgacttttaatgccaagcctgttttcttagtgagcaagctggagaggtaataaaagcagcttacatgtgttattagatctcactagccacaagctggaataacagtactacatcgctggagacattttctggcctcacatatgtagacactgtttaaaaatatattgctcggtggggttgtgaccaaatgtatggcttgcctcatcggttccaggcaggcctccaagatccagaaaggtgtcctggagcctgagaagaccaccctggttctgcctgccaccttggctgtctgcttgaccatgtaggtgggacaaagcacagggaaaggagagaatgccctgggaatgagcacgctttgcatcagaggttagaccccgaggatggagtttgtgggtcctggttcatgtcctaccacacatctaccactgaccagccctctctccatggggctctgtggctctgcctgctttgcctctccatgcagtaatatacagtttcagtaggtaggccttacttgccaagaggcctcctaaccactgagacagttttcatgtgtctgtaaacagtcctgggttagaggcctagagagatggctcaatggttaagtacatttgctgttcttgtagaggacatacatgggtttggctcccagaacccacaaggtgactcagaactgcctataactccagtttcaaggggtcttatgtttctcttctagcctctaggagtataaggcatgcatgtgatacgcatatatacatccaggcaaatcactcatacacattttttaaagagtcctggactcagccaggatattgtagggccctgagtctgggttcacaacaggcaggcatgtcactggtgtacagggacccacacctcaccagagaatggttgaagctggtgctctctacatgcggtggcttcactggaggcttttagctgcctagaggagttcaatgcctgcatgtctgggaggaggaacttgtaggtgagttttcatacctgtaggataggcttggaacagccctttcttccttgaactccctccttaactctctcataagtctttgatctcggttggtatatttgttccactttcatgttgttgtgaaggaacctctgcatgtggcctctgagaccaggtgtatgagcactttagataaaggtacaaagtgccttttggttagacctttggagcagctgggcgctctaataaaccaactcccttgaggggcccactggggccaggagcagaccctgaggctgatgaacctgtggggcttccctttggccttgacacagctggtgggagccagagcgctctaacctgccagtagaaaaggagcctggttaggatgagagctgagagccagatagcaggagagggcaaagagctctaagatccagaccgtgaggccctagtcttcctcgctccttggtttagcaggagcacatgccataggcacaagctctctgatagatgtccatgctatgtcagggctcacccattaccaccctgtgagggtactgagggtctggtggttcctaggcctgccaggccctttctgcataaagtagtcacttctatatctatatttatggctgctgacaaaccatgaggcctccagaaaagaggttatgatgctagagcactaggcagtttgctgaacattactgtgtagtagctccacaaccaacacaggagtgagggggaggggggttggggaaataaacagtgtgcatttaatgtgtgcttagatttgagtgttcatgtgcatgtatatgtgcatgtgtgcgtgcctgtgctctatataatctggagaatgcttttgatagctgtgttttttcttttaagtgggtgagtttattatatacagtaaatcaaaataaaagaataaatagccagtagcagacagacagacagaagcaacagatagaaaatatcatcaagtcagagaggcagatagcaggagtccctgttcatctttctggaggagcttcaggcttcccattgccactgcaggcaccttcatatcatgggataaaggatgacaggtgacctctgttggaaatggttcaccttatagttgttctaaaggacatgatgtttttactcttgtgttagtttgcacagtacaaacaagccatcttgaagaacacacactgagacatacttccttgggtctgaaagtggggagtaaccccacttcctaggacgtttttcagtgagctccagcatattactgttcatcaatataatatacattataatgtgcatgcatgcatcatgtgtatctctgtatcttcctgtgtatatgtctatctatagtttttgtatgaacattcgtaaatctatccatacacacatgcacacggcacccgtgttacccggtgtgctgttttgtgaatggtaagtgctgacagacacagttcgtattgtacttgctagggctagagaggaggtgtgagcggctgcaggggcaggtctgagacacccacgctgcttttcttgcttcctcctgtcctagtgcccctttctgtcttagccctaccaccccttgtttgttcatcctcctgcctcaacctcttctctcgcaaatggtaaggaggcagtcctctggccaccaagatgcctgctcaactccatgttgaaagccgtgggtggtgagatggtgccagaaggggatttacctccctccacagggagtcagccatatatgagcattccctccccatgtccagcaagcatccttgaaaccagggctgaaatatccccagagaccacagctaccccatcgcctgccatatctctgaggcacagctgtcttagccagcagcagtggcccttgtccctctcagcagtgaaggtgaaattgcagtaaaaagttgcttcccgattgtcttaggtcatattgtcttaaagtcccagttctaagattgtggccagggtgcccggtgaggctgcagttgacacagctgtctggaccctgagtgaagaaggttgattgtagtaaggagaccccggaagggaaatgacaccttccttccgtgtatttttagttatggcctgtgctctgtgatgtgagctgtggcccacaggagtccgtaagaaccagccctgcctgggtctggtcttgtggatctctcctcctgtgctttgctcctcaagtggtcttctgaggtcattgttgtctgtggtgttctgtaaagccacagcctcctgctggcaccaggccagtggacagcattgaggacagggctggtctgagcattgagagctgtttagcagcccaactttccctgacattgatagcaactgcttcatttgagacctggcctgaccaccaagcattgcttgtctcccagaaagtcccaagttatgcagtaccgttcactcctggatcatgtgtgtgagcaaagacttcagaaaagcaacagtgaataagattactcatgaatgccatgcccctgggtgctgtgtttttaactccaggctggtcagtttgaaagagaaaacaaattgtatttttcaacagagcttcaaatagaggcaagacattcatagggagggctcaggatgctgaaacagaggtttgattgattacagctgcccacacactgcaccctcaagctccccgaggaggccccagaacaggcagcaactgttgtgttagcagatgtttgagaaactcatgaaagctggctgggatgctgtggggcaggaaagagcaggaggtagaaataagcatgctggcatatggtaggggagccgctgagagctggggtcctgcccatgagtttagagagcctggtggagtagagccatagggctttgctggttggcgggctgctgctgcagtcagcaggggttataacagatgcttagtgataactcctggctctttgctgggcagagtcacccttggatgaaactccttccagccagccttctttccctttgctctgtgtaccagtggagctgcctttagcaggggacagtggcccttctagttggcatgtggagtggctcttcatgctgctggacttggcagttgtgggtcagccttccatttgcttggccagatccctggctgtaggtctggctggcctaagcctttgtggtctactctgtcagtgtccagtgcctcacctgttactttgcctattgccttggcccctcgttggccttgctgatgaggtgggaggcaccacattttgatagggagatgaatttagagatggggcatctacaacatagagtgccggctggtgtgaagctctggattgtattggaacaacagaagtgctggatgaaagtgaagacaaaacccatcaatacatgggatggatgcttcagatggtctggacctcagcagagaacctgagttcttggggtttgtgaatgctgagctgtggcagctctgggcatagtaacctaacatgccctcgtccgtgcctttaacagccattgctaaccaatcatggcatctgtttaggtaaactcagaagaggccagcttgacagcctctgctgcccactcagtaccatctgcctctcctgtgatagtttgtccctcattggaggatatggctattagcatgtaggggcattggaggatatggctattagcatgtaggggcattggagacttggccaaaaccatataccgagttggaaaccccaggaaggcttaggccccagtgaatccctctcctatcacctggcctttgtcagtgactgatccttgtgggatgtaatgtgagctttgaagtcaggtaagtcagggccctatccctatcctgccatttctgatctgatctgtgcacccttaggcacacgcctggctcctctatgtctgtaaagtggaattactcttgcttttctcaggagaatagaaagaagccatgcactatggacctagcacgtagttttcaattgaacacggctttatagaaaagaaaggctggggaaatttcatagtggtcaaggtacatgccgtgcagagcccagcacccttgggaggagctgagtgtggtcttgtgcacacctgacactccagctgggtttggggagagagtagagactagagaatcactggactgtgctagctgctagccaagttaaaaaaaatatgaggtggaggtctggggagatagcccattggttaagagaacttgttcttacagaggagacctgagtttgatttcaggcacacacacagtgactcaaaattgtctatatctcaagctctggggaattcagtgccctcttcgacctccctgggcactgtgcatgtatgtgatgcacaggcatacatatgagcaaaacactcataaataaatcaactaaaagaacataaaaataaagatgggatggaaagtgacagaggacgctcggtgcctttctgtggtctgtgtactcacacatgtgtgcatcctcatacacgtgtgcatgcctcatacacatgagtacatgcacattttaagaaaaagcaattgcaaaaagaagcggctgcagcagaagagcctgcagcttttctcctgtgctcaggggtcagctttcctgacatagctcctctacaactctggccagcctgctaggcttgtgctgttggtaggccaagtcctgccagctgtgcgggttggagtgcttggcatatggccttcctgtttccttagagaaagatgtgtccatgggtaccatagagctttggtgggggaatctatgcttcaggaaaaccatccacagacacctggttcccttcttgtccccaggttctgtaataagccatcttctgaaggtcactcagatcacggcccaatgttgacataataggctcgatctcctggggaagagaaaaaaataggaattccccctgggagcatgccaggaaggcattcacatgccacttggtgattttccattcctcacttgaaaggcagtggtgctctggggactccaggatccttgggagtgagtgcctcttcctccctaggacagttccctagatgagagcccctggaaagttccttatcaaactgggagcacctttggcttgccagacctgcactgtgtgggcatagtcttagaatccctgtcttctagggcccacagcctctaggcagaaggaaagcagcctttcctgatgaggtctgagcattccccagggcagctctgggctggccagaggaggccactgtaagaaaggcctgtgggccattgttactagtgcatgactagttcacctccaagaaggagggggcactagagcagtagttctcaacctgtgggtagcgaccccttgggggggggggcattgtgtagaacagccctttcacaggggttgcattaccattcattaacagtagcaaaattacagttacaaagtatcagtgaaaataattttacagttgggagtcaccacaacatgaggaactgtattaaagggtctcagcattaggaaagtcgagtcccactagtctagagaaattaccatgttattcctaggttgttgaagaagtagtagagtgtatgagctgaaccaatgaggcaacagaggctgaagggggacaggacctacttcatgctggaactctttatctggggcagctaggtcttcattgtgggtaatttatgtcacctttctatatcttagaatccctgtctagggggtaaggtagcactaggaaggtaggggaaggcagatccttggtcccactggtcagtcatcctggctgaattgatgagcctcagatcccagagagaaccagtctcaaaaaaaaaaaaacaaagtagattagctgggtgcagtggtacaggcagacctctgtgttcaagaccaacctgatctacttagtgagttctgggacagccagggctatgtagagagaccctgtctacccccgacccccaaagtagatggctcttgagaaatgacacccatggttgatctctggccttcgcacacatgctttcacacatgtgtacacatcaacatacatacaggacatgtggcttttattcttcacacagggtggaagtattcaaggatttgaaacccgggagcaatagaagccctggaaacttttctggactgtgatgagcagtatgactgagggggctggggaaatggaggagcctagtcaaggtgctgttggcaagcttggctgccaactaaagcagggcggacagtggcatgcccatttgtgtaaaggctccagtagcatgctaacggtgagacaacaggacccaccatagtgcaaagactgctattggccaccagcttctcagtgtagactgcaatggtagagtcaatcaccctagctcgccagcatcatcactgctgtgtgaatttaaagcttgccgattgtaagtccctttggtcttatttatatgcttactctgtctgtttctttgttgtgtgtgtacagtgtatgtgaatgcaggtatgcacatgcagtagcacacatgtagaggtcagaagacaacctccaccttgtttgaagccaggtctctgttgtttatccactgtgtatgccaggctgtctggcctgtgagcccttagggagtctcctgtccccacacacatgcacatgtgctttgcacggctacatatatacacggcattgggcttttcattcttcagaatgcttcttcagaagcatagtgagtacagaaacgcacactgcattcatctgttacacggatggtgttaggtcctcctgctggcacagcaagtcttcctaccctctctgggccgtctccccagcccacatgttccttcttgctcgtttcttagtacagatgaagcctggtggtgcaccaagtggccatagagccaccttgctccagtcactgcatgccagtggtttatccgccaggctgccttttccctctggagcctctgtacctctgctaaagtgtgtttgtccttgcccattagcgctgggttccccatcccgagctccaagctcagggctggaggaggcctggaccggcatacggccacaggaggattcttccatggctttgaatgtttgtcatgctggacctcatctcagctgtgccgtatctgtcaatttacaacagctggggcagcatttccctgaacgaaagggagagggaaggtctgtggtgtcccatccgagtcttcacataagtctgaggacgcctcagtggacgtcagcattcagggaagaagacacttgacggatgtaggaaggagtttgcccttttcatctacttcctgatccctcaaagaacatcagaataacgccttccctaaaggatcaccaggcccttagtagcatggtaccgattggctaggaaagccttagcaagaaccagcaaaggagccgggcgtggtggcacacacgtctttaatcccagcacttgggaggcagaggcaggcagatttctgagttcgaggccagcctggtctacagagtgagttccaggacagccagggctacacagagaaaccctatctcgaaaaaccaaaaaaccaaaacaaaacataaaccaaaaaaccaaaaccaaaccagcaaaggaaacagagaggcatccttgagttggatgtgattgtgatggccaagtctggcccaggctgagcacggccatgccattcccaagacgggcaggctgctgttttctgggggaccccggctccgaggctcagtgtcacacctttcaggttgtgtccctctgccaccccaagcactgcatcggcagcctctccctgttgatgggttattcatctagaaaattctgtggtttcagccatctggattaggtctcttctgtgcagcttccagcttcggtggagaactgaagaaaaccagtgccacataggagctcgagctctgctgcacttccttccccgcaggacttgagctgacttggttaagtgtgggttaattgctccttctgaccacaagattgacagtgtcacctttgaaagttacactagaactcttaggtagtccttttgggtgcagggaagggtggctttttttttttttaatctcttttagaaaacaaacaacaacaacaacaacaataaaatgcttggtcctataatatagtacaactcaaggcttcctctgtaagcaatcaaagtgcatatctctaaaggccattgagcccccagtcctggcctgacactgtacaaaggccacatcatgcatctgcctttcatgggagcaggtggggaggcagctgtcccttgccagagtgtggcatgagagtgtggcatgcctcttggatcagccagagcctggtcaggacaaaccatccattgggtccaagattgtcactgaaagtatgtgtaactaggatttagaagaaccaatatctcagagaagcaactgcaggaagctgctccctacaggcccttccggaggcttagcagccagcagtctgaaggttccacagctggccaggcctggagaggggagggagatgagtactctggaagagtagcatgctgaagcagctgctgagaaaggagcagactgccctggtaggggtcacatgtgtttgggtgactgtaccagtagaggaaacagttaagagaggccagctctctccctctagccctcatttgcctgacggtcttctgctaaagtcaggtgctgtgggcatcacttctttcctccccaggttaggcaccagatgcctttcccccactgagccatctcgctagatctcagccttttttggggcagtgttagatcagtcctccagggatattgagcactcagtacgttagaggagcctggcaagaccaggcaaatattcttgaacatgatgggatcatttttggagccccaagaaatgtggtgttgaaagaatgggtcatggctccgaagagcaggtagagccccaagccatgtcacaggattccaggaagggaactaagcctctggacaagcctgcatttgattggctggtgtggggcagctctaggagtccattcagaaagggtgttccttgaattcaagttgtcccctttccaaagtgaagaggtagtttcttgggcaagtaaggtgttaagtctcatgagagtctttcccagatctctagagacctggaactgaagcagcagctggagaccatcacagcctctatttggatttgacctcctgtgagttcattttagcctcttagtatccctgcgaggtgtttcttacaagaggtgctggggccctgaggtgttcaataccttgcccaagcgatcttggaaacttggcccagagcctcctagatcgggaggaggtgagttaaaggtctttgcacacccagcaggcttgaggcagataactctgtttctacagaggccttgggtaggagggagggagatctggggaaaagggggagtctggtaagccctctggaagagtgtagatcctagagcagattaagagcatagcaaaccctcgtcagatgcctgcaagtggccgtggaaagcttccagctcacagtgggaaggcacttctcccaccagcgcctagcattgctcagccatttggtggacatttggaatttggcctcgactccaggcctgccacatcagaatctgtatttgaacttgatccccctacttttgaaagaacttgggaggtttctgtggaagatgactctggtttggttttggcactatgcggcccatctatgggttcttcccgtacctagggctgggggcgaggggcagggtgtccctgagtttgagccttacctggtcagccttactacagtgctaactctgtcctctatggtttgagtcacctatctggtcaccctcctaccactgtcctttcttcccaggaatgaggggacatggttcatcttgggaagctttcactggagtcttaggcaccacccactgctactctgatcagcctgtaaatggcagagtgacagcttctcttcttctcaggcttccagcaagcactttgcaaatgggtaccatcagggccctgtggggtggggatgaggctgcagaaggaattagctcactagaacccttctttctgatcctgcttcagaaggaagctttgccatccacagtgtgtcaggctagcccaggtcagcagcacgggagaagacaggtggagaccagggcttgtggatagggcttgtggtctttggggaccatattcacatgacattcagagacggggatagggaacaggtccagatgtgagtcttgcaaatacccattgatctcttcccatttctctgaccatttttcatttggtgtttgttagtgtgatcagtgttggtggtgtgattacttagccatgtcaggagacacccagaaggaggctctcatttcatagtgggcagatcctgagcataggagcctcaaagaccacccccacagtgacacacttcctccaacaaggccacccggcctaatagtgccactccctggccaaacctattcaaaccaccacaccactcctaggcatgggcaacacaggtagttgcatagtgatgcccttaaaacagctccttgctgttttacacaagagactggagttcaggatcactgccatagtcacaaggccaggagtttctccaagcttgcacttgttacagtcccaatcacatggcaagggtcagggtgccagagcttccctggggagtgggggaacacagcagactcccagtatgaagacatccaagtagccaagctcaggggtagccccacagtcctggggtagcagcttgggaactcacaggtcatcaaggctgcatattctaggctctgcttgctgtaccagtgttagagctgtctatacattctgagtgacactcatcatcatttaggataaagaggggctaaaagtggattgttactgaaatttgagacttaagtttgaagcagtgacagagtgggacactgaaggtagtcataatgaagcccagcagcctccagaaggggcagacacatgagagagtgggtaggagaaatgaagggctccacctgtccccacccacaccttcccagtcgtcctatcctggaagcttagagagacctgacagtgcagggcgaaccacagggactgcttcatcccagagcagagccccaggaacactcacagtggatgaagcctagtgttttgggctctgtactggccccagcacacctccttccaatgcttttgagaagagggacttaaaaaacatatctttgagttatggtgacaaccttcacagactctcttccagatgaagagtctgatatgtaatgaagttttatgtatacacaacggtacctcttgctgtatttgtcacctgtagttttcctgctactacaagtctgagtcctggcaaagatgggtgtactggctagttttgtgtcaacttgacacagctggagttatcacagagaaaggagcttcagttgaggaaatgcctccatgagatccaactgtaaggcattttctcaattagtgatcaagggggaaaggccccttgtgggtgggaccatctctgggctggtagtcttgggttttataagagagcaggctgagcaagccaggtgaagcaagccagtaaagaacatccctccatggcctctgcatcagctcctgctttctgacctgcttgagttccagtcctgcatcctttggtgatcaacagcagtatggaaatgtaagccgaataaaccctttcctcctcaacttgcttcttggtcatgatgtttgtgcaggaatagaaaccctgactaagacaaattggtaccagcagagtggggtattcctgtgacaatctgaccatgttttggggaggactgtggaaggactttggaactttgggcttgaagatccatccattgttaagagctctgtcggatgtcgtgtaggagcttggaagataatgttgagaacaccgcagaagatggagctcttgtttgtgaaatttcagagggaaaattaaagactcttttcagggccattgctgttttgattgtgaagattctgtagttctggttagctggggctgaagaatcagctgtgattaacaagataccagaactaccaaagcaaaaactttgcattactgggactattgatgctggttagctggagctaagaaattagcggtgattaagaagagaccagcatcattgaggtgacatcttctgggaagtgttttgtgaaagcacaaagatgctgtgttccagagatggccaaggttgtactcctgctgcagcgggacttggtaatatgtaagggtcacccaggtggtactggttttgaaggcatgaaggggtcacgcaaagcagctgaggctcggtactgtgagaggccatggaaggccattggtgaaggtgcagcctcagttgcaattgaaggcccaggactgaaggggtcatgcagtgttttggagatgccagtaccatgagatgaccaccaagagcagcagcagcagtggggtagaggcatctggagcctagaggatgatgtgtgtgctacatagggcatggctggagaagtgacccaagcccttggaggagcccagaagatcgtgagttggatcccagacattggacagttggagattgacttttgcttttgattgtgactgtgccctgatattttccctcttgaaggaagaaactgttttagtggagcccacagttaagagacttttaattataaaaagactttggattttaaaaaagatggatattttaaagagattgaaattttaagaatatggaaatgctgtgggacttttaaagttatttagatcttggggatgaataagattgtaagggttgaggcttactagtgatgtttttgtgtgtcaagttgacaaggggtcaattgtactggctagttttgtgtcaacttgacacagctggagttatcacagagaaaggagcttcagttgaggaaatgcctccatgagatccaactgtaaggcattttctcaattagtgatcaagggggaaaggccccttgtgggtgggaccatctctgggctggtagtcttgggttttataagagagcaggctgagcaagccaggtgaagcaagccagtaaagaacatccctccatggcctctgcatcagctcctgctttctgacctgcttgagttccagtcctgcatcctttggtgatcaacagcagtatggaaatgtaagccgaataaaccctttcctcctcaacttgcttcttggtcatgatgtttgtgcaggaatagaaaccctgactaagacaatggggcattccaacaggagcccacagcctgcagagctttagtgtccactaaggagcccctgaactagatagcccggtgcctcagtttccttgtttagaaagagtatgtggcaacttctcaccaaaagctggtctttgaaaggacccaggtcaattaccttagtagtcagaaatatgtcagtgatgtaaggtggcctcctcaccctcagctggctttcacaaggccattcctgtgctcccagagtggcaaataagaatgctgctgggtcaggagctgtggaaaaggggcacctgggcaccctgccttgggatgaattgctgtgctgcctcttgctgcacaaaaacacccatgttcccacactggctacacgtattggctgggctgctcatccactctagttctctttccaggctgtctttgagtctttgccatgcttgagaaagtgtgggccagagcagggagtgttcatttcctctgctttcgctcccttccttctgtccctcgaagaattttggtggggctgtgccactcaatatggtgaaacgaaacgcagcctgccagggcagcactgggattctcatcattcagacagagctcttgaaaatactcccaagctggggtcctaggggtctccccgcaagcctgatgtattctctgatgaaggtagacatctagctcggaagttgctagaggacattaatttgtgggaaaaataacttggccctgaaaggtggttttatggcagctttgtaaaaataagggtggggatggttggctccgacatttaaaagcctcatgtggctgcggttttatcctgtgccccacctcgggctcggtgaacagaggcccggcccaggttgaaactgcagcagccagccgagagccagaagtactgttcagggcctggaatgctgttagggacccaggaataaagttggaaagttctcatgtagactcatggatgttggcacaggcttgctttgagctggtgaatgatgaagacacgcggaactgggcttggtagcatccccctcttcagttccttccctgcccctttgggacagctgtgcagggggagtggggtgatgatctgctcagaatctgaagacgagagccacaggaattacagtttttcaaagggagttagcttttaaagccagactgctccatgcatcctttaagcttccattgtgtaacagacatgggggctagggtgtgccctaacttctcttccttcttgggaaggaggtgcataagaggttagctgagagatgaagcacatgtttaaaaaggtaccagaatcattctagggttctctgagaaactaacaatggaactgtaaaccccacagaagcactcctgtggagctctgaataccatatgcaaactggcctgataatctccatgttaactctaatgcagatattgctgttggtttagcagattgctgccaaagatggaagtgccgaaacccaaaaccccgatggaatggtttactagaagctagctgctagtcctagctggtgtggagtttgaactcaggacacgtggctgagaatctctgccgagcctgggtagcacagccactgaggtctgtaggggttgaggatccagtggcttctgaaggcctaataggcagagtaggggagtgtgtgtggcactgaggagtgaagccctttgtcacagtatggtacctccttcccaggttgtgggatgcgcaggtagtttgccaaggtaccgcccattctcaggaatgcaccagttagtatggatggacacatggcagtgtgcaggaggtggcacatggcctgggacctctgctgaggtgacctgcagccacttggtggtgcagtgtacagaatattggccagtagtatccctaatccttatcacaaacagtgctttcttcagcttgatgtctagcagagagcacaaccacaccccaggacccctggccatcttttccttgaacaggaaaatgtctgcttggtgaggctcggcacagagctggttttcactgagaaggacgtcacctgttgtgacctagagtctgccagaatgcccacttggttctgcagtctcaacattgtggttagcctgacctacatctcgtcatagctgctttcggaggtcaaggaggaaaagggcaggctggacagagcctgcgctgccaggaggctgagaacaggctcggaacaaggtcattggacaggtagacctggtgcatgtgcggctgtggggcttcggcaagacagtgaacttccccgagcctctgcttcctcagctgtaagacacaggtcaaacaagcggcccattcattgtagatgctaacgctctggcacattggcttgagcgatgtcaaacctggatacgctggtgcgtgcatatagttccatacctcacaaggctgacgagttcaagccttgccagtataatgagaccctgtttcaaaagaaaaaagaaatagtaatttcttgatttgttatttattgttgttcttaggtacatacatgtgtaagaagcttaaatttcaaaaggttttaaaagcacatcttgaagtccaaagcacaggacgtaaaatttctctaaagccacaagagtggcttgcggtggaccctcccctcggccccgccaccctttttctaaacagctgtaatactgaatggagactctaggtaaccgctttagttccaggaggccattgatccaacagattggagatctgattttaaattgtctgcctatgcatggaacaatgatgagacatagtttgttcctcaaggagaaaaaaaatgaaagaacagccagttggacagagtgcgggtgcttagtgcccaggtctcactctacagttaaggcacaggttttgttttatttttttaaaagtgtattttcaaatatttagtaattcttagtggtgtgtacacgtgcatgagaaagtgtgtgccacacgtgtgcaggtgcctacggaagccagaagagggggtcagagtccctggagctggagttaaaagtggttgtatgcctccatagtgtgtgagtgctgggacccaaacttgggtcctctctctgcaaaagcagtaagtgttcttaatcagtgagccaccatctctccagtcccaaaggtacagtgatgtgatatacatacatatgtgtgtgtgtgtgtgagtgtgtgcatgtgtgtgcgtgtatataagtgtatgtgagtgtgtgtgcgtgtgtgagtgtgtgtgtacccccccccccacacacacacactgtgcagaaagaaagagttgactgaactcactgatgctgtcatacccttgtttacagccattctctctcttctttaacaccaaactacagctacatcagaacaggccacatgtcatgtgtactttaaaaaactccattatccatttagaagggctacattgagaaaggcttcaccagatatttgcagctcatttaagaactagagtcgtttctgctgtcttatctacaccggggctctgcacaaacaaaagcagtgtctgctgccgtcatggcttttttgcacagtctgcagtgtatcactctgtctgagctagcgcctcttcataactatgctacctaggaacacctctgtcctttccactgcagagcaccctgagaccattggccacaggcattcagggcttgtgggttcatggtgcccgctgtctgcacactgcctcacacagagtcggccccagttgcgctcacattgtgtgtctgtctcccagggtcttggggacctgctccagcaggcgggatctaggaaccatcttggattcctctgtacttaggagggacctgctccagttctctatcactcatttaatctgtttctttctggcaaactattgtgctggacagtgaaagcatagcccatcctctcattggactcatggggagggtagagggggggcagatctgtttgatgcagatcctacaggtgcaggatccagtgttgaactagatggctgagggccctgatctctggaaacttctgtctggtatggatagacaataaacaacccagactatcatgtcagacagcgttgtgaagacaagaaccatgggtgatacaatagaggtggtgggcacaaaaacagaaaaggcctttccataaaaggtggcatgagaaacctccagaggctggcaacagctaaccatggctgggcacagtacccagcagagaagaggcgctgaatgtccactcgtgctagttgaactccctccagaaccgggaggctcctgcctgatcccagcccctcttacgagcaagtggtcacctggatgctgatcgctcatctttgggagtagcaaaacccacttgtaagatgtcttctaggatcccaacagcgtggctctttctcttcctcagcaatgtctggttggcttgaggaagtgaggtgatggcatgtcagtttcaggagctcgggattttctgacagtcatccaagcgggctgttgcttccaggccagtgggtcttggtgccagccctgaatgtacatgggctcactaggtcttctagccatctgtgtggtgtgataaggtatctttgtgggagtagccctggggtttgagtggagagatacggtaactgtatccagaatctagccatgtcacctgaatatgacagaagtgtccagtgtggtgtgaacgtacaaattgtttctagactggacctggggaggcagttctggacactggaactccatccaagctttgttcttatcagatgatattaaacgatcccagaagctcccttgtggctcccataacccaggtgctactttaggaactgtggcccacgttagcctcaagtgttggcacagtatagttactatgctatccctgcctgtcagtggccttgtgtgaccttccccactgggctccttaggccatatgtggctagggcaagtagtgtcacatagggcttccttacccttttcttaagtgggtgcctcacaaactcagggacttgactgcttagtgctacccccatgctcagagctggtcacctctgcataacacagaggactgagatcttgcaccaccaggcagcatcagggttggaaggagcaattcttcagctctagagttacctttccatcccagccattaattccagagtgccccctgttcatacactgtccctggtacccaccagaaaggccacagtgtgacaagtcagaagcaagttgcctgtcagtaactgcaaggaatttggctctgcctccatgctggagtgagtgcaactgctctgttccgtcatcggcctcccttttgctgctttagctggttgacacagaaactggcctcggtgtctggtacagctgagccatacggagtccagtgcccattgcttcccagtgtcctgcactctacactgaagaacttcactttcacagccattggtaaaggcaagagagtccagcaagcagaaatctactcattcattatgctttcctgtcagataagcctcatctcttcaagggctgggcaaagggggtgtgcttgatgcatggttgccctgagaaatagtctgcaaatagactgtctacaaaagcagtagtttccctcctggcatggctcgcttgagcatcccaaggaagcagtgagcgggagcccagtgggccaaggctgggacgtgaacctcatccctctagccaggtatgcacttgacacccttgtttgtttgtttgtttttgtttttagatgagatcccatgacctgtcctgtagctcaaggtggccttgaattcactatgtagccaaggctggccttgagcctctggtcctcctgattctgtgggcatgtgtaactgtgcatgactgttttgttttttcctttcctcaaagtgaggacaataataacttgcctcatggggttggtatgaagaccacaggagcccaagggtcaactaccacatctgctcgttggacaggagtggctgttgtcaccattttcatcacagttccatgatgcttcattgccttcctctgcatagagagtccctggagcctctgaaggctcaggcctgggcagaactcaggatggcaaatgcccaccttctcaggtgccctagtgacctgggctgtccactcactaaggcttcttcatctttggcctcctccaactgattaaaaagtccttcctgtaggaaaagacctgtcttcttagcacttaccctgagagtaaagcagagcccacagtatggtgaaatcaaccaatacttaaattatactactaagaataaaatattatggttccattagggagaaaagttatctggtagacaattatgtcttctgtgcctgccgcccattcatcttgctataactttaactgctgatgctataaatatcttaggaggttactggagatctgagggcatggagaaaggagctagcctgggactgagagagcaagggctcctgcctaactctgccattctttagctgcaggattctgaacatattattaatctaggcctcagttttcctatttacaaaatgggaatgagagtacttgccttctagaggagtgcatggcatagctccagagacctacatgcatttgataggcatcagctaaaggaatgaaagccatacttcccactgtatcccaaagaccagagacggcatcactccgagttctaaggagatcatgctcagctcacacataactgccaactaacacatgggtattgttcatggcaggcaggcatcctgcagttgcatgaaggccaactgtggactataccctgggggaaagtctgccggctgaagcagttgctaactgttatggtgtcaggtgggtcagaacggcgctcatgcctggccgcgagcctcacgggaatctctccacccatccccatcttgcttattcacatggggcggagcgggaccaagcaggcacaagcacagcctcccgtgagactgtaggaaagtgttgcttttcttaggatagatatgaggtaggaagaaagtgcaggagggcccaactggagcccatcagcctccaggctcaaagaggtaggcgtgtcatttgtcagtgtatacctgaggcccagagaggtgaggctcttttctcaagatctctgtgagctagatggtgcctgggcagcaaccaggcctgccttcttcctggcgctctcccagctggttctctgccactctgcaaatcgagaacacactctcatactcatctctccccctggttccatcctgtctcctctgcctgagtgacttgtcacggctttcccctggcttccagtgactaggcacattcctcaggcccgggcggtgctttctcttcccaggccggcaacttcccacacttgctaatcccacccaggctgtaagtggctgaggagccctagcacacagagcaagtgagctgggcctagttctcgattgagtcttagggcctttgacacggtcccaaacctctctgaacctgagtgccagtcaacaaagcaaagcagagatctctcaggcttgtggccactgcgagagtgcagcctcaggctctcctagtgtcctttcagcagacccctccttcccagttctccctatagtcctaccaggatgactgagcagaggccattgtttctgtcaataagggagaccagctctgagggaaaggagatggctgtatggcagatccaggccaagacacagcaggtcgaatctgactttccctacttccgccccccaccccccaccccccgcctttgtcctccatggaagtcccaggctcatgggtgctggggacttgagtgtggagacagctactgcccatctgcctttatccatcttagaggcttgcctttggctatgcccctgctgtgttcccctgttcaagagtttcagacagatgttcctagagcttctgagaccgtgtctttgtttcctcagcaagctgaggtgtcccagtgcgactcgaaagggggctcttaggtggagggggtgtgccattttgtcctgcagaggcaaacaggttttcagcatcccggggagacctgagactagagaactgtggggtgggggtgggggtgggggtggccaggcctcagcctgctgctgccatagggcgtgttccaagggcatttcctgtcgatgctttcctcacccgcacccacttcctctcccctttttgtctctcctctgggccccctgctggctgctagctgggcgtgctgtcttgatgttctaggctggctctaggattggccctatgtggtgctgccagcaaagctcctactgagtgtctctctagtgacacctggtgatgttatctgcttattttaggcagctctctctttctcatccttctaggtagatgctgggatgaccttaagatgaacaggacccctgtggtgaccttggccttctctgctacttccttcctcactatggtactggggatagattcttccctcagagcctcagcaccacattcacattgtgacttcgtttctcttggttgttaggaggaccaaattgtaccctgtggaagtaggtctgccacccacacagagcctctcagcagagagtcctgtccttccttcatcctggcctggccattaagtgtggagcttccagttgtgctggtcaacatcctttgccctgactaattcctaaagcagtgacgtagtcctgatctgggcccccagtgtcaggtgctgggtcagccaaaatgggctctgtgcttggtgatggccctctgtcattcatgaccccagggctgattccaagggtgcctgagcactgggatcttgtgaatggagcctcactttagacccagagagaatggcatttgggtgtctaacctcaagtaatccagccaatcatgccacagccacaggcttaacattcagagagagaaggcagagatgggaaggagcagcagagagcagctttgacgtccatgctggacacagggccaccatgctcagcgattatgtcattgtataccttgtaatgtctttagccactggcctcacagcccagggctggaagctcagaacaacatggagacacaagatgctggcacaaccatgcagagcccgctcagggacgggtggctctcagaaagcagctccactggctcgcatgccttaggattgtcagcttctcttcccctcttcctccaggcgtcggaggagacacctgaggaagacggatgagtgcagggtggagccagagcagatatagctttggtaccataaagaaagcattctgtaaggcacttgaataccaacaaaaaagatacttgcccttcccagcctgatgggcgatagagtagagtgaccccagctttcatgctaatggcattggggcctgtgctcagagcttttctgttctgaccgcctagatgcttagaagtgtcacagatgggggtctgtgacaggtaatgctgatttggaagcagtattgcctagattgagaaccactgctgagtgaaagacctttggaggcagtggccattgagggcctccccgctccctgttacgggaaagcagatccttctgagccaggcagtggcaaaggagaggcacctgcgtggtgcccactcagccctgaaaacacaggcttgctgcagaggtttctgtcccttggatgtttctgtccctcgtggtggcctcacagtccctactgttttcatctctgagtccaaggtcctaagtccaaagtcccagggtccaagaaagatagtgagtggcattgtccagtggcctttcctcccactcccgttggctcctggataatgccagtgtctcccctgagcccttgcaatgaggtcaggcaagcaggcattcttgccagacagccgccagcagtgtgcggccgtgcttttcataagaaaaggcaccctagccccactggcagagcacaacgccatcttgtccattaatcaggacttcaggattctcaaagcaatctgagcaactccctggctgaagccctactcaattgctgtcacctctctgtctgcagcactggctgttatccactgccccacccccacatcaggaagacttctggagagcagagccaccccaaaaccttagagcctgttttaggggctaagactttgcaggtctcagcaagaacggaggaagtgtcagaattaatttttattattgctttcattttccattaattttttttccaaatataagaagaatctgggtcagtaagttcctttgttccttgagaaagatgctgtgagcacaaataggagatcagagcacatggtggaggtgatgatgccaatgcttgtcctgtaccggaggcctccaaggaaagtcctgagctaccccagctgcttccttccacactgaagccttaggctcgctccccacacaggccacaggtaccctggactacttactcaaaggctgaacctggtcactgcttggttagctttcccctnnnnnnnnnnnnnnnnnnnnatggccactgttggtattgttgcccatgggtctcctccttgtatgtggtactcctgtggctccattccatagcattccccctcagggcgctagtgagtttacagtaccctttatctacctgaaaatggataggtgttctggaaagctgggtctcgtctcagctggactagaagaggctctggctgggaaagcctcttacatggcccttctgtctccctcccccacctttccacaccgtacccctaccttcagagcccacctactaacctctgggaaccagagccctgagcccctccagtacaccagggaggtccctactgggcctcctctgtggcagaaaccttggagccattcctgatgcattcagcaactcggataccctgctaagttgcagaaggctgctgaatgccaggcaggtcagctggaattaacgtgtgctttgctgaaagagcagagttgccacccacatctccatccatgtctgggctaggaactgtcctggaattctaaagggagaaaggaggaaaggccagtgagcacccgctcccgctagccccaatccctgggggctttcattgcccttcaaagactcaaagttccttagtttgctgacagagcacctgcagggctgtgttactgctgttgctaggttaatggccactatcaccgaagggagttgtaaccatgctaatccagccagctggcaagcccacatttcttaccagtgtccagttgtagaaataggctcaaggtgctaagttaaccagggtagggatttgcagctggaaaatatccaggccctgttcctttctttgctcaactataatttactgtagtaaccactaccgatgagccatctgactgtctaccagggggatgggagcaggcagtagatagaagtccctgagtcatgtcatccctgcagccatgtaagactaacccattcctcctctcatctcactctggccaagtttggaagcttctggcacagcagacagccctagagtgtttcagcgattcaagagaccaggtttttctagcattagatgtccaggtggtaccttgccctctccatgtgtcctgtgcctctgtggaatgggtggagtttgaatggcctatcctcctagtataacacagtggtacccctatctttcaagctgccagggaggaaccatggctctaattggcttagttcagtgatggaggctcagaagctctgggaggtgaatggacagcttcgcctttggaacctgctgccagtggacacaatgtagccgtaggaatgaaaacaagaaagagaaaggcccacaggctctgggtttttaattggcaccattcttccactggccctccagccctctcagggctgtttgggcggctgggcctgggcggggaaagatggagcctttcacagtttgagactggtttaagtggacctgtaaggattcctgcaggcatgctgaaagagtggggcgcagtcatcgttggagcagccctgggaacttggtcagccacctgcaagtagtgaatagccagagctgctgaagctgcctggacttcagtggccccttggccctgccttgctgcaaagaatagagttttgtaaagctgcaattaatgtttctccttccgtccattggaagttgctttcctgcttttatccaggccagtgggctccttgcttctcctttagcctgagtgccgccacctttgatggtgtctctcaagacatgcattcttgtcggccactgagggaggggccgtcctatcttttgtgtatctttttctctccctcactttctaataccttctcaagctagcagtgagaaaatagggctgtgtaagcgattctggtgggacgggcccagaagtcccttcagaactgccagtttttcttgcttctgtgaaaatgaagtctcacttagaggggacagtggtgaaaattagcagagaaaggacagagtaagcaggaagtggagaagcagccagcctggatgccagagatgagtgccagttttaagagattcctctagaagcaacctagcctgccagataattacagggaaattcatggctcctacacagcgagaaccaagacagagaaggcaactggtctccctgacgttaccatctttgtaggctgtgagcatcagttattagtgtatccttgtctctagagggcactggcctgcggtggtccagtttgggtgaacattgctaccaaaggatgttagccagtctggctgtggttgtggctgagcacaaagactgtgaattagcttgaacacccgtctgtcaggccaccattccagacaggctgtcctgtaggaaagaggtcttagccttgtgaaggtagcatctgggccatgccaggctgcccatctgttgaaactctgcccccactaccctacccttgcagccggccgttttagaaaatgacaatagccagagaagatgttggcttgagaatgaggctgtccccatggactcgtccccacgcatggcccagctttactgcacagatgtctgtggcagccacgcctggcagggcaggattctctagggtcttctaaatgcccagggatgtaggtgctgtgtttttagatcctgccaaacttttaaacagaaataataaataaataaacctatcaggaaatgcacagttgtattgaggtgtgtccctgggaaactcaaagcaacagagacccgcactggccatcccttccagagctcacagtggctcgtgcaaatgggggcacatcgagaccttgagcttggagcttgcacatgctctgctcatccccaaggttggcagcaccattcccttcatgtctctatgagccactcagatggagttgtaaagacttctcctgagtctgtgaggaacatggaccaggttggaccaggcttcaccactaaggtaaggaccctcctcattaacagtctcttgaggttctccttacacctgtcctcctgtccagagtctccaccttttgctgggatctgcccagggtccggcctgctataagtagacagtatggaaccccacactgcaaaccctgtccagagtgcccgggagcatggcacctcgctccttctcaacatcagatctggttggagaaatggaattgtttttatttaaaatgtgagaggacaggccatccccagcaggtacctagagggcaagagtccacactgtctgtttctgcaggatcccaaagccaagcaagtgttttatttaccaccaggtaaagtctcaagagaagcagctccctcacaggtctttccaggctcagagatcatcagagagccccatactctgtccctgccactcacctctggctctgtgggtggaaccagctgagcccagagaagcagaatgtgctcagggttgtctgccacacctctgcccatatgccacacccccagccatttgctctgcctgggcatgctgggacatgccggccaagcccagctggatgctgccctgggcatgcctcataggactccagtggtcagtgagagccagggtagcccttcctttccacagcatgccaaaggttctcccctggtgatttgggagtggaccctcattctgcttttcttggggctgctgcagctgggccctgtcaaatgttatttaaacccttctgaaacagaggttgtgcctgggctcatctgagcttggatacaagccccttaatatacagttttgtttccccattttacagattgcacagagaaactcagcttgtataaagaggtaccaaccgtaaggctagagacaggatgtccccaatgtctgcttcccttccctcctggggcctcatacgtgttaggcaagggctcgccactgaacttgaccccagctcctggtccatctcttttaacttctcattgatttcacccacccatccatctccactaggattctgcagcctgcccaggtgttggagctccagcatgggggacatgaggtaccccctgctgggcagagagcctccaggaagacttgggtagacattttagccagcctatgaaacatggtgaatttccaaagtcagagaggtttatgaacacggtgtgtgtggagggggtgatttttccctgaggaggtcatactggggaggaagggagtgcagcacgcctggggaaggaagcttgagggattttagggcacagctaagaggctgccaggcctcacagtatctagcgggcctatcctttagccttggagtgagacattcacctttctgtttggaggctcggggagaaaggtgctaaagacacactgaactaagaggaccatgtgacatcttcagagataaacctactgggtctggactgtgagatgaggtctggcctgaagatgcctgttgggagccactgccccatccctacaagtttgttgtggatttgatgccaggcctcaagtggcattacagttggtgtctatattccagtctgtccagacagggtagaacgccctgtcctgtaggtcatgtccctgtagtctcaggcttatgatgtttctctccagaaaattgcctgccttttctttaggaatgagagtttcccctccccacttgagtctggcacttttaacttgctctctgcatcttatctgaaggggcagagatgtgacaggtggagctgaggtctgttgccacacacattgtacacaaccaccccaagtgtgtctttcacatttgtgctgaagtgttccttcaggaccctgtaataagccaggagacttcttcttgcccgctctggagatctgagtgagacaggtactgtctcatgcatctaaaaagccacactcttcctggaacagggaaccccattctctccctgcaagcaaatgtggcaagaactttggaacctcgtagcagcaatgcccagcagagtgcctctgatcctgtgttctgtaaaagggcccagtgactgtgtgcaaaggccttgggcctcaccgtaaacaggcaagtgtccacacaagtgtggcacctggctcttgtgcctttctcttgtttgctcatcccaactcgatttaattggccatattaggtaacaaaagctgggcctagtaggtttggtttctgttgttttaccaatagagaacatggaaggaaaagagatgagctttgaaggaaacgcaccaaaatgctttaatacggagatggggtgaagacttctaaaaaaaaaaacacaagttgaccaaaggtttttgtccttcatccctaacttgtggtgttttctcctccagaaggaattcgtaacaaatagctatacagttacatttataataactatataacatatataataactatacagttacatttataataactacataacatatataataactgtacagttacatttttggaaagcacatcagagtttgaaaattaagagtgggtacaaagaagccctcagattgtccaagtgtcagtgttctatcactgtggcaaaagtaccagagatgaacaattgaaagggaggggcggtctatcagcgggtggtggctcgggtctgagtggcagcacagactgccgagggcagagtacgtggcagaaggggtctgtctagctcacagcaactgggaagagaaaaggcggaataaggtcccagttttcccttcaagggcacgacacccccagggcctagcttgctaacacgaggccccaccctgtagcaggtttgtccaactcttcccctctagctgtgaatacagcgagatgcaaaaaatccaaagctttatgagacatttctatggatactttgtttacttttgggtaacttacttgtgcatttctcacacttggtagatgacagtgttgtatcacaatgtcaaaaagttagacacacccccaaagttccagcatctcccaatagtgccataggctggggactgagccctcaacatgcggaccattgggagacattcggtatccaaattacatcatgcccctgtgtacgaggccacacagagattgccagtcatcattctccattcttataaggaaggattcaaactgtatatccccagttgtacctatatattttatgtgtatttggtgtttggtctgcatgtatgtccatgcatcatgtgcatgcctggtgcccaaggagactagaagagggtgtcatacccccctggagttagaaacagttgtgagccattgtgtgtgctgggaattgaaccctggttctctgggagaacagctagtgctttttttttttaacagctgatccacttctgtagcccagcaccccaccggtgcttttgtggccggcgtgagctgcctcctccacattcccatctagacgcagactattaattttgtgggccacctgctttacccggccacactcatggccccaagctgtttccaggcttcttcagctgtgttcttcaacaccagtgactcctttgggatgtggcagcttatcttccataggatacattctctccaataggactgctgggtcacaagtggtttgtgcctgtggctttagagaatgttgcaaggcctgtgtcacaagagtagtgattggccacatttacatgatctgctttctgccctctcctgctcaaacgttagttttttgccagcagaaaagtaggtaagcagctgtttttctttgctccctgtcttcctcctccccttcccccttttgcggcaaggtcttgctatgtagttctggttgacctaggacctaccatgtagagcaggccgggacctcaaatgtacacgaattctcctgcccctgtctcccacagcacagctcactgcgttagcttagcttgcatttccagaccagtcgagtgtcttttcgcagactatttgtgtggacttgtctgtgttcttttcactgccctttttaaaaacagctgttggtatttctcttcccaactgaacattagggagattaacttcggttgcggtttgagttacaaatatttatttgtaatttggtctttgttttctgactctctggcattcttgtacttaactgggatataattcatataccacgctactcatacatttgccatgtacaatgggtggtttgcagcttattcacagagctccattaccacatggattttaaaacactgttgcttgcttgcttgcttgcttgctttctttctttccttctttctttctttttttaaaaaagatttatttattgttatatgtagataaactgtagctgtcttcagacaccccagaagaggtcatcagatctcattatggatggttgtgagccaccatgtggttgctgggatttgaactcaggaccttcggaagagcagtcaatgctcttaaccactgagtcatctctccagccccacactttgttgcttcttaaagcagaggtgtgcctactggttattattccccagatttgccaaatactgatctgtgttctgcctgcagacttatttatccttgacattctctgtacacagaaccacacagcacacatcctttagtgcctgccttctctctctctnnnnnnnnnnnnnnnnnnnnnnnnnnnnnnnnnnnnnnnnnnnnnnnnnnnnnnnnnnnnnnnnnnnnnnnnnnnnnnnnnnnnnnctttctctctctcccccccctctttctcctctccctctatctctccttcccttcttcttcttccctccctccctccctcctctctcacacactcacacacactcacactcagacactcacattcactcctaggcctgttccagaagttgtgagatctgattgcacatccattaggtgtgaaaattgggacaagtctcttcctccttcagccttgattggcccatctgtagggtaagatggttgccactggctgagactcactcacttttccagtatggattcctattccctgagttacattccatggctcacaatatctagaatggcagcaatcagctctagagatagagctgagaagaccctggtgtgcaacagtcctgcctcctgggtccagttgcaatctcttagaatacacagcttctaagcagctgcagacagccagggcccgtcaccctctctgagggccaggacccacctgtgtgccccagagctgctgtggaggctgctccaggactctgctggccaggactgccctgaaggctgtgggctaagacggcattggcttgggcccctagccagatccctgtgtgctttggaaagatcccttaacttctgttaagcaaagaatcctcttcacagcaaactgagtgaagtggtttcacaaactccttcctgagtttgcactgagtggaatgttcactgaagaaacaaaatgtttgttttctaattgtgagggcttagggaggcccttgaagttggcttccacaccctctgtgttcaggcatgccacctgccatcctggggcctagagcaggaacagaaaccttcatgtgtcctgttgggtggcagcagagaggagacactggctaacggccattcagaaaatctgcagggttctagacctccaagatcttttcttacccactctaggtcggggcccttcagtaacactgtgaggcagtccgtgaactaggtggtggggcttgaccagggttccctgtatggttgtggggcatgatcaggattccctgtatggttgtggggcatgatcagggttccctgtatggttgtgggcatgaccagggttccctgtatggttgtggggcatgaccaggattccctgtatggttgtgggcatgaccagggttctttgtatggttggcagggaacagagtaaaaataggaacgtgaggcctgctccaaaacgaggcgtgcaaggttgagtatactagggatcgagcatgccagtgaaagaagggaggtaggagcttgggtagccagaacagttggcaggagagggcgttcacatgactgcacggtccagagcacatgttgggagcaatgagttgactggagtagggccaggctctggcctgtctggaaggtttgagccagtgagcatcgctctagccaatccttaagaactctgagtcacgtggttagcttgggcgtttcctgttacaaaacagccccgccctgacagcgctctatttgatgggtgatatcagggactctgttgggcctttcttttactcctcaggggtctggtcctgctatctctggctaaggccgctggcccttggtctgtttttcatgttcctaggttcttagggggctatgcctgttccaaaaatgacaagctctatattaggtcatcttcttcaagtccattctaccatctggtcctggagcctccagcattacccaagactagagcacaacatgtagaatataacaggaaggtggtccccagaggtacagcaagggagaaccagaacagagaaagccaaggtccagagtgactgtgggtaggaaggtttttcctgaagggggcttctcaaagctttgtggtgcttttcctgtggtggctctgagaatggcaggatttagcagccatataacatccctgtggctttctggcctagaggcaactcccagagttttgaagtacatcatgtctcctggtccctggtcccctgttagtaagaaaggacaaatgagtgcctgagctgagataggccctgtagtctgttgctcattggtataggtcctagtggggtagccacaatctcccagcatgaagcaggtgcttgcagggcatttgaagggacattgggacgcagtggcccacaaaggaaggcaggaaccttcccagttacagggctggcttccacacagcaggtatttaccacccccattagtctgttggcttctagagcctgtgatctgggaagagtccggagtctttggtgacaagtcagcggtgctctcagagtcccttctgtcctcagtcctggcatcctggctcccacccagttttccagccaacatttcctacattcctgagggtcaggaggccatccaggctttaaaaggcccagaggtgagcactacacagaagtgggttgggtgtggtgctgctgaccctgcttaaaagagtatgtgtcaaaagccaagtctggtggcctctaaccccagcactcaggcagcagagcaggtggatctatgtgagttttaggctagccagagttacacagtgagattctgtctcaaaataaataaataaacaaatcaaaacaaaatctaggaaactacatgctttgtcagccccagcacaaaggagacatagaacacttgtctcgtggcctattgttttgagatgcttgcacagttctttgtttgttttgttttttttttgttttttcgagacagggtttctctgtatagccctggctgtcctggaactcactttgtagaccaggctggcctcaaactcagaaatccacctgtttctgcctcccaagtgctgggattaaaggcgtgcgccaccaccgcccggccgcttgcacagttctgttgtccaagtgtgtgctgggtaggaaatggctccactcaggcagatccaagggcccagcctcatgcaaggccagctggagccaggctacccacctggccgcacagactggctttgtgatggtggcatcttaaggaagacgtgaggtggccctaagagctagaatatggggactaaaatgtctccttttttaaatctttatttatgtgtttgtgcatgtacaggtacacatgtgtgatcatattcaggtgtgtgtgtgtgtgtgtgtgtgtgtgtgtgtgtatacatgtggaagccagagttagccttgggtggtgtttctcagttcccgtcccatttattcatttattcaattcattctcttctcatgggtatttatgcatgctttcatgaatttgtatgcaccccatgtgtgcagcagcctgtgggggcctgaaaaggggcatcagacccccctagagctggaattacaggtggttttacgaactgacatgtgggtgcttgggattacacccagcatcctgcaagagcagcagtgccgctgagccgtctccccagccccccagacccccaccctggtttttttttttttttaagtcagggcctctctctggtttggaccttaggtcatgcttgctagccagcaggccccaaggatctgtgtctccttggtccctagctctgggattacaagcacgcagcaccacacctggctcttaaaaacaaaacaaagtcaaaagcacagggactgtgaagatccagctcaggcccttgtgcttacgtggcaagcattttagtgacagggctgtctcccagccccttaacattgttcttatttgttcattaaaaaatggagggggtggcattaaaaatcgaggcaagcatggcagtcttgaagagtggtggcggcaggggtgggatgggagggactgggtactttttgtccaagggaaagcaagcttgcgcccggtgaacgcagcctgttactctcagacgtcctcatgtagcatctgtgtataggacacactggctgctcagaggctggtgtctccggcagccaggacttcctggaagactcaaggcagctagtgcgaccactggactctagacaggcagggcccagcagcagcatcggctcagggcctgaggaacagaggcactgggaagcaaatacgtgacagacctggtggtcacatgtgtcccatcttgagtaccatgtttcagttccaagaaacaaagcttgagttggggattaagcaggtggttggtggagggaggcttttgaagaaaccaggtagagggcagggaagcctcacaggacggggaaagaccgtgtagagaagcaacacaggagctgggcctctgcctctggctcaggtagcatggctagcacttgagatggcattcccctggttgcaggataatacttcttccacctctgacagtccatcttgagctgggattgcctctatgagaaagctgtcctccacgcttcttggcccccagctattctaaaaaggacagctgtaagcaggtagcagccaagcaagcaggtgcttttgtgggccaagggaactaggtaagacatcagcagacacccccacccccagtctgcctcgttgcctttgcattccttaaagtaacccattgaaatagctggacgaagatctgagcagtgcacttcccaggtgagggcaacagagaagcccagaccctgtggctgtagaatctgggtggcctgtactcctcctctgaggcctccaacagggtgagaaggatgctgggccatctgttcctaggcatacacccccagcccacacacaccagctggtctgtctgcgtccccagatgcccacgtctaagtatgagggacagggcttataagcttggggcccttggcacccaggcagtattccctagggggcgcgggggagctttgctgtcacctgctctgctcaggccttccgtgtcactgctgaggaaacagacggttgagtacctcagaagacctttctgggaccccatcaccatgcttgacgtgctggcccacagcacctgcggcagagaacaggctgatcccagcacagggccctgcagggcagtcacccagtccaggcagcagggccgagggtatgttggtttgatgtgtttccctcgggggattgggcttcagcttatgccaggaaagcaaggaccccgggagcaagccacctttatctctgctcagcccagagcctcctacccagaagtaagatgttgcagtaagtctgtgtacagaaaggccctgtggctgggggaaggaagatatatcagtgttttccagcaagcccaagaaggctggggctgaggctgagctagagcctctgctgtgactggctagagctagagtcggcttggctttatagaaaagtgccctgggaacagctttgttctataattcctcttgtggactctaagagtgggctcagtgtctctggtctttagctcagggccgtaaggacagtttccactgagcctgcaggccttcttggtgggcctcaagaacaaaagttattaggtgaggcaaagtaagccctagagtagcaatttcaacttggaatgatatgttcatgtggccctttgaatcttaccactctgccttctcccagacctttgagggtacacaggcctcctcacgcatgggaacagcaggagctgctaggagaggggaggcaagcagtgctgaagatgtggtgggcctgagcatgggtgaactccatgtgtgactgcccgagtgtcttacccaccaatgggctgagattctggacagcaggctcactgccccactgtggccgcaggcacagtgtcccctgcgggtgggtcttgccactggattatgtggtggttctcatttttcactttggctaaatgactgaattctgagtcatcaaagttttccaaatgacactggctttgcaggcagaggacagataaatgactctgaggactactgggggttttctgtggtagtctgtggtttgcctggaacaaaatgcatcactcaggcctcatagcttcccaccctgctatgaagaaagaaaaatctgttattgtagactgttgggggaggcatgaccccaagatgctcttggccacccatatttaacagacagaccaacgttcaggggttgagatagcttgcctgaagccatgatgccatatgaggccgaccctacttctgaaatggccaagtgaccttggtagtttttaggtccagcaaatgggtccctggtactctaccatgggctatgtcacatgcttaacataactgctagtgttttcactgtaacaggagacccctacagccagtaacttagggacaacagagtggcctctggttctagaggccaggaaggtcatcgtccctgcactaaaggggccatgcctgctagggattgcttcttcacagatggcaccctcttcttgtgattcttaacatgacaaagggggagatgtggtctctcatccttacagcgttaactctcaactcaccaggggctctaaccctgtgaccccagcacccaccagtgaccccacttcttgattctttaggcactgacatatgaatttggaacacacagtctggccacatatgctgttacattggtcacagaattgggacctattagctataccttagatcatctgctgggcaagatcaagatgagacaggatgattccagcaagataaggagagcacagccctagagcactagggtggggtatttcttttgggctctatccccaggccctgcccttgctcactttaccaagaacagtgaggccctgttctggcatctgacatctggcacagtgggtaggtgtggtgatcctcaggcactgctgccattacccagccagagcagtcagcgaggacttgaggctcgcaggtgtaagcattgctgtttacaattacacacctgttcaggcaaaaagatgcagtacttacttagccagggatgcaggagagggggttgggctctgtgagctcctgagtccttgactagtcttggcctcacccctaggcctcctctacccactcagcttgtcccaggaaagcattgccattattgatccatctttcttgtgccatgatgtctcactcagctcaggccagtagcctggaaggcagaagggacctctgaggtgtgcccagatactgctgtggcaatgaaggaatgcatcctgtgactatgggtttacactagacagcaaatcccagcatcagcaggtttacagctggctgggggtcttctggcctgaaacccagagctgagcccctcagcacctcagcctgttttttttttctcttttatttatttcttgatatttatttattaggcaaattgtggatgggtgtgtttgctgttgtgagcttgtggaagtctgagaacaacttttgggggggggggtcagttctctagggattgaactcaggtcgtcaggcatagtgccttgtctttgtccattgaaccaacttgttggcctctcctttctttgttaattgaaagagnnnnnnnnnnnnnnnnnnnntctcctttctttgttaattgaaagacccaagaaaagtgaaccaatcaggaagggtgtcttttgtggagtgtcaggaacagtgtgtgtgcctgtgacaggcacagccaccttcccctagagagagcacctttcatcttctgtctgttgagcctgttttaatagcctgtttgcagtggcagccagcagacatctttatttcaaagcgacacaaacactttggcctttgaaaggattggggcccttgggacaggtctgtgcctttcattggcaggtgagaggcagcaggtgctattaagttcctgtgcactggggaaaagccaaagcctctttccccggttgctacagggcctttgagggaagtcaggcgggccacgagtgccccttgctgcaacagcccctgtccacgtctgcttaggagacccacattcgaactgtgttgttgaatctctggtttggtggcaccacctgacactccggtcagtggcttaagacagtattgtcttcgatggttccttcagctatccctggtgcctcaccagggagaagctcttgtgcagccacacttcctgcggctgttactataacacctctttccgatgaggccactgaggcccccagcggctgagggctagaggcagtcgagcctgctcctcctgctgcagatcagtgtgggtcaaaagtaccgtcctctagataccagcttcttcagctccaggaggaacccagaactcaagaccagatccctgaatggttctgatagtactcaattaagacgtcagataaagatttcaaatgccccctccctgccccgccccgccccgccccatcccacctctttctggacagaggaagtgggtagggtaggggttatggccacagcatagcctggtgctgattccatctaacttggcccccttctcgtaagaaacatgatattgtgtcagtgagctcacggccaccctagtctgtgtctcttgtctgaaaggacatgtggaatctgggtcattcactagttttatttaatacagtgtggccatgggtattcatgtggggctggggatgtagttcaggtagaggataaagttagcacatggaaggctctggatgtccagcctccagtaccaccaagaaaaaagtcttgtatctgttcttcccacagaccttaaactgtcttctcagactcagtcaaaacctcagattaaaaaaacattcaggggctggtgagatggctcagtgggtaagagcacccaactgctcttccgaaggtccagagttcaaatcccagcaaccacatggtggctcacaaccatccgtaacaagatctgactccctcttctggtgtgtctgaagacagctacagtgtacttacatataataataaataaatctttaaaaaaaaaacattcaggaagaggctagagagaaaattcagtggttaagagcactaactactcttccagaggtcctgagttcaattccccgcaaccacatggtgtcttacaaccacctgtaatgggatctgatgccctcttctggtgtgttggaagacagccagtgtactcatacattaaataaattaattaattaatctttaaaaaaaaccactcagggaaaacattgtatcggcacataaagagcgaagggcacagtattagcagcctctgctgagcatctgcatcatagcaggtatagttctcagctgagggctgactgcacacatcacgttaggtaaggatgtgcgcactgaagagggagtgggtcctggctggacaagggacacctgggatgaaatagccttagatcagacatcttgttaccaggccacctattaagtctgaggtttgcccacctcaccgcagctgcccacaagctgggcctcatcacatttttgccttttatgtagtgactggccacaggttgtgttcagtggccagaggcacttcttcatgaaccatcctcagacttggtgatcttactacagcctggcagattaactaccagctaggctttgtgtggttatgtaggatgtgtggtctgaggttccaaagcgagtctggcctcttcactgaccactgtatctcttcctccacagaactgtcagaccttcagcagcctcagttgcctgaacatgggggtggacgaccacagctcccagagcccctttgccctcgtcagcagtacccgatcctggaccgcattgctctcagcctccagcccagggggcaggactcctgctgggaccccagttcctgagcctgttccccactcctttgatgaccagttcacctgccaggaggacctatcctgtgacgagtcagatggctgcagtctagatgaggattgctgcaggaagggggatccggccacatcctggcgggaccggggagcctgcacgaacagcctctgctctttggatggcgagctggacattgagcagatagagaacaactgagggccctgacctggggaggaggcactcctctaggccttaggtcactctaagggggacctggctcctgggtctgacagaggctcctccaaaaaatggagcccacccattttcaaaggaaccagccatcaccctgtagtgcccaaatttgtgaaggcaacttggccacacctcacaggcgacagctggcctcccaccagttccatggaactactgtagcccaaaacaggttttcggtttggtatcctcctctttgttccttacggagtgctgggtagccaccattttccagtagggctgggccagctgcacccttcaggtaggatgccgggggcctgagcccccttatagccttgctcaggttccttctggggagttacccaaagcctcctttacttagtttactccgtgccttctctcccaggtctccctggcccaggcttgggaaggttcgggagacacctcttgtagtgacagcagaccgtgtggccttaatccatttggggcactggcagggattctgggataatccatgtcccatttttcgggatcaggggatagttaggaatgaccagaagccatccatattgggtaggcatttggtggttgtgttgactgaaaggtgggcccaccagctctcccatgtcaccaagaatcacccacacctctgccacctcaggggctgccttggcaaggctgacattggtagccttccttctgtccccagtccctgagagctgagctcagtgaattcagctgtgtatagagatgtcagtggcaagatgacctcttcatagtgtcctcaggatctacaaacaggtgcagaagtctcggccctgtgtacattcctgggtagagggatgtctgctggctgctttgcaggctagccactctgcaggctcctctctgtagcagtctatgttgggggcctgcaagcctccaccacattcctagcacattgttgcttgttcacagacactgctggctttaatgaaagcataccaccgttggcttcaagacaccccccacccccagtccactgatgtgagcctagccccaggctctcctctgcaggcccagccacagcatggcttgaatcacactcccccttgcagctcctcactcccagcataattcccagagggcatccgttccggcagctcccctcagtcctccctgcagacatgctacagggctctgcacgctgggactctggcttttagcaaacttggcatcttctgcagacaatagcaagtgggctggcttacacaagtggcttgttttcccataaggctaaaaataactggtgcattctcttgggtttgcggacatgtgatctaggcacatttgtagttgctctgctgtgcctaccctctgagatttcactgtctgctggctgagcccaaatggctgttacctttctcctaaagaaagaccttgatgggaaccttttgtttcaactttaatttgtccatacaccagaagaaccgaggctcaagttctgatgtataaggcaatgtttctctaaaaccagacccaaagtacaggaagccccgctcctataaccccaggttgggtagcctggtgggtccctgtggtggtggtcggggcccagctggccttgggggcactgagaaagcaaagtagaaagctggtggaggcatgacctacaagccctgcctggtggatcacagaggaaggtagttgagagggcgtgggatgcacaccccagtgccctggttcccagaaagcccacagtgagggattctgttatctgaaagaactttatggtccctaaagctattcccactcccccaccccccaggaaaggagaggctgggctctgtcccctggtctgcttcacacaggctgttaaggccaaagcacagaacagttgccagctgcctctcctgaggactgggacctgagctcctggtggcaggtgtgtgtcttaaggctgatgtgtggccggcttgtccgtagactagctctcttgagcctgctggcggaaggacaaacaggaacttgctgagtgacagcttcatctttgcttcctgcctctaggagactgttccctgggcggcagtactccaaacccggggtgggggttggccctttgcagtttcctcaggcttttcttgatgtccctgtcccactaaggcctcagtccaagcacccagcaaaagcagccagaaaagatggtggtagcttttctgcctagtgtgttcatttgctttctgatgttcttttcatcaagtaaagcaggttttgtctagaaggtttccagtcagctttcagcagttgtgtgacccagacagacccattcatccaccccattcactggcccccagacctctggtcttggatctcctggaagaaggttcacctgggaggtccactctgtctcctgtgtgcgtggcagcacaggcagcaggcagactggctcacccgagtgccacaccccagagaagctgagggtgggcttcaccactcacctgcctaggcagcctccaccaaagccgactgggcctcttagcacgtgacatcccgttcactccagaagccactgaaccgacagagttgccctaagccgggtacctgacctgagttcagggtagcagcctagacagtttacatgactgcccactcctgccttactcctgggtggtgaaggtagaagctggccagcaccacgggctcccttcatgtaggtccatggaacttgttctgcccacacatgcagatgtgtattctcagaaagccttactttaaaaaaaaaatttttttttgtagcaggaaagttttctaaatttgtatgcagaaagttaaataaaatgaaggcccacattaaacaggacatgctcactcccccagtttctagatgggtctcctatgcagaccaatggccatattttattatgggttcatttagtgttcacagcagttagaactcacccctggatcctgcaacccatttccactgatgtggttaaaattacttgaatgatggccacttaaaacgtaagccaggggccagggctcagggacgctccgcccatacaacccatgatgctgccccttgccatgcccatgctgctggtcccacccctgcccctggtgccaggcctctgaaggaggcagagaaagatactctagaattgcagactgatggagctcctttaggctagataggatagcctgacgtagcatagtctcattggcaaatgaactgcatcgtcagtgtttgggggcacccaggggtcagggacagatgagcccacaggccgtgctagggccacgtgtgccgtcccagccaggcagcagcagcagcagcagcagcagcagcggtactgtttgaggcagtgtggtgaatggcgtggtgagccagaacccatcagggctgcagcctgtaggctgcccatgctgggtctgctcgttagcaccacgcaccatcgcctgcctccccccctgacaggccgtgactgtcttgcactacagccactctagtctcaggaatttgcttgttccttttactgtgtaaataaagcttcctggtccaacacccggctgcctgcgcatggctgtgtgctttttgttgggggcagtgaaccagcagctctcctgtcagctctggactgggagaactgcgggacggacttctgtccccatgcctcagagagaaggcgaaatgctgggtggctgtgggagtaactgctgcccatagccacagccgccatcgcagggagccgcagaggagccagagacattggcatgggggggggggggcatggtgtgctgctacttccaagggagcaggagaggaagctgccctggctgagaggcaggccactaaagagaccctggaggccgtagagctgggctgtcagctcagggcctcgcccccgcggagggcagcgcagttcagagctctgcttcttgggctgtggagatactagaacacacaattcacccctgggatgggcacacaatccagtgcttaccctccaaaccagacacctgagtaactacagctcaggagagcactgtgtctgcagtcctgaggaccccagcagagaggtacacttaatgtctgtcacccagtgttggtccctgtaactgaccatggaatgttctcccagagcctctgctatggccagaccatcatagtctggaggtgacatcctggaccactcttctgttttgctgctttggcaacagatcccttgtcaaactatatgtgagtgtgtatcttaagaggcggtggacagagagatggctccgtggttaaccagaggacccagagtcaatcctcagcgcccatacaggagccataatcatctggattatatatatagttccaggggatacagtggcagtgtacatggcatagggacatgcaggcagaacatccataaactacatacatacatacatacatacatacatacacacacacatatgaaagaaaaaagaagtgttccagagtggtggcacatatctgtaaccctagtcagcactctggaggctgaagcaagaggattgcgtatttaaggtcagcttgggctaaatatcaggatcctgtctcagaactccccccacaaagccaccctttgtggttgggggtgggcgtagcttggcaggtaaaggccaccacatacacactggcacacacccacacaccatatacacagttaaaatcagggcgtgagagcaaggtcccaggctggccattcagtcttcctaggacaccagccttctgcctttcatatacggtaagtagttcacaatagcaggacagagggcaggaaggccacaagcacagtcctgctccttagattcacaatggccttgaatgacccaactgcccccctaacctgcacctcctactctccagtggtaccagcctcgttctagccctgccccagctcaagttgacaacatgcacaggactctgtcctgatgcctccccacactgctgtctcctgcaccaaatatgaggtcttctgaaaataggatcctgttcgcagccaggcttgggctcactcgatgccctgttgtctgacagcagtaggcctcagcgttctgcagtccccaagcccggctggttcaggggtccacccatctagggatgttcccaatcactaagtaggccccctgtctatacacggaatggtgggccaacgggcttctgggagagcagctctttcccaaaatgtgggtagggaaaagtccctccccacaaaatgcccaacctgggcagtgaccttcaagtggctactgttttttgttttttgtttttttaactttttggttgtatttcctacgtaataatgctcctacaaccccaaaacttggtgcaaaatgctcagtctgcctattatccatggaaaagctggtgtgataatgataatcacactggcttgtaaggtgggtccctgagcaccctgtagactcagcacatggttgggtcttcccattttaaagagatctgcaggaggctttcttcctgcctgttccacctgctaaggatgtaagagtcagaggcagatgagtcccttgtggctgactgctaggtagctgaagatcaagagaaggggaggctgtgctgctgggtagtgctgccaccctgagaaacatcaaggcaagagggtagtcctctaggggagtaggaatggatcctctcaggagggagaggacagctgagcactggatgattgcagccccgaggtcaccacaggccatcttcacgggattgcaggcaaggctggagggagcatcttagaatccgtcttcagaaagagcataagacacaggctagaccttgagtctccactctctcttttactcctagagactccttggaagagtcactttaaggaccatttctctgagttcactgtggctcagaggatagtgtggtctctgaccagatcatatagggcctgaagcccactccttggcagaaagagaaaacccagcttatctggagagaccagccaaggagagccagcttggtcactgctcaggaaaaaaaaggggggtgggggagagaaccccaatacccatggggcacactcatcagcaagcacagcccactgcaatggctccaagtggcctgagctactgggggaactctactggagctttctgtatatccagctaagaggcaaaaggccatccatcccttgaaggtgaatggcactggccagactggtggcccctcatcctgatgcagatactcagccaatttcttcctctgagagcctagaggtcaacctgcccactaaggccccactggtgtgttcaccgtgccagagggagtgtcgttgtctagggaaatctcagaggacctctgactcctttacgtgtgtacagttgcacagtgcgtgcacacatgcagaggccagatgtcaaactcagttttggtcttcagactacgtcgccctccccccggtgtgtgtgtgtgtgtgtctgtctgtctgcctgcctatgtctgtgtaagccagaggtcagtgtcagatgtctccctcaatctttctaccttacatttttatttttcactatatttatttatatgagcgtgtgcaagtctatgggccacagcctaggtatagaggtcaggaaacaatctacttgtaggagtcaattctctcctgtcatatgggtcccagggatcaaactcaggttgttaggcttggtggcaaatgcctattcactgagccatcttgcctgttattttttttttttttttttttttggaatagtattttactgagcctggagctcactgactgggccaggcatggctgtctatctagctcccaggatcctcctgtctgcacctgcttagcatgggattacaactgcacacttcggggctagagagatggctcagcagttaaaagtactagtaagctgcttttctagaggacacaggttcaattcctagcaccaacatgatagctcacaactgtaactctagtttcagagcttctgacacctttacacacacacacatgtaggcaaaaccccaatgaaaataaaaataaattattttttaaaagtacatactggtaacaccctctgttgttgtttggttctttggtcttcttggagggcttctcagtgtaggcttggctattctagaactcactctgtagaccaggctggcctcgaagtcacagagatctgcctgcttctgcctcccaagtgcttggtagtttgagggggtcaattccagcctcatgattaaatggtgtcttagtcagggtttctattcctgcacaaacatcatgactaagaagcaaattggggaggaaagggtttattcagcttatacttccacactgctgttcatcaccaagggaagtcaggactggaactcaagcaggtcaggaagcaggagctgatgcagaggccatggagagatgttctttactggcttgcttcccctggcttgctcagcttgctctcttagaacccaagactaccagcccagggatggtcccacccacaaggggcctttcccccttgatcactaattgagaaaatgccttacagctggatctcatggaggcatttcctcaactgaaactcctttctctgtgataactccagctttgtcaagttgacacaaaactagccagtacaaatggctaacaattaactgaccgaaaacatctagcagctacttccttttcagcaagctctatctcagctgacttctttacccactgggctaattccatagctgacttctttttatgagaagttgtctcccgaggagagtcatcagtggcatctgggtcagttagagaagaaacagaggtaacagctgtccatgcatccgattctgaagcctgacacgggctaagagggaatactgtcccagggccccttggagaaggccctttgtctggtcccaccgtggacagcatggctcaccactgctgggcctagtgggccactatggtcggagatggctgtgttgccctcaaagccgtaagttggagagttgatcccctgtgtggtggtgtcaggagctggtaggacatttaaactgtggaaagttcttagatcagctggggggatcaaaagggccatcctgtcttcctgtctcaccatggaagaccccatgaggtctgatgagagactttgggcaaggctggtactgtatccttcaagccttctcaactgagctatacaaaacccactcttctgtttcggtttttttttttctttcatttttttgttatcattttgtgacatttttgccatgtagctgaagctggcctggaatttgtgacaatcctgcttatgagccctacatgcaagaattacaagcatgcaactccaccacgcttagcctgcctctgctattttgttgtagtaatgaagactggggggctgatgagggctgagctgggaagggtgcttgcctttaccagcggagtctgattcccggaacctatggaaaggcagaggagagaagcgactccaataagctgttcttccggcctccataagtgtggagtacctatggcatgcttgtatacacacacacacacacacacacacacacaaatggaacttaaaatctttaaatatatgaataaatatgggaggcagtgctagtgtttgtcctggtctgtcttctcccattagaaagaaagaaattctccttgaccactatcagatgccatttcttgctcgtttccttgctctctctctttctctctttccagatggggtttctctgtgtagctctagctgtactggactcccttgtggaccaggctggctttgaactcacagagatccacctgcctcttccccttgagtgcaataccacgccctgccagtctatttcttttcttttctttctttctttttttttttaaagatttatttatttatttattatatgtaagtacactgtagctgtcctcagacactccagaagagggagtcagatctcgttaaggatggttgtgagccaacatgtggttgctgggatttgaactcctgaccttcagaagagcagtcgggtgctcttacccactgagccatctcaccagccccgccagtctatttcttaacttcttagaggtcagggcaggggagaagttcctctctactgttcagaggcgtcggaatctaagaccctgctgggggtctccattctcttactactctggacccttactaagaaaggctgagtcaaagtggggctgttggggtcaagtttattgagccattagcttgttctgtacactggagacaacatggttaagtctgtccatcccaactctaaggagctttctgtgccttcagtcttgactgtagaggtggacatttctctctgtgggagggtactcttcagtttcctgagagttatcccagcctgtttcctaagacaggggttggaggcagagtgctgatcagtcattctgactggggccagatagggctatgggtggtgggcaggctggctcagctctgtggtttctgtaggctcctctcattcagagagttcatcgaggaggcagtgcatctcatccaattggatggtcaattaaaggaccacgtgccaaaggtgactaaaggagttcagggacttagtttcagagggacctttcagcccaagggtttcattttctggaggcctgacaggtctctttcaccttcttggatgtcattaggggaaacatggcatgggccagggaggggaacaaacctctgcccagacgctagggagggaggaatgttgacaaggagtccgcagagggtgggtgaaggggatggctggctctggcccaggaacaagcaccctagaacttctagcatctgtcctggcaaagccttgggtggcctggtgccctggaagtatgtgggaagagggcacagtgatggagtatgggagcaggggtgcccttgtccactgtctctgaaggctggtcacttgtccgtgtacttcagcagcagatccacagcctccgcaaggttgtccacgtacccatctgcctgtacttctggatgatgctcatcaccaggcctggagggcaggaccacaggttagtctagcaggagatcagcccatttttgttgttactgtatactagagcccagataacattacaaagaaaaggtatttatgtagttccaactttagaaactgaaaaccctacattaggcctcccggagagcacaaggacactgcgtgctacgcaagagtgagccagggttcaggcttcaactttaggaactctctactgagccggttcctctgctcagtgtccacaagaaccacctgcaggctgagcgtggcggtgcactcgggaggcagaagcaggcagagctctgtgtgtctgaggtcagcctggtctagagggagttctaggacaatgtagatagagaaactctgtcttgagaagaaggagagcaggaggagaaagaagaggaagaggaggaggagggacaggaggaggatgaagaggagaaagaagaggaggaagaaaaggaccctccccaaacgccatgagaacagtaactcagtatccttcccctggatcccaaatcattcaagggctcagctactcccacatggtcaacctgggaaccaagcctctatcccaggaaccctcgggaaacaagccacactcaaatcttaacagccagtgaccctacaagagcctcctaa

SEQ ID NO: 429 - DNA, 2208 bp, Mus musculus
gtgaaacatggtttctctaatataactgggattgattattctccttctgcaattaagctttctgcaagtattttagagaaagaagggctatctaacattaacttgaaggtagaagactttttgaatccctctacaaagctttctggatttcatgtttgtgttgacaaagggacttacgatgccataagtcttaatcctgacaatgcaattgagaagaggaagcagtatgtgatgtctctctccagggtgttggaagtaaaaggcttttttctaataacctcatgtaattggaccaaggcagagttgctagatgcattcagtgaaggatttgaactttttgaagagctgccaacacccaagttcagctttggagaaaatgacagatggcgagacctggatagaaaatgccctcttcagattgaccagccaagcgccagcatctgggaatgtctgcctgaaaagtgtcaggatggctccctgtggcaccaggaggcagtgactgcctgtgcggtgaccagcctaatcaaagacctcaacataaatgaccacaatgggaacccctcagctcctcccagcaaacgccagtgccggtcactatccttctctgatgagatgtccagttgccggacgtcatggcggcccttggggtccaaagtctggactcccgtggagaagagacgatgctacagcggaggcagcgtccagcgctactccaatggcgtcagccccatgcagcggagctctagcttcagcctccctgccagggccaatgggctctcttcaccttgccaccagtcgagcctgcaccaccgctttggggggcaaccctgccaaggagcaccaggctcagccccctgtggacaggcgggtgatagctggagcccagacccacacccagtgggagggggccggctggacctgcagcggtccctctcttgctcgcatgagcagttttccttcccagaatactgtcccccctcagccaacagcacacctgcctcaacgccagagctggcaagacgctccagtgggcttgcccgcagccgctctcagccctgtgtccttaatgacaagaagatcggtgtgaaacggcggcgtccggatgaagtgcaggagcaaagaccttctctagaccttgccaagatggcacagaactgtcagaccttcagcagcctcagttgcctgaacatgggggtggacgaccacagctcccagagcccctttgccctcgtcagcagtacccgatcctggaccgcattgctctcagcctccagcccagggggcaggactcctgctgggaccccagttcctgagcctgttccccactcctttgatgaccagttcacctgccaggaggacctatcctgtgacgagtcagatggctgcagtctagatgaggattgctgcaggaagggggatccggccacatcctggcgggaccggggagcctgcacgaacagcctctgctctttggatggcgagctggacattgagcagatagagaacaactgagggccctgacctggggaggaggcactcctctaggccttaggtcactctaagggggacctggctcctgggtctgacagaggctcctccaaaaaatggagcccacccattttcaaaggaaccagccatcaccctgtagtgcccaaatttgtgaaggcaacttggccacacctcacaggcgacagctggcctcccaccagttccatggaactactgtagcccaaaacaggttttcggtttggtatcctcctctttgttccttacggagtgctgggtagccaccattttccagtagggctgggccagctgcacccttcaggtaggatgccgggggcctgagcccccttatagccttgctcaggttccttctggggagttacccaaagcctcctttacttagtttactccgtgccttctctcccaggtctccctggcccaggcttgggaaggttcgggagacacctcttgtagtgacagcagaccgtgtggccttaatccatttggggcactggcagggattctgggataatccatgtcccatttttcgggatcaggggatagttaggaatgaccagaagccatccatattgggtaggcatttggtggttgtgttgactgaaaggtgggcccaccagctctcccatgtcaccaagaatcacccacacctctgccacctcaggggctgccttggcaaggctg

SEQ ID NO: 430 - protein, 499 aa, Mus musculus
VKHGFSNITGIDYSPSAIKLSASIKEGLSNINLKVEDFLNPSTKLSGFHVCVDKGTYDAISLNPDNAIEKRKQYVMSLSRVLEVKGFFLITSCNWTKAELLDAFSEGFELFEELPTPKFSFGENDRWRDLDRKCPLQIDQPSASIWECLPEKCQDGSLWHQEAVTACAVTSLIKDLNINDHNGNPSAPPSKRQCRSLSFSDEMSSCRTSWRPLGSKVWTPVEKRRCGGSVQRYSNGVSPMQRSSSFSLPARANGLSSPCHQSSLHHRFGGQPCQGAPGSAPCGQAGDSWSPDPHPVGGGRLDLQRSLSCSHEQFSFPEYCPPSANSTPASTPELARRSSGLARSRSQPCVLNDKKIGVKRRRPDEVQEQRPSLDLAKMAQNCQTFSSLSCLNMGVDDHSSQSPFALVSSTRSWTALLSASSPGGRTPAGTPVPEPVPHSFDDQFTCQEDLSCDESDGCSLDEDCCRKGDPATSWRDRGACTNSLCSLDGELDIEQIENN

SEQ ID NO: 431 - DNA, 192809 bp, Homo sapiens
gctgtggaaacacacagcactgaaggtgtagcccgaaatggacgccgccatgatggaaatctccagctaccccatcatgccccgcggagggcacacggccttccggacggcccgaccccttggcatcatgggaagtggagtctgcggcgggcagcggccgagggccctgagcgctcacagtcttgaaggctgaggaacgccggtttttgcgatcggaaggaccccggcaccgtatcctccgcaggggtgtcgctcccgacacgcctcagacagcggttgatagttccgcaaacagttctttccctttgcaagtgaaaccttagtattaaaagacaacattctagccgggcgcagtggctcacgcctgtaatcccagcactttgggaggccgaggcgggcggatcacctgaggtcaggagttcgagaccagcctgaccaacatggagaaaccctgtctatattgaaaatacaaaaactagccgggcgtggtggcacatgcctgtaatctcagctactcgggaggctgagggaggggaatggcttgaacccgggaggcggaggttgcggtgagtcgagatcgtgccattgcactccagcctgggcagcaagagcgaagcttcgtctcaaaaaaaaaaaaaaaaaaaaaaaaaaaaggccaacatttaggctgagcgtggtggctcgcgcctgtaatcccagcactttgggaggccgaggtgggcggatcacgaggtcaggagtttgagaccatcctggcttacacggtgaaaccccgtctctactaaaaatacaaaaaattagccggacgtggtggcgggctcctgtagtcccagctactcaggaggctgaggcaggagaatggcgtgaacctggaaggcggagcttgcagtgagccgagatcgcgccactgcactccagcctgggtgacagaccaagactccgtctcaaaaacaaaacaaaacaaaaagccaacatttgaggccgggcgcggtggctcatgcctgtaatcccagcactttgggagggggggcgtgtgtggggagtgttaacctgaggtcaggagtgttatgcgcgtttgtgtgaagagaccaccaaacaggctttgtgtgagcaacaaggctgtttatttcaactgggtgcaggcgggctgagtccgaaaagagagtcagcaagggagataggggtggggccgatttataggatttgggtaggtagtggaaaattacagtcaaagggggttgttctctggtgggaaggggcgggggttacaaggtgctcagtcggggagcttctaagccaggagaaggaatttcacaaggtaatgtcatcagttaaggcaggaaccggtcattttcacttcttttgtgattcttcagttacttcaggccatctggatgtatacgtgcaggccacaggggatatgatggcttagcttgggctcagaggcctgacaaggagttcaagaccagcctggccaacatggtgagaccctgcccactcccctctgcccatctctattgaaaatacaaaaactagccgggcattctggtgcatgcctgtaatctcagctactcaggaggctgaggcatgagaatcgcttgaacccgggagacagagattgcagtgagccgagattgtgccactgcgctctggctctgtctcaaagaaaaaaaaaaggaaaagaaaaaaggcaacatttacaagctcaaggatgaaaggatggaggaaattcaggcaaataaacagtttggtatagtagtgacataatttgataacagataacacaatcactttggctgcagagttgagactgtagcgtcttggggtgggagggaagtgaaacggtggttcaagtcaccatcatctctctctctcagaattttgtatcctcttactcagggagtccgaactggtggcagttttgcctcccaaaatggcatgtggcaatgtttggaaacattatcagatatcataattcggtgtcaggtgccactggcatctggtgggtgggtagaggccagagaagtggctaaacgtcttacagtgcacaacaacaggcccacaatgaagaattatcatcagtggtgacaaggctgagaaacccagtgttcctgcttcagcttttaatcccctccttgccaaatctatgctcaacatagcaagatggtcaacatttaaatgtaagaattaaaccatgttgcttcttggccaaacaccaaatcttgccaagacctggcccctattacttgtctgactttattacctgctactgccccctttatttaccgagcttcagctacattagtcttctttctgcttcctggacgtccctagctcattccactttagggcctttgtgcttgctgttttctttgcttgggatgctcttctcccaggcagctgcatggtttactgtttctgccctagatgatttgatgtgccaccgagacctcctgtctgccttgcaggattgattgattgctgcaggtcagctctctcctataagtatacctagttgaagagagcttcattgcctaaggccagtcctccctttgtgggcatccagcattcaatgcctggtcggggtagatgaaaaaagggagggccaggagggatttgctgaaattctgttgtagtggtacctcagtccaactacttcattcagccaatcctgcttctttttcttctccaacagatgatgattctcagagtactccctaatcaacttcctccctgttcatctcagtgtcacactttgctccctgggaaccaaacctatgacaacctcttttaggttttcactcagtgctgccaccccctcagagagtccttccctggtaccctatcaaggattgcaaccttcaccccatgttctcaatagtacttccctgtttacttttccctttaccacttatcatctagcagcaacgctgtgttattcatctttcctgtccattgtctttccccctcttcgagcatgttctgaacttcacgaagacagggattcttcttttttttaatttttgtttttagatatagggtcttgctctgtcacccaatagctcactgcacgtcaaactcctagactccagtgattgtcctgcctcagcctcctgagtagttgggattacaaacaagagactccacacctagcaaagacagggattcctgcttatttactgttgcatctccatcatctggaataatggctggcatgtaaatgttgccagatacaagactgttgaatgaacactgcatgaaaaagtgggagggttttagggaagatagctgtgtttgatcagcagggtgctggagggggatggaaacagaagcagctgataaaaagcgtaggcttgctaataaggaggtgcctaggtttgctcactgaagaaaccatttgggatgtaggagatgagagaggaaagaggcagatgaactgggaaaatttagggggtgaaggagaaagaggatgagaagaggagatgagtggctacagtgagattctggactttggggacagagagatgagaataaagaatttttaggctctgacccggctcggtggctaacacctgtaatcccagcaatttgagaggtcaaggcaggtggatcgcttgagcccaggagttcaagaccagcctgggcaacatagtgagacccccatctctacagaaaaaattaaaaaattagctggacatggtgttgggcacctgtaactccagctacttgggaggctgagttaggaggatcgcttgagcccaggaagtcgaggctgcagtgagttaagtgatcatgccactgggctgggtgcagtggctcatgcctgtaatcccagcactttgggaggcagaggcgggcagatcatttgaggtcaggagttcaagacgagcctgccaacatggtgaaatcctgtctctactaaaaagacaaaaaaaatgagccagatgtggtggcatgtggctgaaatcccaactagtcaggaggctgaagtgggagaattgcttgagcccaggaggcagaggttgcagtgagctgagatcatgccactgcactccagcctgggtgacagagtgagaccctgtttaaaaaaaaaaaaaaaaaaaagatcatgccactgcgctccagcctgggggatagagtgagaccttgtctcaaacaaacaaacaaacacacaaaagaaaatcttcagcaaaacacctatagtgatagagcacactcatgtagtggttatgcttgaaaactttatgatagattgcttgggtcccagtctcagctccagaacttacttctatgtgccgtagttagctcatctgcaaaatgaggctaatactagtatctacctcatgtggctatcttttttttttttttttgatggaatcttgctctgtcacccaggctggactgcagtggcgcgatctcggctcactgcaacctctgcctcctgggttcaagcaattctcttgcctcagcctcccgaatagctgggattacaggcacccaccaccacgcccggctaatttttttgtatttttagtagagaccgggtttcactgtgttggccaggctggtctcgaactcctgacctcgtgatctgcccgcctcagcctcccaaagtgctgggaatgtggctatctttaggagtaactgaaataatatattggatgcgctgaaaacagttcttggcacacagtgacagctgtacgattgctagccatcatttctatcatcataaattagtttaaaaggtaagagatctataggcatcgacaaaaaagatctctaagtacaatatatcactggaatattgttaaatgaagatgtaaaatgcaaacatgcaaatagtaatattccatttatatatatatcaatacaaagcaaagcatttctgcatgagaatgccacactttgctatgatgggcctgaaagtgggaacaagaaaatccagcttcatttggattatgcccatttgaggaaactgcgacttaagatgtttaaattaagtaactcactcaaggtcatactttgtatggagtaagttgtgattcaagttcaagtcagtttgcctgtacagtccatgatcaggcaggagaatgcaaaggaaaggagtgaggggtgtcaggcactgaaggagaggaaaactgggcaagtcttggaggcctttcaagaggtaatgggaaacaaggcatagctggggcctgagaaggagccaagtgccaaatggctcctggaaggtttactcagaagctgctgcaatggcctgagtggccagaaggaaggcagagcagtggtgacaggctggagaaatgcctgagcccagagaccagtcctgaccaagaagagcagtgcagggaggaaaggaggaagatgatgctccactttgggtgacagggtagatggtcagggatcaaccaaccgcaaacacagaggagaaagggtttggtggggaggcatggtgggggggtggtaatgcaagtgagttcagtgttgaacacattgagtttaatgtagcaagggacatccaggcagctgcaatacaataaaataagagaaaatacaaatctggagggagagcgaggttggaatcagaagtcactaacacaggcatatgaaaaggtgctcaacatcactgatcatcagagaaatgcaaatcaaaactacactgagatatcatctcactccagttaaaatggcttctatccaagaggcaggcaatcacaaatactggcgagaacgtggaaaaaaggcaacccttgtacactgttggtaggaatggaaattagtaaaatcataatggagaacagtttggagtttcctcaaaagagtaaaaattgaactaccatatgatccagtaatcccactgctgggtatataccccaaagaaaggaaatcagtacattgaagggataactgcacacccatgtttgttgcagcagtgtttacagtagctaaggtttggaagcaacctgagtgtctaacaacagatgaatggataaagcaaaagtagcacatagacacaagggagtacacaaaaaagaatgagggccaatgttgtctgtctgccaagacaacagaaacatgatcatttgcaacaacgtggatggaactgcagatcattacgttaagtgaaataagccaggcacagagacaaacatcacatgtcctcacttacttgtgggatctaaaaatcaaatcaattgaactcatggacatacaaagtagaaggatggttaccagaggctgggtaaaaaaaaaaaaaaaaaaaaaaaaaaaaaaaaaaaaaaaaatgaataagacctactatttgatagcacaatagggtgcctatagacaataataacttcattgtatattttacaataacttaaagaatgtaattgtattgtttgtaactcaaaggataaatgcttgaggggatggatacccctttctccaacgtgcttatttcatattgcatgcccgtatcaaaacatctcatataccccataaatatatacacctatgtacccacaaacattttattttatttatttatttatttttgagacggagactcactctgtcgcccaggctggagtgcagtagcgcgatctcggcacactgcaagctccgcctcccgggttcaagagaattctcctgcctcagcctcctgagtagctgggattacgtcaccatgcccagctaatttttgtatttttagtagagacgaggtttcaccatgttggtcaggctggtctcgaactcctgagctcatgatcctcctgcctcggcctcccaaagtgctgggattacaggcataagccactgcgcccggccccacaaaaactttaaaaaataattttaaaaaattaacaaaagaagtcactaacaataagaatgataattaatatctactgaacagactgtatcaggctctgttctacactctgtacatgcacggtctatgaacttatctaatcttcctaacaacactctgatgtaggccgattttatttcattaattttttttgccagagaacagatttaatacctaatgaagtaggccccttttattttatattttattttatgtatttatttttgagatagagtctcattctgtcactcaggctggagtgcagtggcacgatctcagctcactgcaacctccacctccagggttcaagcgattctcctgcttcagcctcctgagtagctgggattaccgtttctcgctctgttggccagactggagtgcagtggcgggatcccggctcactgcaagctccgccttccggtttcacgccattctcctgcctcagccaccaagtagctgggagtacaggagcccgccaccacgcccagctaattttttttttatttttagtggagacggggtttcaccgtgttagccaggatggtcttgttctcctgaccttgtgatccgcccgcctcggcctcccaaagtgctgggattacaggcgtgagccaccgcacccggctgacctaaaacttttaaagcctcactcagccccactcaagcttgctttctctagcatctagaacctagaaaagatcaaaacaaccgcttgcccagggcagcactaattggccgggtcatccggtggttttattgctctgtaataaggttacctaagttctttcttgaattttattttattttatttatttatttatttttgagacaaagtttcactctgtcgcccaggctggagtgcagtggtgcagtcttggctcactgcaaccttcgcctccctggttcaaacaattctcgtgcctcagccttctgagtaactgggattacaggcgactgccaccatgcctggctaatttttgtctttttagtagagatggggtttcgccatgttggccagactggtctcgaactcctgacctcaggtgatccgcctgcctcggcctcccaaagtgctgggattacaggcttgagccactgcgcccggcctttactttaatcattacgcacaaggatttccatctgcctttttttttttttattattggagacagagtctcactctgttgccaggctggagtgcagtggcgcaatctcggctcactgcaatctccgcctcccaggttcaaatgattcccctgcctcagcctcccaagtagctgggactacaggcgcgcgccaccatgcctggctaattttttgtattttagtagagacaggatttcaccattttggccaggatggtctctatctcctgacctcgtgatctgcctgccttggcctcccaaagtgctgggattacaggcgtgagccaccgtgtccggcctcctgtctgccttttatcttaccctatcactagtggctgcctgaagatctcagaacagcatctataggagatgcgcatccgatcctaggaaggatttctgatgctattttatctttagggacttgttactgggcttctgtctgccaagacaacagaaacgtggcctagcaaacaattccttttggttggaaggcagtctcgctaggggcatttgagggccttgcctaggacataggaccagcagtatttcacagctactacagaaaataccccagactttggcccataagatctcttgtattatactgcagatctaccaatggcactcagacccagaggcagatgcaatctccggttcgcgggttgggagcagttttgtggaacaaagacaccgtctagttctgacatggtacagggaggaaacacacagaggttaagacttagacaagaggccaggcgcggtggctcacgcctgtaatccctgcactttgggaggctgaggcgggaggatcacttgaggtcgggacttcgagaccagcctgaccaacatgaaggaaccccgtctctactaaaaatacaaaattaggccgggcgcggtggctcacgcctgtaatcccagcactttgggaggccgaggcgggtggatcacgaggtcaggagatcgagaccatcctggctaacacggtgaaacaccgtctccactaaaaaaaatacaaaaaattatccgggcgtggtggtgggcgcctgtagtcccagctactccggaggcttaggcaggagaatggcgtgagcccgggaggcggagcttgcagcgagccgagatcgagccactgcactccagcctgggcgacagagcgagactacgtctaaaaaacaaaacaaaacaaaattagcctggcgtggtggcgcccgcctgtaatccagttactcgggaagttgaggcaggagaatcgcttgaacccgggaggcggaggttgcggtgagccgagatcgcgccattgcattgcactccagcctgggcgacaagagcgaaacttcgtctcaaaaaacaaaacaaaacaaaacaaaacaaaacaaacttaagcaaggccaggtgcctgggtcgaggcagagctgaggcttatccgggcatcctctcacttagcagtctttcttccacaacacactgatccccgtgtttggcgtattgtggagagttgcagggcattcctttccctggacataaatttccacgtctaccggtgacatcaagtcacaagaggccagaacgcagttttcaagtcagaatcttagccagaaacgaagttggcctcttgccaaggagccaaataactggatggacgctcgcacccgcttcgcagacaggcgcacgcagtggagaggtgaagtgatttctgcgtttgggtagagcggcgtcggctttaggtgtccacggtgcggaagccagccgttttccaaaatgcaatacctctaatggtccctcacgaacagcagtccccaaatacagccgctcttggacctcgacgaaggggatgccactaacgctgtggggagagcgcacggtccccgccggcgcagggagccgggggtagagcagagggcgtcgcgtccccatcccagccccagcgcgggggctggagcagtcgagagggcggcctcccgccgcctagaggcgccggtccgctcgtccgctctgcctgtgccccgtctctatggcggccccaacggccgtccaggacgtggagcgaaatgagctcgggcgctgacggcggcggtggcgctgcggtggcggcgcggtcggacaagggcagtcccggggaggacggtttcgtcccgtcggcgctggggacccgcgagcagtgagtgtgacgctgggcaggggaggatgagccgtgccgccctgcctgggccccgagaaggggacggcggggtggagacccggggctcagggacagggagaccctcgggggcgtgacgggagcagggccacctggcggggggcttacggggatttcaaagagtggaatccctaggggtcgccctacgcggttaaccgacgtttcaagggattggagcccaaggggcttgtgggtgcgggacaggctttggctcctgggaggccttttgggagtctcgaacctgagggccaggcttgggggaaagggggagagggcgaggctggcgaatagggctggtcggcgagagtgagagaccgagggagaagtgctgggcctgggagccgaaaaggctgagtaggaggggagggatgtgggagctggaagtggggtgggaatagcggatgacccgaggcgggagcggggagatagtgggggatcttggggtgaaagaaagcgatctgacctcaaacagacgctcaggaattattaaatgaattaatgtgggtggatgaatggctgcagggaacagttggggagaggtaaattggcgggatgagagggagcagggattctagagaatcattgtaggaaaagagacggcaaatgaaaaggattcagagggccgggtgcgtggtggcttacgcctgtaatcccagcactttgggaggccgaggcgggcggagcacaaggtcaggagatcgagaccagcctgaccaacatggtgaaaccccgtctctactaaaaatacaaaaattagcggggtgtggtggcgcacacctgtagtcccagctactcgggaggctgaggcaggagaatcgcttgaacccgggaggcggaggttgcagtgagccgagatcgcgccactgcactccagcctggtgacagagcgtgactccgtctcaaaaaaagaagaaaagcgtccagagaaaatttaaacggagggctagaagactggaataggcagagacaaatagcacaggaaagagactgtgtgcctgcacacttgagaccagatgtgcttgtttcatcaagttttgaacttgggtcagggacttagggatacgtggacaaatgtctttgtgtttttttaggctaaaacttattgttgtgcatcagatattgtcctaaatgctttacatgtacagtataaacgtattctgcttgcccatgtatttccttcttttaactcaaggacgttaaaagattgaactatgtgtatttattaataacactagtgatgtttaaacctctgtcataaatagctctgtaatgtattagaaacatacatttaattcataatacagtttaattcaagagtcttgctttgcatttcattgtttacatagttgggatgctgtctatgagagagaactgcaaactttccgagaatatggagatacaggtgaaatctggtgagttaggaaaagaatcaagttataatctagaagattatatgtatatgtgtgtgtgtttaaaaaaatacgtatatattcgccgggcgcggtggcttacgcctgtaatcccagcactttgggaggccgaggcaggcagatcacgaggtcaggagatagagaccatcctggccgacatggtgaaaccctgtctctacgaaaattagacaaaaaattagccaggcatggtggcgcgcgcctgtagtcccagctacttgggaggccgaggcaggggaatcatttgaacctgggaggcggagattgcagtgagctgagatcgcgccactgcactccatcctgggcgacagagtgagactccatctcaaaaaaaaaaaatgcatatattcaagtgcttatacccaaagaaagcctaaaaatcctgggaaccctggattaagtctggctttagtgggtagatttaaagtatgtctcttcttttattcttttttaattttttactttttttttttttttagagaggtggggtgtcattctgtcatccaggctggagtacagtggcatgatcatcataactcgttacatcctggacctcctgggcccaggtgatcctcccgccacagcctcctgggtagctgggactatagctgcatgccatcatgcccagcaaattttcttttttgtagagacagggtctcactgtgttacccagggtggtctcgaactcctggcctcaagcagtcctcccaccgtggccttccaaagtgttgggagaatgggtgtgagccctcttttaatatctcacatttacgtttgatgacagcatttcaccctatagttgtcctttgtcaataaacaataaaattctgagacaccaacacatacaactgttaatgctgatatagagaaatgttagtaaataacatactgaccttgtctattctgttgtattcctggaggtggtttctcctaaattacagtagagacaaagctgaagcagtcacagatgttttcactttcaaataagagtttgagcatatggtataaatagcttaaatggaatatagtggtgacttttgctctgtatccctcagttatttgactgattctctctaacaggtttggagaagagagtatgaatcgactaataaggtggatgcagaaacacaagattccactggatgcttcagtgcttgatattggaactggaaatggtgttttcctggttgaacttgttggtacttttagtatttgtttgttaaagacaaattttaaaaggaaaatttttaaaggccctgcaattgaggatattaaccatctaaatataaaatagtaaagcagtcatacttggagaagtcagatagtacaaaagggaggctacatggattgtgagagaacctaggcaatctgagtcctagtcttgactcttttggctatagccttaaccttgagtaagccacttaatttttctaggcttctgttctttcctaagggttgtgactaggtgattgctattggtttcttgtagctcaaaactctagaaatgcatatatatatatatatataaaatatatatatatatatataatagatgaccttttgcaattccagtaggacatacgtatcttatcttataggtaagcatatggtttgaaaagtgcattttgtccatggaactgtgtttcggtaaacattccactgctagctaaaccatcactgttgtatgcctgcagtgtgctcttgctatgctgtgtgctgtggaggaattataagacttaggcttcatcctagataattttacagtcttaattagtacagaaataaacataagagtgaaatttgttaagtaaccaccacatgccaagcctcatgtttggcattggcaacaggaaaatttagactttgtgcttgaattgtttacattacaatagagtatggactgacatatggacagttgtgccatcacttgatgcatgcagtaatacactgaatatagaaaagagggtgattaattttggagtggaggggtagggaagcatcttggaggagtaaatatccaagttgggtggaaatttcagggacagtttggtgacctagtggcgtgtaaagagggagaagatttcaactaatggaaatattatctaaaggcctgaaggctgaagcagtattttatgttctgggcctgtaaataatttgataaattgaaatacaaagtatacgtggggatggacagacatgaggattaagttaaagataggaaccatattatgctttgccatgcttaagaccttcgattttgcatttaggctatggggaattgttaaaatgtttttagtagtggaatatgattagaagaacttgaaataacccttcttgaaacattgagatatagtgtgtgtacattaaagtgcacaaatcagaagtatacagctaagtgaattatcagaaagtgaatacatccacataacaatcacctggtcaagatgtaaaatattatagaactctagaaattccccttgaactctctaccaattattactcctttcttcctttttttttttttcaggctttgtcacccaggtaggagtgcactggtgagatcatggcacattgtagcctcaacctctcaggctcaagcgatcctgtcgcctcatattttgattttttttgtagagacaaggtttcactatgttgcccaggctggccctccttcctttttaaaagtaaccactatctaccaatcatgaacaaaagatgagttttaacatcagattaatttgcctgtttttgaaggtataaatgaaactctttagggtgtgctattcctggtgtctttcaggcttttttttttttttttttttttttgagacagagtcttggctctgacacccaggctggagtgcagtctcacgatcttggctcactgcaaccttcaccacctgggttcaagtggttctcgtgcctcagcctcatgagtagctgggattacaggcgcacgccattatgcctcgctatgtagttcatttttattgccatataagattcctttgtggctgggcgctgtggctcatgcctgtaatcccagcgctttgggaggccaaggcaggtggatcacaaggtcaggagatcgagaccatcctggctaacacggtgaaaccccgtctctactaaaaatacaaaaagttagccgggagtggtggtgggcgcctatagtcccaggtactcgggaggctgaggcaggagaatggtgtgaacccgggaggtggagtttgcagtgagcggagatcagcctgggcgacagagtgagactccgtctcaaaaaaaaaaaaaaattcttttgtacaattatatcagtttcatttattctttctttacctgtataggttcttttgggttttaatagtttactggtagaggctaatgatttatactttgagattaatagcttgtagattattttcttttctttttctttcttttttttttgagatggagtttcactctgtagcccaggctagagtgcagtggtgcgatctcagctcactgcagcctctgcttcctgggttcaagcgattttcctgcctcagcctcctgagtagctaggattacaggcgtacaccatgcctggttaatttttgtatttgtagtagagatggggttctgctatgttggccagctgttctcaaactcctgacctcaggtaatccatctgcctgcctcagcctcccggagtgctggtattataggtgtgagccactctgcctggcctgaacttcttttttttttttttgagacggagtctcactctgtcccccaggctggagtgcagtggggcgatctcggctcactgcaagctccgcctcccggattcacgccattttcctgcctcagcctcctgagtagctgggattacaggcacccaccaccacgcctggctaattttttgtattttcagtagagacggggtttcactgtgttagctgggatggtctcgatctcctgacctcgtgatctgcccgtcttggcctcccaaagtgctgggattacaggtgtgagccaccacgcccggccctgaaattcttaattgaagtgtagtttatgtagaaaggtgagcataagtggtacaaaatgaaccccttgtgttattcaccaacctgaccaaaaaataagacatttctagtaccataggagcttccttgtggcccctcccactccttcccttctaaaggtgaccactgctgtcacttctatcatcatatagtaggctgtttttgatattaactgtagtagcttcttacggttttaatttgcatttctctaatgagtaatgaatgatgttgagcaccttttcaggtgcttgtttgccacttgtgtatctttttttttttttttttttttttgagacagagtctcgctctgttgcccaggctggagtgcagtggcatgacctcggctcactgcaacctccacctgcagggttcaagtgattctcctgcctcagcctcctgagtagatgggattacaggtgcgcgccagcacgcctggctaatttttttgtatttttagtagacatagcgtttcaccatgttggctaggctggtctcgaactcctgacctcaggtgatctacccaccttggcctcctgaagtgcttggattacaagcgtgagccaccacgcctggcctgtttatcttctttagtaaaatgtctcttcagatcttttgcccatttttaaattggattgtttacttattaagttttgacaatttttaacgtattctggatataagttcttcaccaggtacaagatttgcagatgttttcttctattctttggcttatcttttcattcacttaacagtatcttctgaagagcagttcttaattttgatgaagtccaattaattttttccttttttggatcatgcttttgttgtagtattaaaggactctgcctaacacagggtcacttagaacttcttctgtgtttttgtttaaagttttaacactttaccttttacattcttttttttttttttttttttttttgagacggagtcttgctctgtcacccaggctagagtgcagtggcatgatcttggctcactgcaacctctgtctcctggtttcaagtgattcttctgcctcagcctcccgagtagctggggctacaggagcgcaacaccacgcctggctaatttttgtatttttagtagagatgggctttcaccacattggccaggatggtctaaaatgcctgatctcgtgattttccccccttggctccccaaagtgctgggggtgcaggggtgagccaccgcgcccagcctaccttttacatttagacctttttttttttttttttaagatggaatcttgctctgtcttccaggctgtagtgcagtggtgtgatcttggttcacttcaacctctgcctttggggttcaaagaattctcctgcctcagcctcctgagtagctgagattataggtgtgtgtcaccatgccccgctaatttttgtatttttagtagagacagcgtttcaccatgttgtccaggctggtcttaaactcctgacctcaggtgatccacccatcttggcctcccaaagttctgggattacaggcgtgagccaccctgccctgcctatttttatgtttttaatttcattgagttctgttctttttttttttcttcctgattttactttgttcctttttttactttcttaaggtggaagcttaggttattgatttgagacttttctaatgaaattatttaatgctatgaatgctatgaatttatcagtaagcactgctgcatcccacaaattttgatatgttatattttaaaaaattgttctacacctcacttgaatttttttttaaattgttgatttgttgtatttttattcagtccaaaatattttctaatttttctaattttttttaatccacgagttatttagaaatttgtttaatttccatgtttttgggatttttctgttatgtttctggtacagatttatagtctaattcagttatagtcagataacatgccttatatgatttgtatgatttcaatccttttaaatttgttaaggtttgttttaagacccaagatacagtgtgtcttggggaatttttcatgtgaacttgaaaaatgtatgtattgccaggtgtggtggcttacacctgtaatcccagcattttgggagactgaggtgggcagatcacctgaggtcaggagtttaagaccagcctgaccaacatggagaaaccttgtctctactaaaaatataaaattggttgggcgtggtggtgcatgcctgtaatcccagctactcgggaggctgaagcaggagaatcacctgaacctgggaggcggaggttgcggtgagccgagattgcaccgttgcactccagcctgggcaactagagtgaaactctgtctcaaaataaaataaaataaaataatttagccaggtttggttggtggcaagtgcacctgtagtcccagctacttgggaggctgaagtgggaggatcacctgagcctgaggaggtcgaggctgcagtgagccatgattatgccaccgcactccagcctgggtgacagagtgagaccttatctccaaaaacaaaggaaaattcatatgtaagtttttgtgtgtacatatgttttcacttctcttgggtatttacttaggagtgaaattgctgggtcatacgccagttaagcatactcggtaagtttaaccttttaaggagctgctggaccattttccacagtggctgcaccattttaaatttccatcagcaatacatgagagtttaaatttctccatattcttggctgggcacagtggcttatgccggcaatcctagcactctgggaggccaaggccggtggatcacttgaggtcagcagtttgagaccaccctggccatcatggtgaaaccctgtcgctaccaaaagatacaaaaattagccagacgtggtggtgtttgcctgagtagtcacagctactcaggaggctgaggtgggagaattgcttgaacctgggaggtggaggttgcagtgagccgagatggccccactgcactccagcctgggagacagagtaagactctgtctcaaaaaaaaaaaaaaaaaaaaaggtttttccctatatcctcaccaatactttttattatctatcttttaaattatagccatcctagtggacatgatgttcagcccctttttgtttagtttttacatgttatattgttttccatccttttaacttaccttattattatatttgaagtgaatttcttgtagccagcatatagttggtagttatttttatctattctaacaatctctaacctttaactggtgtatttagaacatttatgttcaatgtgattattgatacgtttggatttaggtctacattttattgttttcccttttttacctctgtttttttttttttgagacagagtttcactcatgttgcccaggctggagtgcaatggagggatcttggctcactgcaacctccacctcctgggttcaagtgattctcctgcctcagcctccctgagtagctgggattacaggtacccgccaccacacacggctactttttgtatttttagtacagacggggtttcgccctgttgtccaggctggtcttgaactcttttttttttttttttttttttgagacggagtctcgctctgtcgcccaggctggagtgcagtggcgcgatctcggctcactgcaagctccgcctcccaggttcacgccattctcctgcctcagcctcccgagtagctgggactacaggcgcccgctaccacgcccggctaattttttgtatttttagtagagacggggtttcaccgtgttagccaggatggtctcgatctcctgacctcgtgatcctcccgcctcggcctcccaaagtgctgggattacaggcgtgagccaccgcacccggccggtcttgaactcttgacctcaggtgatctgcccgcctcagcctccctttgtgctgggattacaggcttgagccactgtgcctggccttacctctgttttttattcttctctttttcctttcctgctggtgttggtttatttgaacatttgttagtatttcattttaatttatgtgtatcttcttgaatatatctctttgcgtatggctgttttagtggttgctttaagcagttgactgtgtcttttggtgtggcttttctagtggttcctgtgtagattacaatatatatagttgtcaaaatctccttggaatcagtattttaccactataagtggaatgtgaaaaccttatcatgttgggttcttgatctttcacctttatgttgtagttgtctttactattacctttatgttgaaaattccattagataatattatgatttttttcaaacattttaaggaatgcactaggagaagaatatttaattatattcacctagatatttatttcacctttgtattctggatctcctgagctttttttttttctttctgtctaagaaattcttcttggaaattattttagagagggttttcttgcaacaaattttttttgttttcctttacctgagaatagctttatttcaccttcattcctaaggagtgttttttttttttttttggctgaatatagaatcttttttttttttgagacacagtctcactctgtcacccaggctggagtgcagtggcacaatctcacaatctcggctcactgcaaccttcgcctcctgggttcaagcgattgattcttctgcctcagcctcccgagtagctgggattataggtgtccaccaccacacccggctactttttgtgtttttagtagagatggggtttcaccatgttggccgggctggtctcgaatttctgacctcggatgatctgcctgcctcagccttcaaaagtgctgggataacaggcgtgagccaccgcagccggcctgaatatagaattctgagctagccgtttctttcagtactttaaaaatgttatgggctgggcacggtggctcacgcctgtaatcccagcattttgggaggccgaggcgggcagatcacgaggtcgggagatcgagaccatcctggccaacatggtggacccccatctctactaaaatacaaaaaattagccgggcgtggtggcatgcccttgtagtcccagctactcaggagactgaggcaggggaatagcttgaacccgggaggcgggggttgcagtgagccaagatcgcgccactgcattccagcttggcagcagagcaagactccgtctcaaaaaaaaaaagttacgtcacttgtttttgacttccatgttttctcatgaggaatctgcagtcatttgaattgttgttttcctatgaatgcatcatttttctagatgcttttaagattttttttctttgtcttttgttttttgcagtttgcttatgatgtgtgctgtggcttggatttctttggcttatcctatttggtgttcactgaactttttacatctgtaagcttatgtcttttgccagatttgcgatatttctagcttttgttttttctattttttttttctgtattactgtctttctcctttcattttgggagtctatacacatgaaatgtcaatttttctgttgctccacaggtccccgtgaactccacaggttcaattttttaaaagtcatttttgtctttgtcggccaaatgttatatttcaattgatctgtcttcagattcactgactttttctctgtcaccttcattttgctgttaagtccacacattgcaattggctgacatgtcttaattttttattgcatgatttctttatttaccattacgatttattttttgtaggaggtagttcatttgtctgaatggtttttcacaatgtgaattttctaattacatctctatagtatttaacatgttttctgtccctcgtgttgtctgtacgttggaaattagacctaaattaagggtcagcaaaccacagtctacgggtcaaatctggacctcctttgtttttataaatatttgttggaatacagccacatttattcatttgcatattgtctatggcagcttaagtgttgcattggtagagttgactggttgtaacagagactgtatggctggcaaagcctaaaatatttattctgtttctttttgttttttgagacagagtcttgctctgtcgcccaggctggagtgctggagtgcagtggcgtgtgatcttggctcactgtaagctctgcctcctgggttcacaccattcttttgcctcagcctcccgagtagctgggactacatgtgcccgccaccacgcctggctaattttttgtattttttagtagagacggggtttcactctgttagccaggatggtctcgatctcctgacctcaggatccacccaccttggcctccaagagtgctgggattacaggcgtgagccaccacgcctgactattctgtttctttttttttttttttttttttttgagatggagtctcgctctgtcgcccaggctggagtgcagtggtgcagtcttggctcactgcaagctccacctcccaggttcacaccattctcctgcctcagcctcctgagtagctgggactactggcacccgccaccacgtccggctaattttttgtatttttttagtagagacggggtttcactgtgttagccaggatggtctcgatctcctgacctcgtgatccacccgcctcggcctcccaaagtgctgggattacaggcgtgagccactgcgcccagccactattctgtttctttatagaaaatggttgctggctgggcatggtggctcacacctataatcccagcactttgggaggccaaggtggaaggtttgtttgagctcaagagtttgagaccagcctgggcaacatggtgaaaccccgtgtctactaaagacacagaaaaatagccaggtgtcgtggtgtgtccttgtaattccagttactcaggaggctgaggtgggagaatcgcttgagcctggggaggttgaggctgcagtgagctgtgatcacgctgttgcattccagtctgggtgacagaaggaaaccctgtttccataaaaaaaagaaaaagattgctgaccctggattgagagatttttattagatttttttttttggcaagtaaacttattaggtgttggtgtatatttgcatatgtggcgtagaatatttggtgtagaacattcatctttttgttatattaacagccattgaagaccatttcttatacgtactactttttcattgatcagctacatttttgatggttacttttcctacatttttgatggatgtttttgctatatcattttaggttactatttttcttttactatcttctggcttccattctttatcacttattgttagctataagccttatcatcatccttttaaaggtaatctgtcgccttgtatcccacatccctactccctggatgtttttgagatttttctgtttttctttttttttttttttggtacggagtctcacgccgtcacccaggctggagtgccatgtgccatctctgctcactgcaacctctgcttccggggttcaagtgattctcttgcctcagtctcccgagtagctgggattacaggcatgtgccaccacacctggctaatttttgtatttttagtagagacggggtttcaccatattggccaggctggtctcgaactcctgaccttaggtgatccgcctgccttggcctcccaaagtgctggtattacaggcataagccaccatgctgagctgatttttctgtttttgtttttcatcagatacactatgatgtgtctaggtggagtttgctttcatctgccttgaatttatactgtttcttgaatctgaggcttgggtcctttgtcactattggagtattcttagccatatgccattttttcttctgccctattctcatttcctttcctctcagattccacatatggattgggtatacatatatgtttgtgtgtatgtatgtgtgtgtgtgtgtgtatgtatagactgtgtgttaaaattgtctatacatacacactataacctccaactccggagctcactataacctccaactcctgggttcaagcgattctcctgcctcagcctcccaagtagctgggattacaggcacccgccaccacgcctggctaattttgtgtgtttagtagagatggggtttcaccatgttggccacgctggtctcgaacccctgtggatatagagggttgtgtgtgtgtgtatgtatatatagtcatacactacataacaatgtttcagttgaaatgtaccacatatacaatggtggtcctataagattataatactgtatttttaccctttctatgtacagatatctttagggctgggcacagtggctcatgcctgtaatcccagcactttgggaggccaaggcaggtggataacttgagctcaggagttcaagaccagcttgggcagcctggcgaaaccctgtctctacaaaaaaaaacaaaaaacaaaaaaacaaaaattaaccaggcatggtggtggcatgagcctatccagctacttgagaggctggggtgggaggattgattgagccaggaggcaaggctgcagtaagccatgattgtgctactgcactccagcctgacttacaagagtgagaccctgtctcaaaaaaaaaaaaaaaatctttaggtacacagataccatcgtgctacagttgcctccagtattcggtacagtaaaatgctgtacaggtgtgtagcctaggagtaataagccataccatgtagcctaagtgtgcagtgggctctaccatttaggtttttgtaagtacactccatggtgacacatgactgtgtgtgtgtatgtgttacatcttatattctgtgctatattctgtctttttttctttttttttttttttttgagtcagagttttgctcttgtagcccaggctggagtgcaatggcgcgatcttggctcactataacctccacctcctgggttcaagcaattctcctgcctcatcttcctgagtagctggaatttcaggtgcccaccaccatgcctagctaatttttgtatttttagtaaagaggggtttcaccgtgttggccaggctggtctcaaactcctgacctcaggtgatccacctgccttggcctcccaaaatgataggattacaagcttgagccaccatgcccggcccatattatgtctttgatattctttcctgtttttaattttccattcttttgtcattctgtgtataacagggatattttcttctgactgttctttgctgatttttttttattttttgctgtgtgtagtctgctatcaagcccacccttgaacttcctaattactgtatttttcaattatgttattttttattttattttttttgagacaagagtcttgttctgttgcccaggctggagtgcagtggcatgatctcggctcactgcaaactccacctcccgggttcaagcaattctcctgcctcagcctcccgagtagctgggattacaggcactcaccaccacaaaattagcctggctaatttttgtgtttttagtagagatggggtttcaccgtgttggccaggctggtcttgaactcctgacctcaggtggtctgcctgcctccgcctcccagagtgctaggattataggcgtgagccaccgtgtctggccctgtttgtttctctgttgtggttttcagttctctgctagaattctcccacttgtcattgtcatttctgtcagttgttttgaaatctttttctgaaaattcatttatttgggtctcctgtcgggtctgtttctaaagtcaatttctccccttgggtttggttgtttccttgaatgtctgctcatttttgggtgccagaaattgaatgtgaaagacattggagatagtttgaggccctgagtgatatctctagaaacctaaaacatctatttgtgatttttataagttgtactagaagaataaacaggcatgggaaaagaaggaaccggtaggccgaggtgggcggatcacgaggtcaggagatcaagaccatcctggctaacacggtgaaaccccatctctactaaaaatacaaaaacaaaattagctgggcgtggtggcgggcgcctgtagtcccagctacttgggaggctgaggtgggagaatggtgtgaacccgggaggcagagctttcagtgagccgagatcgtgccactgcattgcagcctgggcgacagagcgagactctgtctcaaaaaaaaaaaaagaaggaaccggtaagaatcagttaatagactcatcctgggttctaggtctcccagagaagcagttaagggaaatggggagaaaatctcaaggaataaggagggatacagctaaaagggtggaaggttggcatcaaaaaagagaatattagacctttagattaaaaacaaaaataaagggagcaatctacctgtagaaagtaattggtatacttgttccttgagtttagattaggaatcagttacttagggttaaaaagacttggtaggtcttcatggatttgatgtggcagtaggttaagttttaaaggaagtaaccatttagtaaatggtgaagagcaggaagggaatttcaggctatactgtactttgtaacttactttgtttttcatgtttcctttgaaattatttttagtctcattggtctaaaaatgtttagtgttgttagggggtgtgtaaagaccagaagcttccatgcttttgccatagacactacacagcctagatgggttaatggctagcaaacaccaaaactctcaagtccattgagttaaagaaacttcttggggatactgatacctgcccaccctacctcacaggttttctgtaaagatctaatgggatgtatgaaatatttttaaagacgtaaaagtagtatacaaatgtagaatggttaaaaatcacatggctggtggagaattgcataatgtataattacactgaagggaaaatttaaaaattgatagcttattacatttgcattgattttgttaatataatttaattgggttaagtaaaatatatgacaaatttatgtgtgaattggaaattatcagcatcaaaagttaatgttacctttttttgcctgagggcttatacatatattttcattatttttgagaacatgaatttccttttgaaaaagagataaaatattatgaaaacaaaggtattgtcatagtatatacactttcagtttttatttagagtctacaataaaatttaagcattatgaattggattatatgtcattttctctacatcaaaaataagacatcaccagtcctaaaggaatattataattcataaacaaaacattatattaaaattttatactaaagtataaaattatttctctctaggcaaaatttggtttctctaatattactggaattgattactctccttctgcaattcagctttctggaagtattatagaaaaagaaggtttatctaacattaagttaaaggtaactattatttatattactataatatttacaatagaggttaaatgtttctagagcatattaattgacaggttttaaactcataaattagggatcaatcataaataatacaaattgaaacatttttaaatagccatattaaaaatttaatctagttggtttggggaaattattttttcttctgtatgtttgttcatacactactgctcctgatgtttgcaaatacacataatacttaactatggattaaccagatcaaaagggttttctttttttttttttttttttttttttttttgagactgagtctcgctcagttgcccaggctggagggctggagtgcggtggcgccatctcggcttactgcaagctccgcctcctgggttcatgccattctcctctctcagcctctgaagtagctgggactacaggcgcctgcagccacgcccagctaattttttgtatttttagtagagatggggtttcaccgtgttagccaggacggtctcgatctcctgatctcgtgatctgcccgcttcggcctcccagagtgctgggattacaggcgtgagccaccgcgccctgcccacatcaaaaggttttaaatgcatcaagtggtataatgtcaccaaaaatcatttagtttatttttgtgtcctatgatctgtgagatgatgattcctaaatttacatttctagcccaggcctctcttctcagctctagagttatagacaggcatgccctgtttttttggcttcccaaatggtatgttttttgacaaatcaaaggtttgtggcaagcctgttgagccccatctgttgacaccattttttcaacagcatgttctcactttgtatctgtgtgtcacattttggtaattgttgtaatatttcagagcttttcattattattttatctgttatggtgattcatgatcattgatctttgatattactattgtaattgttttggcgtgccatgaactgtgcccacgtaagatggtgagcttaattgataaatgtatgttctgtctgctctacctactggctggtctcctatcttcctccctcctcctcaagcctccttctttcttgggacacagcaatattgaaattaggccaattaaaaaccttacagtgggacaggcgcagtggctaatgcctgtaatcccaacactttaggaggctgaggtgggcagatcactttgaggtcaggagtttgggactagcctggccagcatggtgaaaccatatctccaccaaaagtacaaaaaatagccaggtgtggtggcgggcacctgtagtcccaactacactccagcctggacaacagagggagactgttttaaaaaaaaacagaggcaggaggattgcctgaacctggaaggtggaggttgcagtgagctaagattgtgccactgcactccagcctgggtgacggggagactgcgtctcaaaaaacaaaaataaaaaaacaaggataaaaaataaacaacccccacctcaacacagtggcctgtaagtgttcagttgaaaggtagagtcacacatctctcactctaaatcaaaagctagaaatgattaagcttagtgaggaaggcatgttgaaaaccgcgataggccaaaagctaggcctcttgtgacaaaatttagtcaagttgtgaatgcaaaacaaaatttctttaaggaaattaaaagtggtattccagtgaacacatgaatgatgagaaagtcaaacagccttattgctgttacggagaaagttttagtgctccagatagaagatcaaaccagccatagcattctctcaagccacagcctaatccagagcaaggccttgactcttttcaattctgtgaaggctgagagaggtgaagaagctgcagaagaaaagtttgaagctagcagtagttagttcatgagatttaagaacagaagccatcttggctggacacagtggctcacgcctgtaatcctagcactttgggaggccaaggtgggaggatcacctgaggccaggagtttaagaccagcctggccgacatgctgaaactgtctctactaaaaatacagaaagttagctgggcatggtggtgggtgtctgtaatcccagctacttgggaggctgaggtaggagaaccgcttgaacctgggaagcagaggttgcagtgagccaagatcgcgcaactgcactccagcctgggcaacagagcgagactccatctcaaaaaaaaaaaaaaaaaaaaaaaaaagaaaaagaaaagaagccatctccatgacataaaagtgcaagataaagcactaagtactgatgtagaaggtagaaggtgtagcaagttagctaggaaataaccagtgaagctggctaaacaacacacagatttccaatggagatgaaatagccttatattggaagaagatgccatgtaggagttacatagctagagaggagaagtcagtgcctggctttaaatcttcagaggagaggctgacattattgttagagggggctaatgcagctgatgactttaagttgaagccaatgcccatttcccattccgaaaatctgagggcccgtaagaattatgctagatcttctttgcatgagctctataaatggaacaacaaagcctggataacggcacatctgtttacagtatggtttactgagtattttaagcccatttttgagacctactgccccaaaagaaaaagactcaaagtattactgttcattgacaatgcatgaattcacccaagagctctgatggagatatataagaagattaatcttgtttttttttgagacggagtcttgttctatcacccaggctggagtgtagtgactcgatctcagctcactgcaagctctgcctcccaggttcatgccattctcctgcctcagcctcccaagtagctgggactacaggtgcctgccaccacacctggctaattttttgtatttttagtagagatggggtttcaccgtgttagccagggtggtctggatctcctgacctggtgatccgcctgccttggcctcccaaagtgctgggattacaggcgtgagccaccatgcccagccgattaatcttgtttttatgcctgttaacacaggatctgttctgtagcccgtgatggatcaaggagtaatttcgactttacagtcttaaatgtgttatttaagaaatgcatttcataaggctatggatgtcatagatagtgattcgtctgatgcatctgggcaaagtagattgaaaaccttctggaaatgggctgggcgcggtggctcacgcctgtaatcctagcatcttgggaggccaaggtgggcggatcacaaggtcaggagatcaagaccatcctggctaacatggtgaaaccccatctctactaaaaatacaaagaattagccaggtgtggtggcaggtgcctgtagtctcagctacttgggaggctgaggcaggagaatggcgtgaacctgggaggcggagcttgcagtgagctgagatctagccgctgcactccagcctgggcgacagagcaagactctgtctcaaaaaaaaaaaagaaaaaagaaaaccttctggaaatgattcaccattctgcctgtcgtgaagaacatttataattcatgggaggtcagaatatcaacattaacaggagtttggaagaagctgattccaaccttaatggatgacttggagagaggttcaagatttcaatggaggaattaactgcaaatacagtggtagtagcaaactagaattagaagtggagccagaaggtgtaactgagttgctacagtctcttgataaaacttgatcagataaggagttgcttcttatggtggacgaccagagaaagtggtttcttgagatggaatctactgtgaacattgttgaaaaaggattttgaatattccataaacttagttgataaagcagtagcaaggtttgagagcattgcctccaatatcgaaggatgttctgctgtgtgtaaaatgctatcaaacaatatcatgtactccagagaaatttttcataaaaggaagaatcagtcgatacggcaaactttattactgtcttattttaggaaattttcacagctaccccagccttcagcaaccactaccttgatcagtcagcaggcatccttattgaggcaaggccctccagccagagaaaagattatgacttactcatgatttcgatgatggcttgttagtgtttttttaacaataaagtattttttgtgggggatggagtcttgctctgtcacccaggctgaagtgcagtggtgtgatcttggctcacttgcaacttccgcctcctgggttcaagtgattgtcctgcctcagcctcccgagtagctgggactacaggcacccgccaccacacccagctaatttttgtatttttagtagagatggggtttcaccatattggccaggctggtcttgaactcctgaccttgtgatccacccgcctcggcccctcaaagtgctgggataacaggtgtgagctaccacgcccggccatttttgtatttttttagtagagacgagatttcatcatgttgaccagggtggtatcaaactcttgatctcagatgatccctccaccttggcctcccaaagtgttgggattacaggcatgagccaccactcctggcctacaataaagtattttttaaggcacccaatttttttttttttttttttttttttgagatggagtttcgctcttgttgccctggctggaatgcaatggtgtgatctcggctcaccacaacctctgcctcccggtttcaagcgattctcctgcctcagcctccgagtagctgggattataggcatgtgccaccatgcccggctaatttttgtatttttagtagcgatggggtttcactatgttggtcaggctggtcttgaactcctgacctcaggtgatccacccaccttggcctcccaaagtgctgggattacaggtgcgagccaccatgcctggcaaggcacccattttttaaaaagacataatgctattgcacacttaatagactgtaatacagtgtaaacataacttctatatgcactgggaaaccaaaaattttgtgtgacttgcttcattgtggtgtttgctttgttgtgttggtctggaacagaacttgcaatatctctgagggatgcttgtaaaatctgcctgttcaaaacttccatttggaaagctaatagtctctcaacttaattagtccaaaatgaaactcttggtttcctcctcagacctgatttccccagtctttcccgtttctactaataacactcccatttaccctgttgcatttacacaaaacccaaggagtcatccttgattcttctttttccttaaagtcctatatccaattctgttcgttttatttatacacacatatatatatatatattttttttttttttttggagacagtgtcttgccctgtagcccaggctggagtgcggtggtgttattacagctcattgcagcctcaatctcctgggctcaagtgattcttccaccaaagcctccagagtagctgggactacaggcctgcttcaccacacctaatttttttgtagagatggggttttgtcatgttgcccaggctagtcttgaattcctggcctcaaacaatctgcctgcctctgctttccaaagtgctaggattacaggtatgagccactgcttctggccagttttatcttcaaaatatatcaagaatgtgatcatttcttgttatctcaattgctccctgtgaagtccgaaccaccattatttcttgtttaaactactacagtagcctttgattttgcccctccatttccactcatgctgctctgatgttcttttaccacagggcagccagagtgattttttctttgttattttttgagacggaggctttttctgttgcccaggctggagtgcagtggcaccatcctggctcactgcaacctcggcctcctgagttcaagcaattctcattcctcagcctcccaagtagctgggactacaggcatgcaccaccacacccagctaattttcttcgtatttttttagtagagatgggatttcagcacgtcgctcaggctggccttgaactcacgacctaaggtgatctgcctgcctcggcctcccaaagtgttgagattacaggtgtgagtcactgcgcccggcctaatttttgtatttttagtggagaccgggtttcaacatgttggtcaggctggtctcaaactcctgacctcaagagatccacctaccttggcctcccagagtgctgggattatgggcatgagccactgtgttcagccctggccagatttttaaaaatgtctgttcatgtcgcttccttgctcacaatcctgaactgacttccccattgcattgtaaatagattctgaacctcatccagccttacaaagtccctcatttcttaccttcttcctcgtttatcatcaatactcggtcacattggcttttcttctgttcctgaaacatgtcaagcttgttttgagtctgtatacttgctgccctctgcctagagtattcttgccccagatcttagcatgtttggttcattctcataattcagatctttgctcaaataacaccttagagaaaactttatttatttatttgtttttattttttgagatggagtttcactcttgttgcccaggctggagtgcaatggcgtgatctcggctcaccgcaacctccgtttcctgggttcaaacgattctcctgcctcagcctcccgagtagctgggattactggcatgcgccaccacgcccagctaatttttgtatttttagtagaggcggggtttgtccatgttggtcaggctggtctcgaactcctgacctcaggtgatctacccgtctcggcctcccaaagtgttgggattataggtgtgagccactatgcctggccaagaaaagtttctactcttttccaaactgtttctcttccaagtcacttaatgtcttatttctctggctttattttcttcatggcactttatctgaagttacttatttagcttatttatcttttatctttctctttgtagaatataaggtatattttctttcttttcttttcttttcttttttttttttttttgaggcagtgtctcgccctgtcgcctagacagtagtgcagtggtgcgatctctgctcactgcaacctctgcttcccagttcaagcaattctcctgcctcagcctcccaagtagctgggactacaggcacatgccaccacgcccggctaattttttgtatttttagtagagacagggtttcaccgtgttagccaggatggtcttgatctcctgacctcatgatccgtctgccttggcctccctaagtgttgggattacaggcgtgagccactgcgcccggccaatataaggtatgttttcatacagggaccttttctattttgtttactgtttttttttttttttttttttttaagatggagtctagctttgtttcccaggctggagtgcaatggcgtgatctcggctcactgcaagctctgcctcccgggttcacgccattctcctgcctcagcctgccgagtagctgggactacaggcgcccaccaccactcctggctaattttttgtatttttagtagagacaggatttcaccgtgttagccaggatggtcttgatctcctgacctcgtgatcctcctgccttggcctctcaaagtgctgggattacaggcgtgagccactgcgcctggctctgttttgtttactgttatatccagggtctgaaaagtacctgacaatagatgtccacaaaatatttgctgaatagatgagtatttttatataggcatttaggatgaggaagcctcttcaaagttagctcttcagagtgatagtcattattttgcttcaggtataatgaatactttggacatgaaggaagggagaagacccaccttccaatatacatcaacataatatatacatttttaagtcaatagagttttagattaaacatgatttacaattgctgtattaaatgtgtgtgaataattgtgagctaattgcctaattatttttttcaaaatgagttttcagaattttcattggtaaattgtgaatattttataaaattgaggcggattgctatttccgatgcttagtatgcatcaggttattaacagtgaatgagatggtgatgtatgacttcacacctccaactgaagtaattacagtttaacagttatttaatttcttaagccttatgccattcattatatccattagtaatttcgtaagctgcttagtcaagacccaagaaattcttttttttttttaaaggctggtcaagtgaagcagtgataatagagaaggaaggaataaatttgtaactggttttgatcgattagttgtaaacaccactgcactcagaccagccaaggcccaagaacttttgatctaccgtgtttattttaggttacacactaggaatataagttaaaaatcttattcccatagctgagtgctgtggccacatctacttaggaaggctgagatgggaggattgcttagctcaggttttcaagtctatcccgggcaacatagcaagactcctgtcttcaagaaatcttatttccagtgaacttagttccaaataaattgtcatttttaagaatatgtcaaattttctactttttgacagaaacaggtttttcataaactaggcttgtgagctccataatgtgctggtattattagggaatatggctagctttgatttgtttccaaatttgtagagatttggaatgttcaggaaataccagtctctcttattaatcttggctttaatgatcttggactgaagctcataaaagttagctataaagttgaaaatatgtttattatatgtaaaatgccattataattaatgggtccttttattaataaccttttacaggttgtcacttacattctgtaaggattttgttttaattgttctcacatagacattgacttttaatataggtagaagactttttgaatctctccacacagctgtctggatttcatatttgtattgacaaagggacttttgatgccataagccttaatcctgacaatgcaattgagaagaggaagcaatatgtgaaatctctctccagggtgttgaaagtaaaaggcttttttctaataacgtcatgtaattggaccaaggaagagttgctaaatgaattcagtgaaggtaagtgactatatggtgtttaaatgtgtgcttacctcaggtttcatgtacttaaataggttttctccccgttttgtgttatagtgttttacttttctatttgtgggaattgcctgcttttttctctgttaattaccttgacaataacttttgactgtatatgcaaagcacagagaaataacattggttgagatccagagatcttttaaaattttttctgagaaatcttggcagttaagtactaacatttatgagcctgtaaaaattaagttctcagcctgggcaatgtggcgaaaccctgtgtctgctaaaaatacaaaaaattagctgggattggtggcgcgtgcctgtagtcccagctacttaggagactgaggtgagaggatcgcataagcccaggaggcagaggttgcagtgagtcgagattgtgccactgcactccagcctgggtgacagagtgagacacatctaaacaaaaaaagagaaaaacttaagttctctatttgagtcgtacaatcttttatttaaggtatataatctattatttatagaatcaaacaaaaagcacatatattgtgcttctggcttcagtgcactgatttactggcaaatccataataatgcaaatggaagaagtacttccgtcttacatgctgagagttttgatattatagatactttagctgtcttgcactagcggtcatttaggtcttcagagatgatagaacagttcttggtttcagaggatatagaacaattatttttaagattgcacggaattaaaatgtagggaattgatagaagattctagtgctgaggcaggatccttttttgcctagttagcaaagtgtaattagtgcagtatctacttagtggagatcttgtgagaactgagaatctgtaatctatacacaaaatattttgagttctctggcagactgttccttgcattttgtaagaaatattttatctgccagttttttatgtagtgcacaggcatttctgggaaagtatcttgagaatctacagatatttgcttgttttttcttagaatccttttcagattagtttgtttttttttttttttgatcctgcactttttaaaggataggataaattttcaggatggagtcttgggtaaataatatggtactcaatatttggttaaattttgaacctcagttgtcacaagctaatggaaagtgaattacctcaagagaatagtttactgtgtaccattatttataaccgtactgcatataccttattttagagtttgttttctttttagtattaagggaacaggctgggagaacacttaatacatgtccttttgtgtgtgttcaatggctttgacagattatataatgtaaaacctgaagtgtttgaggcttgaaatatgagcttatggcttcattactattgcctctggaaaacaagaattatatgtgatttattgtcttttctttcatgccatttattttattatcttccatgttaaatttgtttcctttagaactgttgaggccctgtatcaataagtctttcctcttcctgaactttgacagttttaataaatgctcaaagttacactgtgtagggcaagtttctttcctggtttttaaatacaggtgttcttttttactcctagaaccagcagacaaaaacatatttgtctgtctttgataatgaggaacagactttagcctggttagagtacttaaaaatgtgtctttgtctgaaaactattaagtaaactatgttcaattttagaacaaaatacagaatttaagcaaaatattataatgggaaatgttatataaataattatatacaattgaaaacattttttaggcatgagtcccttagaaaatggtatttggagttagatatgggacagtaacagaatacactgccttgcgtcactgccaaaggtcttgttcctgactactcatactggctgccacattctctttgcataaaataaagcttgtttcaccaatcttttaaggttctttcttatttgaactataaatgttcataaaattgttgaaacagatcttgcattttttccatgatacccctgattgtacaaatactttgtgttataatttttttagtgagggttacctggaaccagttgcccatgttctaatttgatgtcgaagggacttgactttatgacagtgaatgaatgaaaacaataaccacccatcttacttcagaagcaatttaagggagtctttctgaatctattcaggtttggggagctatcctttaaaagaaaaagtaattcaaatttattatctaaataattgaaaaatatcaataacgtcaacacataagcatacagattaaaataattaagacaatttgtttaccatcagtggagtacaaccactattaatattttggtatattctattttgaaatataataactccaattctgtagggttagttcagggagttgaaaagttagtcctggaaaatttatacagacagaaaatttttattattaaatatccagagcatttgtaaaatttttgaaaacaaatatgggtgtataactatgcatgtatccaggacaatgcctgcattttccagcattaagaaacatcatattattttattaaaaggaatgtcataatttggaaaagttttcttacgataagcttttaataagcattataatattcggttattatgatttggtgaaattagataacatgaattaggatgtataatgaaatagtatgatagaccaattgatgcaataatataatttttatttctgtttttgaaacggtctgtctctctctctgttgcccaggttggagtacagtggcaggattttggctcactgcagccttgacttcctgggctcaagcgatcttttccacttcagcctcccgagtaggtggaactacaggcacacatcatcatgcctggataatttttgtatttttagcagagacgaggttttgccatgttgtccaggctggtctggaactcctgggctcaagtgattctcccacctggcctcccaaagtgctgggattataccatgccaggccctcgttggcattttagtaagtgaccttccagctttatttattttttaaaagcaaaataatataacattttatttcatagtttaggaaaacactacattaccttatttggatctttacaaaatcacagtgaatttgatggcgtggggtggcgcattggcgttagtagcttaaggctgggattagaggcctgagccattgcacccggccagtatacatcacttaaaacatttttttctgtttataagagttatttgagctcaaagcatgaaaatttagaaaaatacagaaccccacccctgcctcaagaaaaaaatattccaaaactaataggtccatcaatgagggaaaaccttgattggcgttttattttactttaattttaaaatttattttgagacagagtctggctctgttgcccaggctggagtgcagtgggataatctcggcttaccacagcctccatcatccaggcatctcccacttcagcctcccaagtagctgggactacaggcgcacaggcacaggccaccacaacggcttatttttgtatttttttagagatggggtttcgccatgttgccccggctggtcttgaatacctagccttaagtgatagaaagtgcatagaaatcaggatcatggtagaggtaacttgacagcctgtctcatttagtaagtgctgaagctgagacttcacctaggattttagattccaagttaattttttgaacctaggatttgaacctaggattttagacgccaagttaattttttttaaaccatactgtgatgctttgaaagttactagttccttgtcttccaggccctttattagttcgtttagtttgagtcttcatctttgttataaattactgtttttaattctgctgaaatacacataacataccattttataaccatttttaagtgtatacttatgtggtattaagtacatttacatttttttgtgcaattgtcatcactacccttctccagaactttttcatcttctacaaattcatttatatttccaagttattttgcctttctgtattaagtgctttaatatgtgtggtgtgaattaattagattactacatatgaagcactcaaaataatgcctggcgcttagcaagaactcaacacagggccaggcgatgttgctcacgcctgtaatcctagcactttgggaggctgaggtgggtggatcacttgagatcaggcgttccagaccagcctggccaacatggcgaaaccctgtctctactaaaatatgaaaaattagccgggtgtggtggtgcataactgtaattctagctacttgggaggctgaagtgagaatcgcttgaactctggaggcagaggttgcagtgagctgagcttgtgccactgcactccagcctcggtgatggagtgagactccgtctcaaaaagcaaacaaacaaacaaaaaaactcgacacatgctagctgcttcctacaaaccaggtgatagaggctaacagagatacagctttgcagagatgacaaacaggaagtggaggaaatgggaggtggatggaaagcctgttttttccaaattgtttttggtcttgtcttttccttgttaaattcaaagtgattttggaggagcatacatatgctgtacatacatagtagaattgaaaaatcatgaagtgaaattcagcacaatttagagtttggaatcatagttttacaaagggttcaatggtacagtgttaatgcatgcatataaatacatgtaagtatgagactcaattcttaataaaagtatttaaattttgtctgacaggatttgaacttctcgaagagctaccaacacccaagttcagctttggaggcagatctggaaacagtgtagcagcattggttttccaaaaaatgtgagactttttcttggacgaattcaggtagctacacagaatctacacagcaaagttaacctgacacagaaaatccttgtgcaaataaatgcttagtaagtacacaggatgcacatgttgaatagagtatactggattggtgaaagaaaataataataatgagcatctaagtggttgggttttagagatcaatcaagaataattttaattttcttttgtatttgaaatgtaaatagttttcttttcgattaaaaaaatttcctataactgctaaacagttaaaaactttaaagtagtaaatgagtttatagaaagcatgtattcttgatttttgtgccttggtaaagttgataactatttatgaatatttgaccaaattattccagcatcagaataataagcaaaataactttgttagtgttttgttagactgtttatgaaatataacaagaaatactattttgtgttggatggcggttatttttaaacttaattaatacctgtgaaaaggcctcttacctttatgtatataattaaacaaaatcagagaaatgtatcagttgctcaagttatcaagcctgcattttgcagctatggtcttctacacactgtaagggtagtagaaggaaagagaactaaggaatgttattatttgctagcgctatgttaagttgtcttattaagtaattgagtcctttcaatgtcttcttgaggtatgtattgcttgttcttgtttctacgtataaggaaaatgaagctgagagaagtgaagtcacttttatgaggttcaacagtacaggatggagccaggatttttatctgggtctgtctgactttaaaacacatactcttctcctagcatattctgcctcacaggtgcttagtctttgcctttgtagcatttacagtacagctggagacccatgatgattacatataaagttcagttagaaaagatgggtagttactttattagtgttcatctgtggagtatcagaatagcagtcagccaactctgtctcatatcatccttcattacttttccccatctccctactcaaagacttgcctctattaagaattttgtcattcttctgtgaaagggtagtgtaagttatataagccctcagcgatacatgcacaaagatgttctagttaggggctaatttggcaagagaaacagtttattaatgtttttgaaaagataagtcatattcatacttaataccattttgtatttgtggtaatattttaatattggagctaaatacaaatttttgcataattttttgatgattttcagctttgtgggcctattgggttacataagtgactttttgtttggcaaatgttactcctgtattgagtaagtctaacattacgtcccttttctttttggggaggggtagccagaggagtgagtttttcatttagatcaacattgatcaaccattaagacaagatagttgaagacatgtatgtggactgtcaacaaaaataacattttttgaaaagcttttattttcaacatgtaaaaagtgagaaattacttcaaaatatatgcaatttaaattttttagaagattgtgttgattttaccaagacaggagatcttaaactgtagaaacttttatagtttttgagatcgggtctttgttttttttcacattaatattctttgatttcaaatataacatagataagtactcttagaattttgagttaagtatatgctattttaatgtgctaatcctacaaactaggctttctgtgtgactagactgagatgttgagtttgattcacaaaaagcttagaatggttctttgttgaaaagcttttcgagtcactatttggggcatgttagtgccatttgcaaaggtgaaggttttcttttttttttttttttaaccatagagcttttgataaggttaggaaaaggaagttgtcatctcttcttattactctaatcctgctggaagctagcttcttagggactaaaaccagaacaaatggaaggtccaaaaatgctaataagaaattagtattttcacataataccaaactgtaaaaaccaggccagcaagtgtcaccaggttcctgaaacaaaccataaatacattatttaacttagtattgttaaattgtataaatatgtgggtaactgtgacagaaattatgcacttataaaaagcagtaagttacatagtgaatgctgttttctgtggataagaagctggaattgtgatttcatttaatcgaaagacgcttactttgaggaaacttgtttgaaatgcaaacgcgatttctctgtggagccttcacggaattgctgcttttcactatgattattgctgcataacaggccacttctgtgtgtaggaagtgcgtgtgcaagtccaaagggaattgaggcctgaatgggtgggttatcccaattaacaaatacaaagttttcagtacattttgttttaagccaggtgcacaagttagagttgctttttgggactggcatttatgtatgtgagaatcaaacctgatatcactcttggcagcctgactaaagccatttaaaaataagtacaaattgtccttgaatgatttttttcccattgtagtagcactgaattttccttttttcttcatctgtggtacgcatgcaatcttctgggttttgtttttttgttttttttttgaagaaataagggagctaagtatatacaaaagacttttagtctttttatgaatcatgtgcttcagtggacttacttattttaaaatttctatgatactgtaatgtggtactgtatgttgacctcaattcacatttatccagagtataatagaaacctcaatttttaaggaacttatattagtagttaagtttcttatggccttgaaataattttcttcaaattggtatacaaagaaatagtgtatccctgctatgttaatgactttcgtctatgttcttttaagtaattttattttacgaattgtgtgtgtgtatgtgtgtgtgtctctgtctggtagcctacaatgaaaatctgtacaaatgtgaacagtttgtctccaggggagagccctggggtttgatttcctgtttttggctctgtaagctaacgtgtatgtgctcctggacagccctctgctttgagagtatgagaccaagtgtcttgtgttccacagtagtaacctctttagctaatgtcgtgtgtgtgtgtgtgtgtgtgtgtgtgtgtgtggagggagtgttgatgggctctgaaagaagtcttgtctcgtacatttcactgaatgaaggctgcccatgacctagagcttgattgtgggaggtgaagagcatatatggctgaaagacaattgcatagtggggaaaaaaattaggaaatccttacatttctcttggttaggcaggaaacagagatgtccatagaagaagagggagctcatcagcatgttttattaacagttaatggaagaaaattaatgctaatttattcttcatatacaccatgcaatttgttagaaaagtaaaagaatagtttgaaattctttggtcaattgatggattcctatgttcagggcatagaaatgaaactcaacatcaagcagacaaatacccaagcccacaggctacataaatgctgaataaaaccagctctacaatggaactctgaaaagcgacgggtaagaagcctaatgaatgattgaatatgaccttagcaaaatccctggagtgttgttgaacgatcattcatttccagcttagatgtcaagatgggctccagtaaccaggaaaaaagagagcttgagtcagtacttactgagttttaaaaatcttttgcaacacagtgtattagactgatcattaaaaggacttctctagctgaattttgagctgtcactatagtttaggcccagggaaataaacttaaaaagataggaataattcctaagacatgaatgtatcaatatcctatcctgcttttctggagtaggacttcaaaaactgaaatgtataggctggcagaatgtacttttgtcatgctgataccactgtaaaagagacttaaactaggagatcagttgagccctaaagtatttgcaaattacttgcctagcttgttagaagaagaaataaaaagccaaaatctacatttttgttttcaaaagaaatgatttctttgtttcctgaagagatgagaaaagataaattcttccatgttatatttttacgtacgtatttttattactgtactgtatcaacaaatgataagtattttaatgagtgatctttattgttcatagtagctggaagcatcttaagaaaagcaaatctaatacatctgttttcccaaatatgtaaaaatttacacatgttccagcaattagcatatcgtgtatatttctgagtagcttaggaaaaaatatgaaaacactctggttgaataaggggactgtgaactgtatttctcatttttcattaatatattacagatcaggcagcttatcattgatgatagcagaatcgaaatggcattgggatggctgtagttccccagctttgcctgccttactgctgcaaagaggagagaactgttgggaggaagaggctaaatgtagaagagtgtgggtgctgtcagttcacattttcctcctaacccttctgctaataggaaaatgtcaggcctttgttcccatctaattttagtacatcctggctaaaaaaatgttaggatgaaaaaatgttaggatgatttccaaccatggaactttgaggggtggggtaggggaaggaagaatggaggaaagcgcagtttatactccatatccgtctgcctttctgcaacagcagctagcccctactctgttgatttgggtaatgaaataaatttagatgcattgaagcagtgataattaggttttccttctatcttctcagtaagaagcctagttggtttctgaatggggaaagtcataatatggtatttaatgaaacatacctggcaaaattaaagagctgtacgcaagctttggaagaaaggcctgaaattgtgagtgcaaactacatgtggtgctatgtataaatagaacctttgagatgcatttgtatttcagggaagctgcttttatactgttattttgaatgagagtaatattttgatttttaagaatcagtcataagcaaggcacacaaggctgagctgtttatcccctctgtaaacccaacaggcctagagggaaagcccagattcagtgagagagccagttggatcaaacaattgataatatagtttgttcaagagataggacagaattattggctttgtagttgaaactaccaactgttgtggttgttatttaattaaaaagtaattaactgaattaaactaaaagggcaattctgaatactggagctcactacgaaataagctgtcttcccccagtattcagttagtgagctaaggtatcctgttggaatttgtatgatgaagacattatgtagcagaagtgagatcatttcattatttgcaatgaattaagcagattattttctgaacttgaaattcagttgaatttattttggttcctttcattttataacagcaggtaatttgttaaaatctattaagcaatagaatagatgtcaaacaaatgatttttaaaaatatttaattttggagaaaaaatgattagacctagccaagttacttttcttttctggtcttcagtttttctctccataaaacaggggcacttagtgatatttaacattctgtatccttgttagctcatgttgccataataaaataccatgaacttggtggcttaaacaacagaaatttatttctagaaagttagttctggaggctggaattccaagatcatcgtgctggcaaggtatgttttattttaaggcctcttctctaggcttgtaggtggctgacatctatgtgtgtctgcatgacttctttgtgtgcaatggggttggaggagagagagcgcataagctctctggtgtctcttcttataaagagcactaaccccggccgggcatggtggctcacgtctgtaatcccagtactttgggaggccagggagggcagattaccataggtcagtagttcaaaccagcctggccaacatggtgaaaccccgtgtctactaaaaatacaaaaattagccgggcctggtggcacacacctgtaatcccagctactcgggaggctgaggcaggagaattgcttgaaccttggaggtggaggttgcagtgagccaagatacaccacggcactccagcctgggtgacagagcgagactccatctcaaaaaaaacaaacaaaaacaaagtaaagagcactaaccccatcctgagggcctcactctcatggcctcatctaaccctaattatttcacaaaggccctatctccaaatatcatcacattgggggtagggggtcagggcttcaatatgtggattgtaggggaaaccagcatttagtccataatactcctgaaatcaattaaggcttagaaaaagccctacaaaataggcttctagaatagctgtcccttggtatgcacgagggatactgggaccacctgcttataaccaaatctatacataggtgagttttgcatcccaagaatattggattatccatctgagtttggttgaaaaaagccaagtataagtggacccgcatagttcaaacccatgttgttcaagggtcgactgtatagatggggagattaaataccccgtttgctaactctcagttgttaggtaacttgatggttcttttaaaccaaggtatctgtactcatatatacatatgtacataaaatatttgaagcagtcagatgagtattcaatctaaaaaaaacctttgtccatgttttcttaaactttgtatttgagtattgtcactgatatctatttgataagtttgtatacatttgagcaaagggtttttttttttttctttgagacagagtctcactctgtcgcccaggttggagtgcaatggcacaatcttggctcactgcaagctctgtctcccgggttcaagcgattctcctgcctcagcctcctgagtagctgggactacaggcgcctgccaccacccctggctaattttttgtatttttggtagagacggggtttcaccatgttagccaggatggtctcgatctcctgacctcgtgatccacccgcctcggcctcccaaagtgctgggattacaggcgtgagccaccgcgcctggcctattttttttttttttagataggttctctctctgtcacccagtcacccaggctggagtacagtggtgtgatcatgactcactgcagccttgacctcccaggcttaagtgatcctcctgtctcagcctccctagcagctggggctacaggtgcatgccaccatgtcaggccaattttcctattttttgtagagatggggtctcactatgttgcctaggctggtcttgaactcctgagctcaagtgatcctcctgcctcagcctctcagagtgttgagattaccaacgtgagctaccgtgcctggcctagagatatccaggaaatttaggaatttacatcttattgtttagtccacttccatttttatatatagagatcaagactgggccttaggaaaattgtgataatttgaggaatctccccaatatggttcttttttgacacaagacacaaactacacacagattacctaatttgccactctaagatgagtatagtatatgggtatagtatatgggtctgcccttctttttttttttttttttttttgagatggagtctcgctctgtcgcccaggctggagtgcagtggcgcgatctcggctcactgcaagcttcgtctcctgggttcacgccattctcctgcctcagcctcctgagtagctgggactacaggtgcctgccaccatgcccggctactttttttgtatttttttttagtagagacggggtttcaccatgttagccaggatggtcttgatctcctgacctcgtgagccacccgcctcggcctcccaaagtgctgggattacaggcgtgagccaccgtgcccagcccttgcccttcttatatatagtatgctgtatatactacagtgtatatagtatatgggtctgcccttcttatacatagtatgctgtatatactacagtatatatagtatatgggtctgcccttcttatatatagtatgctgtatatactacagtatatatagtatatgagtctgcccttcttatgccctgtgtctctccaggctactgtcagtttgtctctgtaactgcttatttccccagtgaaacagaagtatgttaaaggtgatagcaaagtaccttctgtatagtaggtacttaaggttggtttcccttccctacatttctttgaaacagcttggagagagaagcagtggtttagaccctgcatattaggaatgtgaatattaagtgagaaatgtaaagcagcttagcgggattgctggcacacaccaaggctaaatcagtgttctttcctccaaggacccttcttcccatggagctaatatgtttaattgtttgagattttacccctcagtgccacagttttagtatattcagttccattgtaggcatttgtgttctaggagtgattaaatgagtgaagagaggcggagtgctagacaagtgagagggaaagtttaggtaggcctttcagaacttcttagaaatcatactgtgtagcttcttccttaatctctagctagcgctggtgctgaagcacttatttatttttttgacagaccaagtctcactgtattgcttggctggagtcagactcctggcctcaagcagtccttctgcctcaacgtcttaagtagctgggactcctgagcggtacactgtgctgggcttgaagtacttttttttttttttttcagtcatttaagaaatgaggatcacatattggccgggcgcggtggctcacgcctgtaatcccagcactttaggaggccgagacgggcgcatcacgaggtcaggagatcgagaccatcctggctaacatggtgaaaccctgtctctactaaaaatacaaaaaaatcagccaggggtggtggcaggcgcctgtagtcccagctaccgggaggctgaggcaggagaatggcatgaacccgggaggcggagcttgcagtgagctgagatagtgccactgcactccagcctgggcgactgagcgagaccccatctcaaaaaaaaaaaaaagaaatgaggaccagatattataatgccagattttcatgaaatgtcctttatgatgtgtcagcagagactaagaatacccctcggatttagatcgttacctgttttaagtggtaattttttttttttttttttttggagacagggtctcactatgtcacccaggttggagtagggtggtgcaatcatggctcattgcaacctcaacctcctgggctcaagtgatcctccaacctcagcctccatagtaggtgggaccacaggcacgtgccaccacacccagctattttttgtaatttttgtagagacaaggtttcgccatgttacccaggctggactcgaactcctggcctcaagcagtcctcccgccttggcctcccaaagtgctgggattataggtgtgagccaccgcatccggccccagtaattattcactaagaaatgtgggtatggtgggggaaaatgtaaatgtgggtgcatttgaattgaaaccaaatggacaaggatatggtataccttccttcattaggtctgagtgccaaggcattattccaagtgatatcagacaaaggaaccaagagcatatccctgtaggatcatgcatcaggaagctggtagaactggatttaatgaaagtgttgaattggatttgggtcttggccatttaggaagcagtggcctgagattttataattgatttttactttgcatcatccagatttgatatccttgatcagtgattcaggtttatttcctttgctgtaagttaacagtgccattcacggtgacattttcgtttgatgttgagtaatactttagtttatctgatttgtccttagtttatactagaattgacagtgtagtgtgtaaaaagtatggtgaatcagttatttatgctactctagaaaacatttggtttggcccggctcggtggctcacacctgtaatcgtagcactttgggaggctgaggcgggcagattacttgagctcaggagttcaagatcagccttggcaacatggtgaaaccccatctctactaaaatacaaaaaattagccgggagtggcggcatgcacctgtagtcccagctactcaagaggccaaggcaggaggattgcttgaagccggaaggcggaggttgcagtgagctgagatcacgccactgcactccagcctgggtgacagagtgagactctgtctccaaaaaaaaccaaacaaacaaacaaaagaaaacatttggtttttcaggtttgtttatttctttaacctttttattggtggttatatgactatctcaatgtctagaatgcttagtatgactatagacatgttggccagagccatattgctttctctagttaatcctagagggctttagtcttttaaccattttaagaaagttctacagagttgaggtcaatatgatatgatgtacctctttaggacagaacagaatcaaagcttcagttctttatgttaggtagtttaagagtacagtggttgactaacctggttttgatcaaggtgtttttttttgctttttgtcccttgtaaaagttaagagaagctgtaactagtaattaaaatagtaagccagcttctcattcatgtcaattctttcatattataggtacagttaaacctatagctgcaggttacgcacatacaaaatcggcaaggctagtcttctcttagaacagtcatgggtatgaattcaaacaaaagatctttgcttttggttaatataatagattgacaaactgctgaggagagttaagaaattcacaggctagtatgtaggctaaatgttcttttcgtactgctcccaggaatgttctgccttttagaactagaggctgatttcttttcttgacattttaaatccaaaggattcagcctttagattgggtttttaagctctgtgaaatcaccaactgtatctagttttagtttcctttctacctaatgaaaatgaaatttactcagtttcatttttagggggaaaggcaggagagcagtagctttgagcatatcactagggatgaattcaaaatcgatttttcttgaggcagtgacttatggcagatagttgacaagagaaaaattaagttttgagcttatatctcaaatactgaatgtgaattccactaaagaatatttaagaaaaaaagttgaaatggtttcatttaaagatggtaacataaacatttagcctggtctacagttgaaatattttctagattaaatgcaatttataatatagcaatatgaaaatactgtaatttgtttttagatatgtttttggtggggtaactgaagcaaactagggaactcaccatgttataatgataataattagcatctacttcatgtaagatcataaacagatgcttttgaaccttagtattaggataataaaataggcttaataagttttacttatgccatttactttgattgtagatagtgaaaagcctttcttacacttttttaaagctttttatttaccatacataaacttttaaatgtttgttattcatgcttgtgttttcttgtagcacataataccagtagttactattaactttgaaaaaaaaatatgaagttgaaataagttttaactgttgctctgttctttttagcttactttaccagaactcttccctccagtgagttgcaagcgtgacatttgctgtgttttcagcacctgccaacttggaaagcagggtttgtgttcaggacttaggctcacaacccatactttgtggtgcacaatgctggcccagctggcatgctttcgtacctcaatggtgctagacagtcagttacaaagctgtgtggcttcacatgcgctgatctcaatagtcactcctcttcaagctgctttcaactcttattttgtatcaaaggagtgggattggtattattaaactcattgctgaggttatttttcagtgaaaataaattgttttatttagttcttggatcaaagagtaattttgtcctcagcaaccaaatacctctttaaaaaggtgtgtgtgtatatatatgtatcattcatgtatgtatgtatgtatgtatatacacacatgcatgattccagccagagctataattcatttcttattttcatcagtggataaaaagaacagacaggaaagaacagagggattaatgtgtcatgtgatccctacatgctaatgtaggtagggttactagttgtagctggacaaagatgtgggaaaatttacagaacttttttttctgagtaagacgtgaaaattgcccccatgataggttcagattttttatttccatctgtaaccagaaacttcttatattttccaaagaagtatattttgctaacatatttccagtcacctatctttttgaaaatacttaaggtggacttggtgatgtctgtcttctcataatttattataagcaattttaaaaaggttctgcttttaaaaagatcttttcaaatgtagaaagaacagtgtgaaatgtgaatgactggcttttaatacaagggttgtgacaaagaggcagtggcttttggaagccaaataaaggggtgaatacacgtgcatctgcatactgctgttggatccagtgtataacgtttggcgtttgtttagttcacttgttagtctaaaaaggatagtatgttattctctcaaaccagtttataattttttagtggtaagctctttttacaaccatacctacagatagatttgatgggaaaaactgaacatttgctggtacttgttcaagcctcaaagctcagctctttgtttgaacgtcacatttatctggttctaaaggcataaaaataaaacacccactaactacctaagacactccttagtgcatatcaaaacccaacctttaccctcgtctgcacaaatgtgcttaggtgaatacttttattagcttgttgatacaagttatagtaggttacacccttaataaaacacacccttattgtcatcctgttgcttaagagctttaaacttgtaataggggagctctctaatatagaatgatactcaatttctatctcccaggcagttttgagtggaaatgtgttgcataccttacacacaagtgtgcctctatttggtagtcctcctttgggagaactaggattgctgtgttttatccctggctttcatatattttttgtttgtttgtttgtttgttttttgagatggagtctttttctgtcacccaggctggagtgcagtggtgcgatcttggctcactgcaacctctgcctctcaggttcaagcgattctcctgcctcatactcctgagtagctgggattacaggtgtctgccaccatgcctggctaatttttgtatttttaatagagatgaggtttcaccatgttggccaggctagtctcaaactcctgacctcaagtgatccgcccgccttgacctcctaaagtgctgggattacaggcgtgagccactgtgccgggccgtcatatattggtcttgatgtaaaagactgcaagtaatccctgcattttatatttcccagggtgttctccggcttaatcaggttagcgttggttggtgataatggaaaagttacaagtaatagtttttagattatttatggatttattcctaaattggcctatgaatttgcatttaggtgtctggttgtgtgcaaaatctggttttgaccattttggattgaacaaagatagacagtttagctccatgtccccaccccattgcagcttttacatagctttaaatctagagttctacatttttagctactcttctgaattgagcagaactctaatataacaacaaccttttgggtagaattttttcttagtaaagaactatggagctgagcactaagaagtgaggatgttttataatatagctgtaggattattatatcatgtgggaagaacctatagtatggaaggttaagtgtgacacaggtcttaatgtatgcatatctttttagcctttggagatacaaatctagaaaatgagaagtaactatttattggttaatagcataacttcttaagcaagtatattctagacagcctcaagaaagcctcagaaccagaaaaacaggctgctttaggttggaaaggaggtgttacagcagaggaactggccatgaccaccatccttggaatgtgaaacgcaaatcatcctgaaagcaacaagaataatggttgtaataattgtttccaggcctgggaccctgcatcttgttttttaagttgacctgatgaactagtaattgtaggaataaactgaatgtttgccagcaggagtcactctaggcttcctaataaaacgttagtaaattaaactctgtccttaaagctctgaaaggctgaggtgattgtgtgatatcagatggctttagggaaacactgactcttttcgttaagcatagcagcattcttagattattccttgggccttcttttgttcaccatcggttcttggatcttgttcctttcaagattggtccttaatgcatttttaaaaagcaacgtatatgggtaaggatatcaatatcttagtatgctgtattctgtatgttagctcattttggctttctaggatgaactgactctatcccacatcatgtaacttgaaatgaatagactcatatcctttccactgattgctgtccattctaatcatgcagcagaactcagtggagcgagctgtagtgtgaaaggagatgtcagttcatgcttttctgaaaagaatgggtccggtgtgatgatattctgaaatatttcagcaatagccatgaaatataatagtttcccaagcacacaaagctcaagaagttaattgttcatttatgtttgatactgggattgaaacattggattaaaaccaattaaatgttcctagaagcaacagaaaaagtttccttatttatgaatagaaccattcaaatggcgcagacacaatccatgtaaagtaatgaggtgttttgtttttttggcaaaggagaacacaaaacaggcatagggagttttaaaaaaacttctctttaaaaatcgctttttggatacaaggtcaataaaataacatacaccagtaggaaggagtaatgggaaatctagggcttcacaaggaaaacaatccccctcccccaggtgagcagcacaatgaaaatactctgcttattctatcagggttacattcctgaacttaagtcaacatcctaagttacagaactaaacatgctctgcctctgcttagcaaccacaaatccttccttcgccagttgcatgtattttggatgtggcttctgaagtacacagtcacagcgccccgagttaggaaatttgcgctttattttcccaaagtgtgacaacactttaaggtcccccctccccgaccccacccgcccgctgtcctgcacgccactgaagtgatcgtttcttttgaacctcggcatctaacaacccggaagctggacgcctgaagcctatgcggcccagcgttttcatcccggctcgtgctgggggcggggagagaagcccgtagggcctctggcgcggggcccgggcagccgcggtggcgcggcccaggcccggggccacttcccgcgtcccggggcctcgcaggcgcgagcgcggcgagcggcgcgcggctgagcccgcaggacgccctctagccccgccggcggcgcgccgcgagtccctcactccccgcccatcggcggctgcgcgcactgcacactcgcctgccgccgccgccgcacgccgcctgcctcctgcacgccgccgccgcgcctagcgcccgggcccgcgacaccgcccgctaagcgccgggccgagttcacgcagccgcggtctggcggctccgcggcggcggcgggtgcgggcggcctggccggtgccggttaaagggacgagttgcaaacacttcaggaagtgacaagtcgatttcctcctccccgggagtcgctcgtacaaagcgctcggcgccggcaggcgagcgtgcgcgcggcggacgcgcggcgggcaccccggacgacttggcgagcgctggcggtgacggcgcggggtccgcgcccggagcgccccgccgcgcacagtaagcgacccggggccgggcggcggcggcggtggccggggggctggccccgagcgaggtccgggccgtgtgcgtcccggccgctggctggagggagcccggctcgcgtgcgcaatgggcttgccttttttttttcttttttcctaatgttgctggtttcctttttttctgccttgtttcgcctttgggttgggtcgggcggtttctccgggcgctcggtctcgcccctgatgcaggcgtgagacttgtcagagcacaggcatggggaagaacaagcctggctgcggcggaaaagtctgcgctccccaggccagggcgggcgggcgcggggactgctgcgcccgggggtgtcctctccgcgtctcaacttgagccctgactagccgctgcggaggaggcgcggagtctcgggagccgggcggccccattcgccccgaagttcccgcatcgtttgcagacaactcttttgttcgcggaagtttgcacccgccacccccggggtgcgggagcgaggcggcgggctccgctgctgctggactgtccggggcggtcaggatgggggtgagggggcattctgtcccgggcgggggaagcccgcggggaggccaccgctggggcttgcggagtgggggcgtccgcgccggcgtggcttttgcacatggcgagaagggccgtccggcacaggcacactggtcgagtcacatttttgctagtcttggattttgcaagcccgtgggagtcaggttccccgctcagggtttctcttggggcagagacgaaagaaacgaggacacccagaatccggggagggtttgcggtttgtgttgtcccaagtgtgttctcgctccccccgcccccccaccttgtcccccagcccccagctctccacccccattttcggacttggggaacaatgcttgtagtacgggccggggcgccgcagcagcgacgaaccgcgcggacaggtttgcccgggtccctcgcgttcggacgccccctgaagccgagctccttccatctgaccgcccgggctcattaacacgtactgtacttaggacgatggtgaacaaagaaaagctctttgcagcgtttgatgaatgggattctgcctcctataggccacactccgagtcttccatacggtacaatctccggactcggtggtgttaggaaagtggcccccggaatggcttgcattccgggtctgggatcctggggtgggcatttgtgccgtcgccttcgccgccgcgctcgccttgcaggagcgggtgcagatggagccaggctgacggttgttcaacaggaacaaatgtttgttcaattgttggatggtggagaaaagggactgtttcctattgactgctgcaggagttggaatggcattgtttattggcctgggaagccaggcaagcgtcttgtgctgcttacaacatattagcagacttccaaatgacatgctagcatatgtgttcccagcagtccccaccggctggcagggagattcctccttgctccagatcctggactcgtttaaaagatgccacctggtttgaggacttgggaaggaatggagtcagccgaccaggtgaaactcactgttccttattaggccaggtttttgtttcattttaatttatctatttaagagtaacttgtgtcagttacagttttgatattgaattgcaggtctacagggtcccctcccccgcctctagctgtggactacagaaacagctacttgtcccagttgatagtcccattcagtgggagaaggtttggctcaggattggtagcccttgactctgtgtctgcacttggctgtcacccatcatgcgacctgggagtctgccgatccagcttccaggcgctttttcaggttaaaaagctaaggagaggcgtggggaaggcctgtatttttttcttccaaacgttccttcagagaacgaggcgatttaaattcaaataatgttgcccaacgacttcctattttcttctgagaaggtgagattcatgtgcagtcattttgatatcaaagacaagtttttaaatagaaactagcaacctcactgctgcagaagtggacttgaatgttccagtcttctcaggacaaagtagagagcattccactgtcttggttcataatgttttaaatcagtttccctcttctcttttcaacgtggggtatgttgcacatagcattttgaaagtacgcaaagttcttttggaaagagctttatgataccttattgtcaccgtggtggttacgcttaattgacattttatgggaagtcctggtattatttcctgggctctttctgtttccatcttttagtctttctctttccccttatatattctctcactgccccgctagcctctccatcctctctacagaagcctagtgggcttgggttcctttaagcgggtccagtgagcaggcgcctgacccttgattgaagctcaggaagggccagcctgctctcctccccttttggaggccagagaggagagagctgtgtttaaatattaggagctggcagcaggggacgctgcggagctcttttaaaaagcacactcttctcacccaccgctcgatgccttgggccctgaagactgagttctgggcccaccttcagattgttcagttgatgttttatttgggcagcgtgactttctgcagttaaattgcgcattgtatggaaaactcttctgttcttgtccttaaataaaaagactgaaataagcaaatactcagatcggcacaacccccatcattaccaccaccacgcacacctctctgatgtgtaataaaagaaacctgcaggcataatttgttatgtaatatgctgataatacaagtttcggttttcgatggaaaccagatgtggagggactctctttaattgatccagcaaggggaagactaatagatgaactagtccttgcaaaccccagtggtgttttgatttaactttaggggagaatcccgagctcagggctttggagaggtttttaccctcagcttctgctttgctgcagctgtcctttttgtcagactcttcctcttttgaaagaaccggttcgttgccaacacaaagcacatggccggagctggcggggctcagcgaagcttagctctgctggactctcctcctccttgcctcgtccggctgctaccctcccctccacgccacaaaacagggtctggccaggggacttgggtgctgggaggagtgttgattgttctccctcaactccttcctgaaatgtcagtctgatcatccagggagagtttctgtttaaacttgtccaacggatacactttccaaaaatcattgactctctttctctgattaatttgtttgtttcctgcctaagtttgagggttttttctggatggctgagtcacctttattatggctcaaggttggggacggcactgtaatagctgaccccattaacagcagtttcattgcctgcctggatgtgaactttggaaacaaacccagaggcttagatatgctgatgtaccctgagacttgcttagaaaatttttgttgtagcgcagtttacattaacatgattaatgactgcgccactgaaaagtccatattcaaaagcaatttaccgttccctagggttcttcttacagtgaagtatttttctttgccaaacaactttgttttaaggtaacttctttgatgcttaatccaaacctcctgtgcacagcgttttggggcaagatttgggcttcgtgtattgcgggttgtggttttggtggtgcctgtcttaacctcaccgaacttaggtcagggagaactcggattcttatctaagaaagttctctgagatcctgagcaacagagtgctgtgctggctaggatgggaggaaatcttccagaggaaacttggcttctgggtgtcttggagtgatgcgaggaggctggagctgaagattttattttctttcccctcacagtgattggagatacttgagcttttctgaaaaatagagacgtccttgggtttttcttgtcgttttttttgtttgtttgtttttttgttaaatgtgggttgattgagagggggaaatgctgatgggtggatctgaaagcagccttaggaacccgagaaaataaaaacacgtttgaaggactctggaagattttgcatttcaaagggtctaccttgtagaatttcacatcacgtcaggggttacagaggagtgtgacaggcacccccgctttaatggttctccgtctctcctgctgtgggggctgcacggggaagctggcttttgcatgggggatgggggacagcttggccagaccacgctggactatcatggagaccacattgcctcttgggcatctgtaagtctcgggaaggacttttttcacggtgccagtctcaggagggtgaaagcaaatcatgttggtaaacagcccatttgacctcagaacgcagtggcaggctaactcctgacttctccactcactctttttgttctcttgttaaacaaagaaacagattcttcccctgcgctagtataatatgattcccaaggatttagctgaaatgggtgcagattgttcaaagaataatggcagcacccactggttgttgaaggcccaccctgggccctgggctttgtatacactctctaattctcaaagcaaacctgcagttacagctgaggctcagagaggccaagtaactggcccaaggccacatagccggaaggcagaaagccaggaaggagctctattccttcagagcctggttgctttccatatgccctgctgtgtgttcatatgatagaggcactgggttctgttttatctcaaagcagaaattttgtttagtcttgttaacaccacagagaaacctagaacttttaactgccttttcccctcctctcccctctgctatggctgtgtgtttttttgttttttgtttttttttttttgttttttggagtgattggaatctgtatgtactgtaggaccaaaggcagtgagtgccatagtttgggaggctgagatgttttgcttcaatctcagaaaaggcagattcacaagaaaacatttccagtgaccttctgggggaaacaggaagtaaacctggcagcccactggaaacaccaccatttattcagattccattttccattcagagagattcttaaaagtgtttccaacttttttttctttttgcatttgtaattcagatgtctcaaagtaaattatgatgtggtggttgccactccaggtctgtacaatatcatattttgtttacgtgcctaaagtaatcaagtaactgaacacaattgtatatcctccagtgtgactgaacttggtacgccccagccagggctgggcagcggccctgcattctgtctcagacagatggttctttgcaggttgcttctcgggggggtgtgagtgtgcgtgtgttttgaaggaagaataaggagacccatctctagcaaggcctgcctggccaggcatgctgtcctttctgcccctgaagagtttgtaggagcgtgctggggcccctgtgctctgaacttctagaagctagagtaaagtaatggttctgaatattggctgcacattagagtcacctgggaaggttggaaaaaaaaaaaaatccagatgcccaggctgcattcaggcccaattacatcacaatcttggagaggggggcagcaacccagcattggtatctttaaagttcctgagtcgattctcttgtgcatccaagactgaggagtgagggctgtaatagaccccatgcatacctacgggtcggttccttagtttccctattccttagcaggagattgggggctttcgtattcgggagcggagcaaacctattggcatttgctgctgctgctgctgctctgtcttggtgaagtggcatctgaagggcacccatccctaggggaagtgtctgctgtgggcatcatcgaggtcatttctgtttctgctgggccaagattcagcacagtccctttgaaccaccttctttccagattgaagggggcagattttactcaggctgtggtttcagggcagttctcatgcaggccctgcctccccacggtcctagtggtcttgttctttctggggatttggcataccgtgtgcccctggggctcaggggaggaaagatgcagttaggttccagggcatatcctggcaactcccagtgagtggtgagtctttttcacccaggtttgcagtgaatgtcactctgtcagctcagagcctgtcttcctgtgaacatactcaggattacatttcatagaattgtgtttagaatggccagggggcttggagagtgagagcttcttgggcctgctgatgtaaccttctggaagagaagtccgatccttaagaggtgaggtgactctcccagggtcgcgtagccagttgtcaaaggtgcagactctgtctcctgagtccctgccctactgctgtgttctcatgacgtggaaccttaattcctgcttgcaagacagcctgctttagcgtagaccagcaggtgaacttgatcattgctcacagagttcattagccaagtgaaacatgctacccatcccccgtccccaccccccagtcccaatggaaggtgctgaaaccttgtaaaggtgagcttgctgaaaaaggttttggcctctttgccaaaagtgtgtcagtctgcctggctgtgttgtggtggtggtgagtagtgaataagggctcttccccctgtggggagttgggtttgggccgagtgaagggagaagaggagaattgctatttttctcagggctgcaatttccacattcatttagcagacattgattggacatctgctgggtgtccagtgtggagccgggcactttgcttcattagttcatttaatcctcagcacaacctgtggctcagggactagcccgatttcattgctgaagacatgctgcctgcagaaatcactcaccccaggttgggatttgaacttggcccagctgacctcagccctgtattctttctaccacaccctgctgcttttccatccagtgctcaccaggggaggagagttcctgctgtaagacacgtgcattgcccagtgggcgttccctggcaactcctgcctgggtgccatgctgcagcttctaggagggggcgtgggtgggccctcgagctcctggatagctgggtttgtacaggtcctgtctggggccgctgtgtgtcctggcagctggactgtgccttgtgcaggagaggcggcttatgcaggttccagttgctgctgcctgcccccaccccgtggaggccaccctccctcccaggctgccctctggctgaagcctgaagcaccctgacagacaaagcccagctgggagaggcctcggccctgcctggaattccccttgctctggcattggccttggccatgggcctgggagcagagggaggttctgtccgctggctgggagcagcttctctgcatgtttggaagtggaaagactaagttctctgcagctgggtgtctccatgatctgggtgaggagaaggagcctggctcctgagcccgggggaaaagaggtctgtggttttgagtctccagaaggagtgcaggatgcggggaagcccctctgtggcatgatcctggggaccgggccgtaggaaccgctctcccctgtaatccctttggcagtcaaacgattcagtttcctggctggaaggtagtgggcacagactgcctacttgctggacctaatttgccctgtaaccctcactgggcctctgatttctcaccttgctggtcctgcctcccagcgtttttaggaagatcagtttagagcttgtttgagaagccccttgcaatgggcgtagtgccttgcagagcagtgccaggtaggagatgagtgtgactgggcaggcaggggttctgctgcaaagcccatggtcggctgcatgccacctaggtgcttcttgtggctgcaggaagaatgggactgtttggcgtcacagaggaactttgggcagagtctaggtgaaacccaattctgtatcatcgagggcaaaagtagcattcagctttggaatcagaagcctgggttcaaatcctaggtctgccctttgcccgccatgccatgtgcctttgagcaggcgactgtctctctggcccccattccttcttctggagtatggcagtgctgacagcacccccagccagcccataggttcggggccctgagtgagaccacacctgaggacacttagagcccaccagacattagtgagtatctcacgcagcctgtggcaagcgcgtgctgttgcgaggactgaagggaggctggaaggacatgagtcaggcaggttgccctgaggaggtcagtcagtgatgacaagatacaggacagagcagaggggacttcaactggaattgggcttggctggacgggtcaggctggggcggatagagccttttctcctccagcatcttcctctctcagatagcgtagggtttttttcgggaggaaaagttgaaagtatgcattacagtttagtttgcagtgtgtctgttaccaagagttgagactggtgaaatctaagttttctctctaggaaacgaaatctttttttaccaaaagtgatttacttttgctcctaagcatagaacgttaaatgcatgtatgggtcatgatgtggcctcaccgtcttggctctgctgccaccgacacttctgtgaatgaattctttggaaaccaaggaattaatggctgcatacctacctagactgagagtgaggggcccacttaccaccttctggattctctttaggtgctttgcagtgggcatctttgttttttgttcttcctctcacgttgggggagctgccttggacacctggagtcagcgtcttccgggtgcgggttatgtggttgcagctggagcgcctgcccccagctcggcctgcggtgtgattccggctgcttctagatccctttgccacctgaacctgacctcagtctgcaggagcaagagctcatctaagcttgctgaagctttgaaaggagcccttggcttggaggacagagggaagggtccaggctgtgccgcttggcttctgttggtgcaggcctctgactcctgacacgcctattccctgggtctggtgagcatcgcgcctcatgagtctggggctggctggcatcctgtggggtgaacaggatggacagtcttgactcatgagatttcctgctgcactttgggtagctttgagggacacccctttgtatggagtgtgaagactcatgctgttcactaggttctgggagggggccctgactccagactgtgacagcccctcccctctggtgctggccctagagcgtcctttccagaggacccaccaaggtggctgggcatgggtggccttgaagcagacctgctaggacaatgagatcctgaagctttgtgagcgagggctgcataagggaggtctctgaggtgtctcggctgcctctggtctcatggatgtgacagaactcatctgccaggtggagcgtgtcatcctcacccactgtgtcctccttgggtgtgtcactgttcctgtgatgagcacaaaacatacctgccatggtggtggcccccaggctcagtgcagttcaatcaatgtggagtaacagctactatgtgtgtcagacaagtcgtcaggccctgaggaattcagagatggatctaccgaatgtctgattttagggagctcatagctcgtattatggacagtcagactgcaggtttttattgaggttctactatgtgctagacacagtgtaataaatgaatgaaagtgtgtttacacaaggtactggtgagttacaccgtcctctggaagtcatagaaagtctctctaactgagctgaagagaggagggcagggaaggcttcctggagggggtgacagctgacctgagtcttgaagaatgagcaggagtttagacagatgaagaacggggaggaggagacattcgagaccaggagagcaggtgtccccagtcacagcaccatgggactgtgtcagggaatctgggagacctggagcctgagtgagacgagtgtagatttcagaggggagcggagctgatctaggtcaggatggcagtaaagggaagggcgaagggctgggagaaagcccaccttcggggtgacactgcccaggggcccagccttttgaccttggagtgaccttcctggagaagcatgagactagcctctgagaattttcatcaagtgccgccttggccagagtgatgtggtctttgtttatttttagacaaaactctcgcatttagcaggcgcccttgggattcccaagagcttccagaacttcttgtctgtgctgcgctggaactaaagaagtcaaagttctggcgttgtgtgagttgaaacagtctgattcagtgtaaaactaccttttttttttctttaaagggaaaaacaggcacctaaccgtgttggtgcgatggaagagggagcttcggtgccccctgggctctgtcatagcctgttctcactagtgttctcaaaggcagggggaagctgctgacacagacactcgagaatggcgggcctgagtcacctgactcttggcggccagtgcgcctgaggcctccaccgccctcagatgccagcccagattccaggccccgttgactgtgtggcatgtgacctgggcccagaagaggagaattaagaaaaatactgaacctgtgcagaggtggaggcggaactgcagttagcagcccatcttagctttggggggtgtgttttccaaggctggtagggttttgctcatctgcatttactcctaagggaagaagaaagtgagtaagttagccacagatggttttgattttaacagtaaacctctctgttcatctcattcccggggaggttagcacatgccttcacctgttagaaaagaaagtaaaagaggatctggcctggctgcgtccgcataggccaaaagttgagcagcaaactggagtgaaagagcgttatgaccagaagtaggagcagagaggagatcagacaccttgggctcaggagagtacgtgatagtccacaggtaaatgagttctaacttgctttggggaaaaaaagatttttttttttttttgtgatggagtctcactctgtcacccaggctggagtgcagcagtggcgtgatctctgctcagtgcaacctcagcctcccaagtagctgggactatgggcgtgtgccactatgcccagctaatttttgtatttttagtagagacggggtttcaccatgttggccagactggtcttgaactccggacctcaggtgatgcccccgcctgggcctcccaaagtgctgggattacaggtgtgagccactgcccctggccaaaaaacaatttttaaaagcatgtgtgaggttcaggtgagtccttatatgttacacatgatttcaggaagtcattgttctgagacatggcgtggtggcgtgctcctctgccatggaggagcgtggccagggtggtgtccgtctgctcacctgaggagctccctgggtctgccagcttcctgcctggccaagcccttcccctgcacttgtaagacgacgactgagcgtggctgatcctgcccggtttctgggtggatagtggaacctgggggaaccagggtagaatcccttatgggaggcagccattggcctggccaggctttgggcgctgttggagacagggctgaatttttagccctgagtgtaggcacaggcgagagctggagcccaggcacttgttccctgtgtggctggctgctcatctctgatttagctttggctcaatttttgtcctaccccctgattgctactggagccagcatggtggtcacagccactggtgtcttagggccctggaagagaagacagcaatcccaggttgccctctcctctgctcagggctgatcctggcagacatggaggaggagataggcaggaggagatagggagaagacttgggagggagctgggtcttcatgccaaatgcaggaagaaacaagccatcgttcagttcatgtttgagctgcgtcagcccatgtgaaggcccccacacctctgggaagaactgcagggagcatctctctggtccccgtctccaaggtcggggaagcattttacagttttggaggtgatgcggggaagggccacagccaaaacttcatgtggcagtctagcatgccacacctcactggaatcccgcacgctagaagggagccgccttgtgagaggtgttccagtgaagtggaaccccaccagtaggtggtgggatgggctccagaacagtgtctggaacaggaactagtagagctcaacgtcttagattccttaaaaaaaaaaaaaaaggttgattttgtgtgtcttaataatttcctttataaatggagcctcttatagtacaaggcagtacagatgagcccagacagttgggcagaatgttgggtagggctgatgtcagttagaaaagcctgagagaagaaagagtagggcacagaaccagtgaaaaggatccctgggttctagtgctgccacttgatggcttttgacttcggttcagccacttcacttctctgagctgtgattttctcatctgtggactgggaataatagtgcctacttaacagagcaggaggaataaacaggatagtgcgagtccaagcacccagttctttcccgttttcattcacccaacaagtactttttgaatgccactgtgcgttaggcttcgccgttaattcatataaccaccctgagaagtgagtgctgttattattccctttttatagatgaagaatatagggttctgtgaggtaaagtgcccaaggtcatttagctcatgggcagtagttctggcgtttgaactcccaactttaggattggcaaactatagcctggtgactaaatctggcccactgcctacatttgtaaataaagttttattgggacacagccacatccgtttgtgtaggtaatgtctgtggctaccttcacaccacagcagcagaatttatagaccacagggtctacaaagcctaaaatatttattgcctggccctttacagaaaaaaaaatgtgctgacctcttctccacatgaatactctgcactccggacctgggctgttcagtatgttagctgtagcctcatgtggcaatttaaattaaatctaaatgaaacgaagacttcagttctttggttgcactagccacgtgtcacatgcttaatagctgcatgcggtggtcacctctcacgttggacagcacagacccagaacgttgctgtcattgcagagtgttccatcaggtaggagcacacgagactgtgtcccagtgtggggagaatccaaatctgggagaaccaaaagtgcagaggaggtattctgctgaaagaaaagacactggaccttcctgctcccaaaacacagaattgaaaattagtttgttgactctgaagtgatggagaaatgtctgctgtggcagagggaacctgggcctggagtgaagaggctgtccctaaatcctatgaccattggcaggcccccaccatgcccctctgcagcctgtaacctcagctcctggttcactggggccgttggcctcatcaactctgccatgtccagtgccccatgtgtgtttgcatgctgggtcctgcagaaatcccatttttatgtattcatacctgttctgttctgggccatttgggcctgatgggttataccattgttcctaccatgctggaatgggaaatacatggtctgatgaaatgaccatgttttccatgggcatcagataaagaactacttcattcattcaaaatgatggctactgtgtggcatgaggaaggaaggtgagttccaggtacctcagctagctagtatcacgtgacttactccttaaaatgctgtccactgccaacactgatgccgtgtgttgagtagcttggaattgggctgaactgtagctcttgtcttgcttggtccataaatgctctgaataggaatctctttggaagctaactaggggcagagtcattctgaggggtgaaggcaaatatggagggcgtagatctccagttcatcagacccaggcataaatgcatcagtgctggacccatctcccccacatttgtgcatgctgatagactctgagtgtggagaagagctgtgtggctggttgtagtccacgctgtctacattggagtctctgaaatgcattgtacagtcaggagtccagtccattgctcctgttaggaatggctggcttttccatgtttggtttacatggttacagtctgcacaaatcttcacaccttaaacaatgcccactccctctgtaatcaggatggaaacctttataaaatgcaagaatgacataccaggaggacttttcaggaccttgggcaagagtgaaaaaagaagaaaaccagataagtaagcctgatgaacttagctctagaatagttgcatgaaggaagtgcctggtaaggaggaagttgtgtttaagaggtcgtacgtggaaaattttttccccacatgctttaaaagggaaaagaatagccttgaaaggccagccttgattacgtgtccccctcccatcccactgccacctttgacactgtgcttgcctctagccagccactcctggaatggtgtcctgtgtcttccttcttcagccagtggaggggtgagatcattcgagattaggctctgccctaagtttctcactgctgtcccagccctcagggagactaattgcatgtgcccaaaagaacccgggcacaaatacctttataatggaaattatctgtttttagagtgctggcgttttctgagcacctactgtgtgccaagcactctgcatatgttctctcatcgtctgctcattgcacagccagctgggggtgactagccccgctgggcaggagctgagcttcagccatgtccctgagagagtgtggcttgtgatgggctagagcctggcttgaaaatccaggtccctctgctccaaagccagtttctcctcaccacctagttttgtccccaattgtgcacatgttgctgtttcaaagagaaatctcttgctcctctgcatgggttccctgatgacatttttatcactgcctgtgggcagagaagtaggttgctcactgtggggtgacatttaagaaaaccaactccatcaagctttccctttgaatgtgttgttatggtacaagaagtcttcgtttgtcctgggctattttgaaataaaaggcaggaaactcccctcttgtttctatatcttgcatagaagtcatcaaaacagaatcctctgttctgtgcggtagtcgtgattgaggaagcagctgttctcttcatgatgacccaaccaaagccagcagtctggaggcgtcagggatccagaattgtctcttccatctgctgggtttacttgcgtgtgttagaagtatttggcatggaaactctttccctaccccacctcgtgggcgaggccagaagggagctctcctggtgggggcagggcagaccccaggctctgctgtacttcagataatgccacggtttcctccatagaatgggtgccacagcctcccatggggccaggctgagtgaacgaaccagatcaactgtctctccaagtccatgggtgggaaggcaggcctctcctgtctgtgattgggagttgtatgggtctgctttgttgtgcatggaatttcacacagtctgagctgtctaggcattttcaggcctccagctaactcaccgagtgagccagggagtggtgccgatgagaatgtgtgactggatcgcgaagccaagcgagtccatggagatcttcaaaccaagatgaaacttagtcgtttgagtgttttcaggggtctgaatcgtcagcatcatttagactggagtttgcactctggtggtctgggtctgggggccagatgtggtcctcagacatgatttgtttgtctcatatgatgctttacaagtttttaaatttcttgggaacataaaaaggagattgtgcaaagaagtcctgactttcagtttctcttaacaagtcaggaggtaaattttaatagtagcctggatcttctttcccaaacagcccaccacagttagctgtagccagagccgtccacggtgggccaggcatgttctctgcacatcatctcggttcctatgcagcatgcttctctcatttgtgtttcctgcttggccctggaaggcatttgagtttgagatccctggagtggataagacattgggaaggcagattcagattttctggctctccaggttattggcacagggagaacgatggtgaatggcagtgactagtagaaatgcccaggatgtttgcagtgctcaaggtcattgccatcataatcctgctacctcgtgttccacctgctagtaaacttgcaaagataagccagtactccgggcactaataaaaactctgaaagtacaaatatgtcccttaaatcttggaagctagtctcaggccaggggcccttctaccctgtgaatggccctgtgatactgggtgacctggggattcattttgtacccccgcaccccccccccccacaatcactcaggtgcttcacctagtgtaatcttcttatctacaagtgccttcctgaggctgaggcaggcagatcgcttgagcccaggagtttgagaccagcctagtcaacgtagagaaaacccatctctactaaaaatacaaaaattagccgggtgttatggcatgcacctgtggtcccagcaactgggaggctgagacgggaggatcgcttgagcctgggaggcggacgttgcagtgagccaagatcgtgccactgcactccagcctgggtgacagagtgagaccctgtctccaaatataaataagtaactaaataaataaaaagtgccttctggattttaatagatattgcaagggaatttttacaaataaagatgtaatttttaaattctcatgacaggcagcctagctgctgtgtaccaagtagataacttctggtgttagacggaaatttcttagggtagatgaaacatgtatctcagctctttcttttgacagagactcaatacagcaagtagaagtaaagcaaagatttgccagatggtaattagtatttttcaaagaattgaggtgttctcttcgtatttcttcaaatatctaatagcaatccctcctatcatttatctttttcactcaaccctgtttttatctcttcgtatggcagctgttctgtgactttttgtttccttctgattctcacacgtatttcaccgcatagtcaacctttgggattcttagtgtcattccaaatggtttgctgaatttgagaaatgtagcttgtcaatccattgcctgaaagcccttcccatgcctttcctttgcagcagaaacatggcatcctcatctgcctctttctcacctactggtcagggcattgtgcacctgggtggttggttcagcctctgattctgctaggccaaggctctgacgatgccactgttctccttcagtgcattctagggactgttggagctcctgaaggccaaggatcatcttgacctagatttagatttccagggcctggccagaggacatgctgggggtgggtagtaggccacccatccaattctgacctcatggcttttgcaagaaactcaacttttatggatcctgattttctcatgtgcaaaattgtcctcccagttactagggttctaggtaccaaatccactaaaaatgtgtttttcaaactttaggaaccaccggactcaacctggagggcttactagacacagctgctgggtcccaccctcatgcagtttgtctggggtcggggactgaaactttgccttcctaatgagttctcaggcaattctctactgatccgggtccacgcttggagaaccagtgcacattgctgaagcaggtgccaggtaccccagtgttccccccagcaaggatgtgggttggcctgtgtgggtcttggctgcctggcatatgaggctcgtctttcctttcattttcccactgcatcttattttctgggaaacttgagactagattcccggagatgttttgttttccgttcagccatcttcatggaagctgtcctcacactctcaccgtgatagttggagacacatttatttcctacctttaggtaattctatcactaacacacaccatccactgtccatctcggtttccaccctccacctggaacccagatactaacggaggcagccttggcgattttgagttttgagcttttggtttcccagataggttgattttacccgttctcaccaaagacaggccgcatttgggtcgagctgacagagctgtcatggacacagcaggttaccctgtactcgggaatgcttcatgaagcttcccactcactgccgtcagtccaaggctgggcgccctttgtttcaggtgccctgaaatcagtgtctccgtgcagtggtgggaaatagagtgcttaaccatgtccagaatcaactgctgtaccctttctttcccttccctgatgacacctgagcccagccggggctgctggaggtgagagaccctgggacccatctggggaagcaggtgcagagccaggaaatggtgcgttgaagtccatacagtcagccatgctcacatctaagtgcttagtggtggtttcctctcatttgggggttttagttgtccagagtgaacctgaaatcactgctgggtcttgtgtctttagctccagatgtagtcactgggaggtgacgggcaggctttggctttgcctggccttgaagttttcctcacagttttgttttgtcaaggagtgttcccccttctactctcgctcctcagaaacaaggggacactaactcagtcatggctttgaatggagcgtttctgtgtggttttctccttgtcccagtactctgccttctgcagctcccagcccccagcagctgggcacattggcccttgtgctttcatatccacgaaaacacgtgggaagcgcgtgcccagcacatgccttgatcacatatttgtaactcgggagtctgagatgatcgtgacattctcgtatggggctgtgtgtggccactcccattccccaagggagaacacaattactgtattgtctgtgggcattctgggcgagctgcttgggtcacggctggggctgttggtatattgggggatggaaataaccgttttgcagcttcctacctttatgctgccatttacaaaagagggaggtttgggacgacctcttagaatcccctgggtcacctggctttgttcagctgagtaaaccaccagcctgtgcccccctaccccgcccccatagctcagcttgtttgcctgctattcaggcaggacagctctgggagggcagacctctgagaggtggagagaagcagagtgatgggaggcagagagcagggtggcggcttgtggctgtccggtgcgcagagctccccctgcctgggccttgtgagggcgctggcgctggcactggccgatgttgtggcagctgacctgtctgggcatcctgaggctccttccaccaaaagctgggaaggggccctccactcccagccccgtccccctagcttgctggagtgtcagacatgtcatttagcagcatcctaatagaataccctcaccccatctctggcattgaactcctgcccaacactcatgccgcttcctctaggaaatctccccagatctttacctccctacttggaattccaggctcacttctctgcccttgtggatttattatcgtatgacacactatgccttgtgggaaacctaattgaacacttgctgtttgcgtgaacttagttatgtatcacctgccttcttccctcagtccctagcacagccagcctagtgcgtgttggacttgggacgagactgataccgggaggaaataatgcccagagagaagcacaacacagggagtacatgagatttgccggttcaactacagtcacctagaaatactttttgtttctgagtaaaagtctgttctaaggagcgcagcgtcacatgtgtatataatcttcccattgacccattttgctctctgtggaggctcccaggaccttggccctccctgtcccactggggttcctgcagaggcctgggctgtccaggctctgcctggcccagggccggccctgcaagtgctgcccgcctcacatcaggccctgactgcagcaagactcttcctcctaaaagcagaacacagaaaacaaagctgttagggcagggccctgggctctcagttttcccatgattgggtgtgagagggctgctggccaccctcccgcccacagaaactctgatgagtgttttcaggttcctgaggaggtgtgagtatgatcagatacaggggtttttgtgctggtcactgtgtttttctgttatgctctgctactgtggaacccagaaaacttttgagcccagcccctccgtgaatcaggaggtgctgtgctttgaattagtgttaacaacattttgatagctatcggaaaccccctgcaagcaagacagatttcagtatctctggcaccaagaatgttgagacttgacttaacgtggtgattgtgttctttgtttcagcagacatttcctgagcagctctttgtgccaggttctggggactcaggggactgaggctgggctcatgccctccagaagcacacagtctgtaggggtggcagcttgctggttcatttcatggccctgtgattcaagctctgcattctgcacagaggcagagggcgtgacctgactcagtgtggagtgtggaggtcttcctggaggtggtgacacctgagctgagtctaaaagatgaggttagagagtctggaggctgagagggcagcagggagcaggggaagtgggtggcaagttctagcctgagagaccagcatgagcagaggtctggaggcaggaaactgcatgtggtatttggagaactccagaatgttttaagaataggcagtacatgcatgtgtacaaactcagcagtgaaaagcagtttcctcatccctgtccccagctacacgtctccctccttcctggggggagctcctgttgtcattttcttgtttgtcctcccagagatattccatatgcatgtgcaagaatatgcagatatatacacacacaaatgtgtgtataaaaatacagtattttttatatttttgattttagaaagtattacctatttcttgtgaaagtcaatatctcgtttggttcaaaattgaaaacatacaaaaagccatttcttgaagagtcttctctcatctctgttcccggctacccatttccgctccctgaagacaggttttatgttaagtttcctttgtatccttccaggacttctgtattattggcacaattatttatttagtttcacccaaatgggagcttaatatacccactgttctgatctttgcttttctacttagcactatacctgaagatggtttcctctttggatgtgttgggctcccaaagccttcttttttttaatttttaaaattaaaatttaaattgacacataattgtacttatttatggggtacatagtgatgttgcaacacatataatgtatgatgatcggctcagggtgattagcatttccaacatctcaaacgtttatcatttctttgtgtcaggagtgttcaatatctttcttctaactatttgaaactacataatattgttaactctagtcatcctacagtgctatagaacactagaacgtactccttctatctggctgtaattttgtatcctttaacaaatctcttcctgttccccgccttccccctacccttcccagcctctagtctcctctgttctgctttttacttctatgagatcaaaattttttaagcttccacatattctcgtagcctcttagaaagctgcgtttcgtcctttgcatggtgttgcagtgtgtatttatcctgtccttcctgttaggcggttaggccacttcccatcttggctgtgcctaacgatacgatatgtactattttgctcatgagtaggacagtctgcagggcaggctgatttggcactcacacacgtgttcacagggagagtgagtaaggaggatagaaccgcacgaggacacaggcaggttatgttttacgctcatctctctagaggttgacttgttcccccttgtgaaaggcaagtgactttaagttggattctgctgagtcttgaggaagctgtcttactcctttactgtctcccataagtaagctctgcaaaaggagacctggcccagtgtggtctctggaagcaaggttcgcccaggggtgtggttggcgtcgcttggggagactcccttacagactgtgaccttcaggccataccctgcaggacaaggtcagctagaactgaagcctgcagtgcggctctgccagccttgtttgctggggccttgtggatgtggatgccacctccggcacttgctagacttgggcctcgtgaacatcacagttctagtcagtagtttgttgatttattaataattgaagcgagtaagagtctgtccaggcaggggacctgccaggatgtgggagggagagactgcagggtgactttgcacccatcccatgaaggttgtgatgcagatttctgaactttattttttgagatggattcttactctgtcccccaggctggactgcagcggcatgatccagactcactgcaacctccgcttctcggactcaagcgatcttcccaccccaacctcccgagtagctgggtccacaggcatgcaccaccatgcccagctaatttttttgtatttttggtagagatgggattttgccatgtttcccaggctggttttgaactcctgagctcaagccatccgcccgtcttggcctcccaaagtgctgggatgacaggtgtgagccaccgcacccggcccagatttctgaactttagcggtcccagttattttatcatgctatttttatcaagatattttaataataccctctgccttttagtgcattttaatttagtttttatttcactcatccatcagttgttaatagttttcacttccatgggaggggactgtggcttatgtatgttcatgtcttcagcccctaccatcatcccagcagtcacaaagtagtcactcagtaagggtttgttgaatgaatgagtacagttgcctgccacgcaggcttttgtcaggactggtggcatgctgttaactgttcatccagcacactggaaactgggttttggtgcttcaatgtcaacctctgaccagtacttgttaaatttcatcaattctgatcccatccagttattcagtcggatagggtttctttttttgtttttacattttatgacttaaaaaaaaattattttcgaagctaggacctcactttattgcccaggctggaggcagtggtgtgatcatggctgactgcagccttggcttgcctaagtgattctcttgcttccgcctcctgagtatctggggctgcaggcacatgccaccatgcctggctaatttatttttttgtcaagacgaggtctcactatattgcctaggctggtattattattatttttaagtctgagaacatatctatgccacctcccttgggtctgctcctgatcgaggtggccagtgttggtggtttgtttgtttttttttttttttttagatgaagtctctcttttgtcacccaggctggagtgcaatggcgcgatctcggctcactgcaacctccacctcccaggttcaagcaattctcctgcctcagcctcccaagtagctgggattacaggcgcccgccaccacaccctgctaatttttgtatttttagtagagacagggtttcaccatattggccaggctggtctcgaactccttacctcaggtgatctgcctgccttggcctcccaaagtgctgggattacaggcgtgagccactgtgcccggccgtgttggttttttgatgtgtaacttttccttctcctgcacatttttgaactccatccagatgacactggggaagaacccctttccacagcgaggtgaaggccagtccacatttggtttgggaggtgcatggaggagtgctcagaggcctggctttagagttttgctgctgacttagtgaatgagcttcctgagagcaagggaagtacaaccaagcctggttcagatggctccactagggggacagtgacagctatagccgcagctggtgtacttggcagtctttcaagcattttggggtgtgctgcggacaaacaatagaatgaatctttgtttctggagcctgggccatttctaacgaggaagatgattactcatttttggaagttgggttaactcttccagagtcttttgactctcgcttagatctgtaacgaaaagccgagaagagttcaccttggcatcccaaggtgtttgctttaaagccgggtgactctggttggctgtgtcatttcctctttaacacccctccacccaggtctttgccctaagtcaggaggcctgattgtcatatccagagtgcttagaaggaagtggggcaagtgtttgcaaatgaggtgcccctttcttctcctgttcccccacccccatggcatgccaaaaaataaagaaggagctcaagacccgttgagcagctgttcctccaaacttcttagattaattccgtggccagttctaagtaatttaaagccaaatgcctggacttagctttgaattaggacttcatgaagcctttcttcgtcttcttccttctttcttcttcttctttttttttattttttttgtgagacaggatctttctctgtcacttaagctgtagtgaagtgttgctatcatagctcactgcagccttgaccttcctggctccctactcagcctcctgtgtagctgggaccacaggtgtatgccaccatacctggctattttttaaattttttatagagatggggatttctccatgttgcccagctggtcttgaactcttgggctcaagcatttcacctgcgtcagcctgcccaagtgcagggattataggcgtgagccactgcgcctggcggtgaagcccttctttgcagaaatctctttctctgccttaagaggcaagaatctggtgctattttgatctgtgaatagacagatggctgttgttacacatgcagcggctcccccgccattgtgctgtggctggtggtgggagtagtcttactagaatttatcctgccctccagaaccctcccctgcagtaggagtcaggtagatagctttggctgtttgacctgagaggtgccacagagctcgggtatacttgtcatgtgacagacccgcctggcagcttagagtccctccagttttgttttggcagatgatggcattctcgaatgtgtggtggagcttgcagcgcgatgtgggggtagaagggagaaggcggaaggcttaccatgtgattgatgagcctgtctgattaatttctacaacagaccctgtaggttggtagatatgactcagtcagatcaggaagggggaagtcctgaagtgtgagctgaggttaggatgtgacctctgatgagtgggtggcacatgggcaacctggtgcctctcgtgcctatagcagttcttacagagcttgttgggaccttcttgcatcacctgtcatgtcccagtgtgatatagtcttagaccggtgtgttggggctaccagcctgcaggcctcctagataaagagatcactgccctcgcagctgtgttccaaggcccagctgctgagagattaccttccctctgtgcagtgtctttgggggttctgtgagagctgtagacaccaacaggaatgcttctccctgcctgctgagtgactggagctgcaccggtaggaaagctgtgtctgtagcctgggctgggggtggattgtcctgcaggagagggagagtccgagagctcataaacattttgtaaaggaaaaggagattcttgtcctgagagttgtcctagaagatgaagatgtcaaaactggtcactggctaacttcctggctctccaagaaactcctctaaatcaggttgttgttagcgtcactgaaagacaccaagatgcccctgtatgcataaggattgagcttggaaaatgcaatcacgcatacatccccatcctcaccccatggatatgtaagagaggggcaggttctgcaacaccacctccccgctacctcggtcccacccattggaagagtccctgtggcctgctccgactctgctttatgggaggtcatagccagggcactttgatggcagcaagtaaggatttggcctttgcctttgtccagtttcctgggaccttgaactgcaggtcaggtctgagtaggactggaaaggccagcatagcagttgttccaggacaggcatcatcagcttactgtcctttcttatagttcattcagtaccttcaaatctattgattttcatgctctctccagagttgccatttgcctgtgacacgtgaggaaactgaggcccagagagtcataaagacctggctgaagccacacagctgatacgtgactacagttagagtctcactagtcagaaacggagcttatctggcccagcatcctatttgactcatgagggaactgaggctccgaggagggaaataacttggcaaactgggcagagccagtaagtggcactgtcaagcccagagcccccatcccctaagtcctgcttgatccacctaggccacacagccttttgtttgggtctttccatttttgtttttaaatcttttttttccacccctcttctgttggtttttagtcatggtttgagtaaattcagtatacttataaataggtccgactgaagaacaggtcatggttgtcttaggctaagtggcttaacatgatagtagattatctttggggcccgctgcggtcccctcattgtcctctggttctcttcccattctttcccttcccccggtttggagcagaaggcggcatctagctctgtggccactcggtaagtgtgagttctcctctctccgtgcctcttgtccctcgtctccttccttttgagtgtgtcaagcagcttccagtctatagcaagctcttctttcatagtgtttgtgggttaaaaggacatgagcggtcgtgagaattacgggagtgcctataggaagctcgtccatcagttatttttcattgataaatggactcttgacaagtcatgcatgcagttggcttcagtttcaagaaacaacatgggctgtctcattcccatgttgagatttgttttggctttttggatcccagcacttttatgtccctgaataatgtcattcctccccctcctcttgaaatgttatttgctttaaaaagcagaaaatccctacaacattgaaaagtccaggagaacagagttccgatttggttcagcagctcagtttactgttttgtcttgttttgtttttcccccttccattaaggagacacataggcgagcctgggccactttgttcagccaggggcccaggtcaagtctctttcaagctgtgtagtgtgactcccagtccttccccaagtgtggccttcggtggcctttgattacctgaaggactagatcagggaatatgttttagccccagttactgaagaaagcacctctgaggacacaccttcctgtggagggagggatgaggaaggggtgagtatgccctctctgtctaaggacagcaggtgcttcatgcgtacagccagccactctcacttgccctgctgaatgtccaccagcccagttgcaggagcaaggtgcttggaggactcaaaaacatattcttggcccctagaagctaatgctgtagctgtgaagacgagatgcttttatccaatttatgagcatttaataagggcctatgccctgctaggaattgtgcctacctagggatttcagtgtttctagggatatttttgtagtgcccccacctacagggcgttacctccttaacttatagctgaggcgggcagcacaagggtaacgtcttacatgttacaaaggcagaaagctgagcaaagttgcagagcttagccagggccctgcagctcctctgggactgagctgggctgagcgtggactcaagttcagtgctcttgctgtgatactgacttagcagatagacatcagtcaggttgctgctgtgggcaggctctgtgctgaggccacaggatgactgagggagggcaacacctaggctgcacatgtggagggggggctccccacaaacaacctggaaatgaactttgagagaaggacagggtggcagtgggggaggcataggcaggaggcacaggacctgaggagatagggacagatggatacaggttccagctggggttgcaagaagccattgtgactccctgcaggcccaggagcaccctgagcttcctggaagacacttcaccctctgcaggttacccaccatgtctgcacatccatgcagttaaggagggaaagtgatggcttcctgtcccgcttctaccctctccaagatactcgtcatctgcccatttttcttgcttacagtggaacccctaataccatgtttcaacatcagttccagaaggttgatgtttggctgggacacctcaggatgggctgtattagagagtgtgtgtattgcaaaattagtgtctgctttggcatttgatcatttagctgacaaatcaagtacttaaaggataattaacaatgaaacttacaggtcttggagtagtggggtccaggggttaagacagactttggagttctgtagatgtgggttgagtctttgtgccttgttcacaactaggtgaccttagacctgggcctcactttccccctctgtaaaatgggataacagtagtaccctctgatagggatactctgaggttgcagtaagcacagggcctggcactgttgctttggctaatattttcctcatgctgctttaaaaggtaggctctgtgtcacctgttacttctgcactagcaaagtactgatgaaagaggttttctttttttttttttttttttttgaggtggagtctcgctctgtcacccaggctggagtgcagtggcacgatcttggctcactgcaagctctgcctcccgggttcccgccattctcctgcctcagcctcccgagtagctgggactacaggcgtgcgccaccacacccggctaattctttgtatttttagtagagaggggtttcaccgtgttagccaggatggtctcgatctcctgaccttgtgatccgcctgcctcagcctcccaaagtgctgggattacaggcgtgagccaccacgcccggcaagaggttttctttgcctctttttttctgtgtgttgagggtggtgctggcaggattgttagttgtttctcagcaggacctgaagacatgggaaccctggctgtgggagtcgttgaaatgttcactatagtatagaagctgcacattcgtgggtcctgaactctggttgaaacaccagactctctttccagtatcaacttggtctgggaaagtagaggccctggataaagttcttaggcagctttcaacttttatcctttagactcagatgacttagttagtatataaaatcagcaagcagaagcgtccccaagcagattaaatccctttgtcttggcggatatgaagcttgactgcagcattcggctcccctcggaacccttctcgcactttagggttgtcacagaatttggcaggagacaacgtgacccactaagcaacacccttccccaaatgttcatatacttgcttctggattctgcccacagattgcttttgtcacaccaacaactgaagctacgaaagtttcaaagtgcacaaagaccttgtggaattgctgtcttcccctcctatttcctttgcttaatgggagggggaaatggaagctctgagagcaatgacttccgggagccaccaggaaaatcactgtcagtggctgagttctcatgtttaggttttgatctgagtcctgtttttaaggcggtaaaattaactgtgaaactaatgtgtgcaagtagtaagtacaggctaaataaagacactaaaagaaggaaaagcttgtcttgctgatttccagtttcttttaagggatagcccttcaaaatgcattacagagcatttggtaaacttctaatcttcttaagatttatataggattgtagagtttgcaacactttcttgtatgtattaattcattagcatgcaatcctcttttgaagtggatgagccaggtggggctcccacttgctggaagctgagagtcccaggccacagtgatatcagatagctgtgttcagcggttgcaaacaaatgaagacacattgaagactgtagaacaaaagcaagaaaatttcatgttagcaaggacttgtgtgagagcaaagctgtcccccctgtttctgtggtgtcagagacagagtggcctggggaggaaggcctgggtttgaatcctggtcttgcccctgctagatgtatgatattgggcaaatgacttgatttcttttcttggagcctcagtcttcccatctggaaaatgtgcatactaccaaccataatgcctgttcataggaacgtgagaggattagctgagaaggacccagcctctggtggatgcccagggagatgggaatggaggtgagggtggagggctgtggctggaagtgtggctgtgtggggcacatgggggtggagatgggctctgggcatggggcgtcttgctgaccacggcagcagccacctgtgtgtgtgccctcccacccataggccttgctttgggcacaatgctggcaagtttggggccgttcttgggcagatgcactcttggggtgaggacttgggaggtgggcaggggccccctgccaccgtgtctgcacccagggagcataaacatggatcaatgggaagtctgaccttgccttttgctcttttcagtggaaatcctggtgaagatgagtcattgagtaggggctcctggggttgagtcagagagcactgtgtctccatgatcaggttggggtgccagccaaggggagaccctcacctagccctcctttggcagatattgggtagccctagctgtgtatggaagcaggctggaggcccactatcatgagcactgcccagggagtcacaggagagaggtgggaggtgaatgtggggactgggaagtgacaatacaagacttaaatacagggcaaggaaaactgcagccgagatgcaaggatggtgcccgatgagagtgcggcccacgattgctacttgtgcaaaggggaatggacaccaatgcctggccttctctgtgccgagcttttttatatgtgttttcttatttaaatcttacagcagccccagggcaaaggtattatcctcattgtgtttaattacttaataataataattattttttgagacagggtattgctctgtggcccaggctggagtacagtggtgtaatctcggctcactgcagcctctgtctcccaggttcaagtgtttcctgcgcctcagcctcctgagtagctgggatcacaggcatgcaccaccatgccaagctaatttttgcattttttagtagagttggggtttcaccgtgttggccaggctggtcttgaactcctgacttcaagtgatccactgacgtcagtctcccgtagtgctgggattacaggcatgacccactgcacccagcttaattatttcttttgatataaggtctccctctatcaccaggctggagtgcagtagcatgatcatagctcatttcaacttcaaactcctgggctcaagccatcttgcctcagacttctgagtacctgcgactacaggcatacactcccacgcctggctattttttttttttagtttttattttttgtagagatggagtcttgctgtgttgcctaggctggtcttgaactcctggtctcaagcagtccttttgcctcaacctctcaaatgctgggatcactggtgcgagccactgtgaccagcctcagccccattttaaagatgaggaaactgaagtcgagtgatttcatggcgaaggccagggccgctaaattccacacacacgttcctccccttcccgcgcacacggtctccctggtataatcagtgggctttaaaaaaagttttaaaaacttatatatagcataatacactcttttggtggttagtgctatgaattttgataaatgcatagattgggatttatttaaaattttttttttgagatcatttacactcatgcagttacaggaaataatacagagaaatctcgcatatcccttactcgctgtcccctaatggtaaatcctaccaaactaatgcagcatcacaagcagaaaattgtcacggatacagtcaagacacagaacatgtctgtctccaaggatccctcccgctgtcttttcatagccacgcccatttccctcctgctcccacgccccatccccaacccctgacagccattcatctcttcactaattctataattttgccattttaagaaagggatataaatggactcctagaatagtgagcctttggggactggctctttcactctgcatgagtctctggaggctcatccaggttgtggcgtgtgtctctggttggttccttcttattgccgagtagtattccacagtgtggctgtgccctgccacattttgtctaattgttcacccagcaaagcgtctgtggagtatttcctggttttggctgttatgaataaagggctgttacaaacatttgtgtgtgaacgtaaatcttaatctctctggaataaatgctaaggagaactcttgctggtagttgtttgaatgggcatttgaaggggttttttaggggatggagaggtgaggcatggtgggaagtgcagtcctgaatgctggcccaccagggttcaaatcccagctttgaacccggaccctgggtgagttgctgtatatggctgtaaaatggggataattcaatctggcttgtggctaatgtgtgtaaagcgcctggtacctagtaggtgctcagtagatagaagtgattcttgatataggttaagagaaaacccactagaccatggcagggtgtgtgccccagaggtggcctgtgggagggctttgcgaggcttccacctcgcgccctgtgggatcacccagttattgtctttttcttggccatgcccccggcttctctttgagaagaccctgaccctgtttgcagactgggctcgaagtctccggcctggtcctggcattccccagtgaagttggccgggccagggcccacgggtcataggaatcccaggaaattccagatcgtgctgggctctgctggtctggattcgcctcacaaattctgagaacgtgcccagatcatttcacatgttgctgtaatttagctggattctggaaatgtgtattgagctgctagggtatgtgagggattgtggtaggtgttgcaaagggttcagaaaaaattgctctcccaacagatcaaagcagccagctccagcttctaacctcctttgggagcccccacagctgcagtgataaggtctccattgagtatggcattcagagccctgggtctggtttgagtctctctctagctcccatcctgctgctgtgccctctgcgtgccctgtgtgccagccaccagcacgctcaccgttcccatactccaagtccgacccggcggccacgccttgcttacacccttccctctgcctgggtgccctgcccttcctgatgaaatcttgcctgttttttaagaactaaaagtaccatgggcaggcgtgggatggaatattcaaacctcacatagggttggacgtggttcctctccggaactgtcattcccttctccaggcaaccactgtgtgggaccatgctggactccttctatttttttttttttttctttttttgaggcagagactcactctgtcactcaggctagtggactcgctcttcttgcctttgtcactttataggatttcttggagattgtttcatatctgtacagtttgaactggctcattaaaatatttttgaaggccacatggtattcccttatgtaacaacaccgtaatgtatttaaccagtttgccctgcttgtaggcagctaggttgtccccactcttgggctcttacagtgcaaaggagtcactttaaggcctacctccgatgaatgtccccctttctgcctgcctctgaaatgtgttggctgggtcactgcactctctgtgagaccccccagggcagggattgtgctacacctgccttctcctttccatgcctgccacgtgtgctgaccacccagttacccaggcgcttttggtgcttctgctgcctctctgagccctggccccttgtcgggactctgctggggatggagctagagagagctggggtgccccgtctttgcctcgttctggcttcctgcttcatgcagagctgtgtctggatgggctaatgtgttcccatggcgacagacttccacagtttcattctactggcctcctcctacttcaccagagggatgggccatcatatagccaggcccttgttaatggaatttagcttgtttccctttaaacacatttgagaggatggccgcttgggcgtccattgccgagaggaggatctggactcccagcctcccccatgaaactgctagcagtagctgctgctgattgagcactctcctggatgagcgagacactgggcaaaggacttgggctctgttttcatcagatacagtaaccttgtgaggcaagcactgttttccctgttgtacagagagggaaactgaggctctgagagtaacttggcaaaggccactcaaacaatgtatttcaagagctgggattccaactcagttgtgcttgactcaggacctgagcctctgtagctactgagcccacctggcttcctagagagaggctggaaatgggggaggagggaacaggcagctcacctctcaggccttgtgccgacggctggctgccgtagagctgaattggggctcacacacagaaacatgacggctgccattaggcttccaccactgaggaggcacaaaaggcccctttgaaaggcgagtccaggagcacctctctggcctgctcctgagctaagcctgcagtgggggctgacaggcatttctggctcagctgcctggccagaacttgcaggagtggtctgaaattctttccttgaacagatcacacttggtcagaacatgtcacttctagatcgatgtggtattgaacctgtgcatcaggtctctcaatgcgacctgggaatcttcaggctccccggggctcccttcctgaacatgtattgatttccctcctccccttccctgcttttgcactttggatgaaccttgttttcgaagaacagtagaaggtaattttcctgtgcttgccagctggcctgtaattgagcaatttcagtaacacccactgtaaagtctaattgaagtaaacaggaaaacatgatttacaatctggacagcaagtaaataccagggtgcaattaatttttacacagagcagcagattctaaaacattttcctgtgttgagcagtttgtttctgattacagattggaagctgcttttctatttaatactgttatcatgattattttttactttttgatggtgatcttcaggttccttgtatctgtgtgactttctttgaaggtttagccacatggggaaatagaatcagagacatgagtttataaggagggatttttcaaacctgaactgaaggccgcactctttcttcatttgtttggtgggaaatgatcgtgggttatcggagaggggctgcggataggctgtgcagaatggcgatgctgagtgggtcccatcactgctggaagctcagtttagttcattctggggaagatgacaaaactgtgaaggcctccagtgttgcaaagatgttgatgttgaaatgtggcacttccaaggaccagaaatgtatgcctttttttgggggcggggtggggacggagtttcactcttgttgccccaacctggagtgccgtggtgcaatcttggctcactgcaacctctgcctcccaggttcaagcgattctcctgcctcagccttacatgtagctgcaattataggtgcacgccaccaagcccagctaattttttgtatttttagtagagatggggtttcaccatgttgaccgggctggtctcgaactcctgacctcaggtgatccacctgcctaagcttcctgaagtgctgggattacaggcatgagccaccgtgcctggccaaatgtatgcctttttaaatggaccctactgattgttccattagcttctgttcataactggttggagaagggagccagcatgctgactgctggtcccttgctgccagttggctgcctgagggccgacccctttggtgttggatgcggggctgaggcatgttctgacccttggcctactttaatgtatcctggtgtgtgctgaagctgcctgtagagccagcttagtggtaagatgtcacatgacttgagtatgctgcagggacagcagattgttagccacccagaccctgagatagatcttaaaggtatcatgcggctggaccccaatttgttgttgtatccaccaggccattttacaagtgaggcagcccaaggctggcatggcaggggtgggcggggggactctgagaaggtaactctgggccttggtgactctcccagagtgcatctcctttagcagagaggtggttccagtcccctgggatttccagtactgtgggaggggtgactctcagggccctcgtctttcttagtcctgaatctttttgcttttcttttgtctttccagggagttgaccacatttggccatttcccagaagggccccaccccaagggtgagtggccaatggggagctgtttctgctgacatcaattccccaggaggtactcaccccaagtctgcccaagtgaagatggctgatacccaccctgggatggagcccagcgcctgaggcccttatcatggtgatggtcctaagtgaaagcctcagcacccggggagctgactccattgcatgtgggaccttcagccgtgaactggtgaggacctggcaggcttcctgctttccatgaccatttctgaggcctgatgtacagacagggctgtggactgagcacctaggcttagcaaatcgagtccagagtccccaagagcaaagctctgtgaggcgtcccgggctggggcaacagggcacaggagcagagcttgactgagaacttgctggaaggaaggaactcagctcagatttgaggtcatctggtgaatgaggaggggaggccatcccctggtaaataacagcaagtgtgattctgccgcctgccaagccaggattgacattccttctgtctccacccattaagggggggtggtttccagagggggttggtgccctgaatgggggcccagataagcctgtccctctgaagggtggtgctgcctcaggaacgtcgagagtgggagatgatggggaaagaaggtgtggtgagctatggcaacagccaccctctgccaaaggtggttcaccctggaccaccctggaccacttggtggactagcgcagagaggtagctaactcggccttcttagactacgagcaaaacaacctccagtagctgaaccctgtcagcagacctgtccttccaagcccagttcctcagatgtgagtgcaggctgctcccctgtggagggagcgagaagccacactcagtcataagcagtcttgtggagatgggcaagtcctcagaactctctgcagcttccgtgatcaggaaggggccaactgcccagggtcaccttgcccaggacccctcctggcgcccttcacggctcctcgtgaggacccacgccaagcctccttggtgggccccttcccctagctcatgccagtgaaaccagaccttgagcagatagacctaggtctctggctgtggcaggagcttgggaaagccaccgagatctgtattctttccgcaggcctcacagagcgccttccgtgtgttgggcaccaggctggaggagttcagggaacaggatgagctggagccaggccctgtactcctcacccttgagaagctcgtggtctagagggagggtgtctggagagctgtgaatacagtgacacttgaggatcccatgactaagaactcgcagctgaagcccatgggaagcccagggcttgtagaggagcagggccagcctggctgtagcacgccagggaaagccttgcggagcagggatacttgatttggccttgaagggtgagaagaagtggcttagaaaccgttgggtccagcctccttgttttacaaatgaggcagctgcaacctggagcaggcagtaactgcctcactggctccgcctccgccttccctcctgcccctctagccccacttcctgggcctgcattcaggcctctgcctgctgcctggtgtctggacgccagtcttggtggccctccctcagtcaggtctcttcagcccttaccagatgtgacactggtgccactctgctcatgggcctcagcctgtgaggtctccatggggtgtcacccccagctgcaaggatagggactcagctttgctcctccccatgtccccagcactactgaggcagggcagacagcaggcacctgaggtgtgtttgctcgatggcagccttggtcactgcagcgaggagtagagctgctgtgaccattcagctcttctgctaccaccccatcctttccagttcacatttgctgtgtgatgtgattacttctcaccagccccgctgccaccaccctggttccacctgctgttctctcgcaaggattcttgtggtaactggtcccctgcctctggctctttttaacctgttctccacccagcagccagagagaatcccagtcagagctgtccttctctgtgtagcagcttccactggctttacactgaatgcttagcaaacacccagcccttactaggatgtacatggccccatatattcttgtccatgtgactgctttgacctcatctctgccactctgccccctctgctcggtccccactggcctccctattccaatatgccaagcgtgagcctgcctcaggcctttgcactttttccttggcctggagccctctccccacagtaggacacactccctccctccttccttctctggctactcaacctacagttcagtcccagcgccagcgcccaccccttacccccaccacactttctctcctcttttcctttttccctcttgggcacttagcacttttaaacatgtccctatggatcttgaccgagtccttatactagaatgggagctttgagaaagcagaggatgtctctcttacttgttgttgaatgcacggggcccagcccgtggcaggtgctcagtggatgtttgtggatggatgagcttgcaggttcctgtcacctggcctcttctcattcaccattgtcttactctctctctggctgctgctccagttcacgactgagtgggtgcgactagagtagctctgaccaaaaagaagggacctcaagggtgaggagccatctggaggtcccgagggaggagccctacccgggtccagctgtgcagttggctgcagtggccgcctctgtgcttggtcccttctcagggtgggactgcctggtgttggcttcagagttggttccaggacatgtgggcccaaggtcagctgagctgctcttccaagaggtgtggcctgagcccctgccaggaggagcacggcctcccagccctggccagggaaggaaaactcatctcagaaagggaaagcagtcaggggagagcaggcggctttgctggaagggattctaccatgtgttctcttgtggccacacagattagaatctgtgctttcttcctgaactctccttgctttgttggaaagtatccttctttctgctgctttttgttactggcctgtccgggcccagaaccacccagtgtgcagtgctttgggtccatctgtggtcttcctcctcctcttctctccccttggctccagatgagaggtctgttgtggggagcagccctgttggagatgggctttctcattgctcagtttgcttatgcgcccagaacacattgactgggcgtcagtgcctggcccggcctggctcagcgctgcctgcgctatagcgtgggccagcaggaaggtgttggaggtgcagctacactgagggtcttgggaagtgtgttagttcatatcatgttgctatgaggaatacctgaggctgggtaatttataaagaaaagagatttacttggcttatggttctgcaggctgtataagaagtatggcaccggccaggcatggtggctcacgccggtaatcccagcactttgggaggctgaagagggcggatcacgaggtcaggagatcaagaccatcctggctaatatggtgaaaccccgtctctgctaaaaatacaaaaaattagctgagtgtggtggcaggcgggcgcctgtagtcccagctacttgggaggctgaggcaggagaatggctcgaacctgggaggcggagcttgcagtgagccgatatcacagcactaccgcactccagcctgggcgacagagtgagactgtgtctccaaaaaaaaaagtatggcacctgcatctgtttctagtaaggcctcacgaagcttccagtcatggcagaaggtgaggggagaataagtgtgtcacgaggtgagagagggagcaagagggaagggaggaggtgccagacctgttaaactaccagccctcacatgaactagaagagcgaggactccctgatcaccatggggaggccaccaagccattcatgagggatccgctcccatgacccaaacaccccccaccaggccccgcctccagcattgggggttacatttcaacatgagatttggaggggacgaacatccaaactgtatgcccagaggtccaggtacctcctccctgtccttgagcctcatgccacctgctgaggggcaggggtgcacccatttctaccccattatacaggaaggaaactgtggctcagagagcccagggaggggctgccctggtcacagatttcaagtccaggcccttgtctgcttcccccagcaccttctcgcatgggccctgttccagaggctgtgatcgccttggagcccctccaggccttggggagagacacacgatgtaaataactgaagaaatactgaaaataatcttagtctagtgatgacatccacgggacagaatgtgagataagctgatgctagcatttgctttgaacagccagcaaaggttcagaggaagttgacggggttttgctttagcttcctaaactggtaacatcatccccgtgtaaataccatcaagataacaacaggaacgatggaaaataatttttcttttgttttctaatcagactaagaagataacaagtggaggtttaagattttaaaggaaagcatgactgtgggggaggccgggactggtatcagcataggccactttggaattatgggagcaggccccagaggcgcagctcaccctgggtccccagagtcaggccttagtcacagagcgggaaagtctcaatgtgcaagggaaagtcaccagggtcctcgcaaccctgggtgtcatgtggcactggaggaggagctcgtggccaattctgaggcctgttgaggggtgtgaggactcggtctccctcccagccttcttaggggttcatgccatggttctggttcccctgttttaaaaaactaaatgctggtgaaacaactgtctttccctcaaagaaagatgtgggaaaaagggaaaaaaaggactgaccagtgctcagcattttgcctttcccagcacagggcccacctgcctggggggagatggccctgaggctcagctgtgcccatggccctggcttcgcttgcactgccggcagccatggctgggtccagttcccctttcccccactctggccagtgccttcctctgctgagtgggctcttccttccagtgttctaacattagctgctcccctggaaggcagcccagacgtttgaccttggagcactgtgctccctcagctccttcccgcacgcccacactcaggccaagggcctgttcttttgtttccagagtgaccacctcccttggccaggcccgctcttctttctgcagcccatcctcccttaaggctgaagaccaaagggagctggtggctggctgctcctgggcagagggcagcatggagctccaggctgcctgactttccacgtaacaaccaatacttgtcctttggaggggctgatctggtagctagaacaagcacttccttctgtacttgtcagattaggatgccaaggctaaatgacttttcttacctgaggagttagtggccatgtcaggccttgcacccagttgcctgggcactggggttcttcatacttcgggccatgctaagttggcactttgagctcaacagccccagccaggatctctggcaggccccaggctggcctgaagttagaatgtgggagtgcacagggtccagggcagcctgatgcctttcaccctgggcaggcagagataccaaggggcctgcccatgctttggctaatcccagagcctcaggagtcagggccagcgtatctctatccgcatctttgagagtcttcacacaaaggtgctgttccctcctcagcttctctttcttgtctcaggcctggatctcctttttgctttcgactgccacggtctcgcggggttgcatttcggaagtgtgggtgctccactcgttcccccgcagggcatgagcgcgagcctccccctgttgctctgtggctccctgtaacaccgtgtcaggagatggaaaaggtgatttgatttctttagtggataatgtgcagagcaaagttaccaagaaccgtggttgtggcctggcattttctgcagggccagttcctcatttggagccttaattgtgtctttatttaagccagggctgctttctttagtcagacagatggccctgaagcctccatttgatttccagcttttgcctttcctacgaggatctaattccaaaaaccttctctcgtgatctgaggagtctcacagagacgaggccctgccccggcgtgggctcgggaacagaggcttcacggtgggagaagcacaaaggggaaatgtgctctggtcttatttcactgcagacctcagctagggctcgggtgctcgcagagtgcagacactgagtgtcttgtgaaacctcagagggccgaggggttccctcggcctggtggggcctccacaccgtgattggctcattcttcccactgtgggtgcaggaggttcaaagtgttggaaaggccgtgtgtataggaatggtaaataccagtgggaatgttagcatatactgggaagcctggggaaaaaaaggccctggccaacctagagccaagcaggaactctgctggtttgcccatgtggagttggaccagggaaacctgccagcggtcagggtacactggggcctggcaccctggaaagctgtcagtacatgacattctggcctggccgccactggcttagcctcacggatggggctcagaaagcaagatgggccgtgatctggtcttgaggtcaagcacgaaatcagtcagggttcctcctttgtcagcaccagaggccatctccagctaactcaccccgaaagagaactccctgaagcacagggcgagctcgcagggctggagaggagggggccagtcgggcctcagaaagggcagggtgggagcagctgggaggactttagaagcaggtgctcacgggcaggctgagggcctccttcctgggcggatcagccccagctctgtggttcaggagtcagccatggaaccagtgtctggtcagccaggcttgagttctgggcctagcctggggccaggggaggtggaggcaccttggttgacagtcccactaagacatgatccagtgacgatgaaggtatcccaattcagaattggggtgctgctgacagaagaagggggccgcaccactgggctgcgcggtttcatctgttcagtgaggagcaagcagtggcttgcccggggtggggaaatggagaagtcgttctttcgagttagaaaatcatagtgtgcaccattgctggttcatgggaacccttaggtagagtgttggagaccggcatgaggaggccaggctagcctgcagggcggctctgacactcaggctggcctctcagcccttccccactgaggtttgactttgcgtgaggccagcgattttgggagacagtgacttctgcccagtgaaaatccacttccgttgcctgacatccactgggtgtgtggctgcaggagtgggacaggctggcgctgacaggtggctgtagccatggtgcctgctgtcagctgggatgttggaaccaagacagccctcctttctcaagaagcttccgttcccatggagcagagaatcagtacaggaacagatgttctgatacctgccatgttcattaaatgaggcgatgggagagagaaaagcaggtgggaggcaccgctttagccaggatggtccggcaaggccactgaggaggccacagggcaggaacagtgcaaagcctgctgcgtgaagatcccggcacaaagcccctgagatggtagtgactggcctggccccactgggtggtgtgagtgaggaggggagggccagagcaaggttgggggtactcaggttggctcatatggggccctgtaggctgtggaggagaggtagtggccgggatttgattctggttgtggtgggaagttgttggaacagaatgacgtggtctgatctctgctttaagaagatggctctgggttctggatggagggtggggaatgggggccgagggtacaggctgtaagagcggttaggaggggcgttcactggggctggcagtggctgggatcagggccaatggtggggtggtgaggagtcagttttccaggttagaaatggcaggccactctggggacctgctgcagatgctgataagtcctcattgaatgaatgaatgagcaagttgagtgaatgtatgaacgagtgcctggggtgctctgtgtgctggcccagtgctgcctctgtgggcagacagaccccagcatctctggcagtgttccttgcgaaggcctgggtcaggagggccctgaggtcccccttggtctagaacatgccagcttggtgagaggcggccagcaagcactgttctgctggccaggcaggggcggctcactacgtggcttcctgctttggtgtggaaagccccaagccctcctgcatgcatgccagtgaagcacgcggggtgcttcagtgttcctgttcaattctgctctccccagcccccatcctggtgtggcctctctggcctcccaccctgggttaccttctcccacctggcaggcacgggctgggggccggggttccccagggggtaatttccttgtgcccaggtgttcccttagtgctgggagctgccttccttggcaagcaagaccctggcctgacttccctctctgagcctgcaaactgggcgcctgcctggcgtccacaggctgagctctcggctgtgcaggcagtgcagccccagcagcagtgctctcatgcgcttgtcatccacttgccattggatgacttcggtgtgttctcagctgcacctctcagctgggattgtgttgggggatgggaggaagcaggtgcagccattttgaattcttcccagatatttccacagatggcggtagaggggatggttacatcactgtggaatccaggagggtgactgagcctgatgatactgttaggatcattttaaactgaggagggcaacctgtaggaggactgccccgttccccttccgccctagaagctcctgtggtcctcatcaagtgtctaagcatcccccccaggaggctgccccgacctccaccctcatcccagcacacttgccctggacatcccctccagccctgatctccctgtggtttgtctgtgaccgtcttccatgaagagtgagccctccttcacctctgtgtccccaggttggtcagcatggacccttagtaaccccgtgggatgaacacggcgttgaccttgtgcagaggtccctggattgggtggatggggatgaagtgagggagctggtgccaggtgcttgccgccttcttacctggaggggccaggcgttcctagtcagccccatcctcctgccaggccttaaagagccagaacctgggcccttgtccacttaccagcctggaagtcttgtctgtttgtgtcattttgatatggggagtgttcagggttccttttagaagtcagagccttctgtgacaggctcatttctctggggctaagagctcctttcatcattgcatgatcaacccccagcacagcccgcctaggaagaatcaccagcccgtgcccactgagcgagtgggcgagtgagtgaggaagccttggagcacttgaggcagagctccttcctggggctctggctgggtagtctctgctcatgagaggaccgagcgagcctcttgacctgggtatcacctagcatgaggaacccccagaatattccacacccagcttactgtgtagccatggagcaagtgccctggatttggggttcttctaggcctcgttggcctattctgcctggtggccatagcattcagttgagggtaggcggggggcatcagggaagctgtagaatgtttgcagtggaaagggaaaccattgtggaaatacagggccaaggagttcaaaagccatagctgttatgttgagaccaaatataacccttgagtttctgtttcagttcagagaaaatgcctcaaggggactcgatgtagccacaaaacagtctgcagagcagacgccagcccttccgagctctccccatgcttctcaccagagcgggagagctgttctccctggatctggaagggaggggtctcggagtcggacctggggccctctgctccctacttgaggttcttcgtgtccccagggaggtcccctcctctcttggtctcttctcagcccagctcagggaagcttgttccactgtttaccatccatcctgcccccgggccgcctccacatcacttatgtggaaaaatcccctcgtgtcagaagtcgtggggctttctgtgtgttttcaaagcccattaactcgatggactccataactcactagagacttgggacaaaaaatctgggcctaattttgtgcagatgttttctctttgaataccttttcctcctttccctgatctgacattggcaaaggacagtcacccttttattgtgactttagaagggatcagtagagtcagtgcaaacatgcttcctatgatttgaagagtgaatagcttttctggttgttttcagcacacgccaaagaagatgagtcaaggacctacacttttctcttgtggaattatgggtaagtactcaaggccatcctggaagctgtcctcctagtccttccagccagggtctgagtcctccaggtgagacactcaaagcactttctggacacaagttcaaaaagagcagccccgggactcttctgtgtgttttaactattttggtcccctacggtgcctgagtgaagggacaggcactggtgtgtggtttacaactccaacattgagaatttctgtctgatgattaaagtaattcatgttgatttttttcattcagaaaatgcacaatagtgtaaagtatgcaataaaaatctctcgtagccccaatgcccagggagagttactgttgatatttttgtgtatgtttatgttcttagcattttttatatagcccattccacgatgaacatataattatgtaaaactatatttgtttgcttttttcacttggagtagttaccatcatcttcccacagcattaaaattgttcattccatgcattttaatggtctacagtaccgcattgggtggtaaatgtatcagaatgtctttagtgatgtaactacatctaggctgttgggtcaagaggctgttttatttgctgttgtgatgaacagtggctaggtaagtgcctaattctttgtctgcctttgtgatgatttgctaggatagtttccaggagtggaatagacaggctggagggcagggacatttttaaggctcttgattcattttgctgacatgccttccagagaagattgccttgatcttctgtttctgtgcaagtgtgaattactgttttttataggcggtaaaaaagatgaccattgattacttgatgcttcagatgattgggcattgtttgacctctcagtgtctctctgtggctctccttgcccacctttggggacgtcttgccggatgagtttctgtaacgtctgcgtggactcagaaaccactctcagatgatagatgatgatgactgtgggctttcagattcaaaggttactttggtcagacctcagagtctcccttgcctttccttctcggtcctccctccatgtgcggtgttttgtttttcttcttcagatacagttgccatagatgaggtgatgtgtcagattgagcactgtgccaggctccttacatgctgggccccgctggctctgccagtggcatcattcacatacgggagaactgaggtctagtgaggtggccctctgcaaggtccctcagtaagcggagttggactcaggtgggtgacgaagggagactgttttcttctcaaccacctgccatggctctgggacacctggcggtgctcttgatgctgccactgaagaagatggagacagggagatcagctggccctggttttccatgtgacatacttgggaggcccgtccccacaggattgaatacctccccggtggtttacagctttcagcaaaccctcagggccccagacacatagctcagaagcctgcctcctcgcctgcttcctgggacaacctcacctttgcgcttccttcctgcgtcatgctgggaaagagagaggccccggcatgcccagcccctcaaccctgcctaggctttagctgtcaaccgggccagaccagtaaactgggttgtggagatgttggtctttatttcaaggatttctagtctttgcactgtgtaagttataataaggtggaagtctggtgggtttgtgatgacagagagagtcgcccttgtagggccaggtcttgaggcccagagaccaaggcagaggccccggagaagggaggtgtgtgggaaaaagtccagatggcccaggagagtctatcggaggctgcagagcccagcaacctgctttctaccggggaggccatggtttccaggagggactacgctgtgtctgcagactcctgtttacagagtggctctttaggaagtgctggctgggtcccaatgcctccgtcccaggctcttctcctcttcagcagggtcctgtcttccttctgctctgtgggacagtgccagggcactgccaggcagcagagggagaagcggggagctattgtactggtgggaggtctgtggagtccccttgttctcctctgctgctctctctccatgggtctcatctttctgttggtcggcccctccctaattcaggaaaaccctgacctgcatggctgtgcatcactgacgtgtttcactgactgcagtttgttttcattttcagtggcttgctgtcatagatatgacttgagcacctgctgtgtgtcaggcacctggtgagggatagagtgaatcagaccctgccccttctctcagggagctttctgtctggtggaggagaaagatcaacgaacagtgaattctgcactgcttaggccaactcccgtgagatgtggaggcccttgagctatggggataccaccccatcttcccggctaggtttcctcagtttgcaagttgtggggatttaaggagacggccacacactagcacacatcctccctcccacctctatccctttcctgcgcttgctggagcggagcgggtgtcagcagtcaggagccttaccccgtgcactctgtctagtggaagctcaggttacctctccagtcctccgtgtgctccatgaactgggagtgcactccacccaggcagcgagatttcatctgaggtgtgcctgcttttcttttttttttttttttgagacagagtctcactgtcgccaggctggagggcagtggtgtgatcttggcccacggcaacgtccgcctcccaggttcaagcaattctcctgcctcagcctcctaagtagctgggattacaagcgtgtgccaccacgcccagctaatttttgtatttttagtagagacggggtttcaccatgttggccaggatggtcttgatttcctgacctcgtgatccgcctgcctcagcctcacaaagtgctgggattacaggcgtgagccaccgcgcccggcgtgcctgcttttcaacagtggggaagagaatactctgaggggccggctagacttttcaagagggttttgggcccttccagcgctggacaatgctgtgcgaagataaaacaccaaattatcataatcaccaacccccagcctgtctcctgaagataaaggactcatgttctggtgctgatcagtggaattctcccatgagagctggggacagttggccctgtgactcaggattttttcctcctgagcccccatgccagggtcctcgctgggagccagtatgagttcaagtttcacaaatgttctgcagaaaatctgggcaagtgcagtagagcaaggagcacagcaccctggtcactttttaaaatgccaccctttcaagtagctcagcctcctctgcacccacttagataaaacacataactaatataaattgagtgttcacaacaatgcctttttttttttttttttttttttttgagatggagtatcgctctgtctcctaggctggagtgcagtggcgcattcttgtctcagggcaacctccgcctcctgggttcaagcgattcttctgcctcagcctcccgagtagctggaattataggtgtctgccaccatgcccggctaatttttgtatttttagtagagatggggtttcaccatgttggtcaggctggtctcgaactcttgacctcaggtgatccacccgcctcagcctcccaaagtgctgggattacaggcatgagccaccgcgcctggcctatgctttttatttatttatttatttattttaattaaaagcacttcacgccctgtgattgcaagctggataccgggcccctccccactcttgtcccctaccccagtttaggaacttgatacagataagtggttttgttcttctcagtgtggaagagagaacaaagccagcgtgaagcgtgggtgggagaagcagatagggtagagctgagtgctgcccagccagccctgcaccagggctcagtgccccttattagggtgccagctcagccgccaccacagggctcctgccagcggaggctgttttgactcttggcttcctttctcatcttccagagcatccccagtccaccttctttgctgaaatggaatttcctctacaaagcttctctgggaaagagccatttatatgactggttcttgtgctctcgacacaggaaacatgggtcaggtggcagctccgtggtgcggcccaccccctggtcagccggctgggtgagggagccagcccttgctcctggctctcatttctagtgggtacaaagaggggcctgggctgtggctgagagtcatcctgtgtggggagaagcggggccacgcgtggactctcagtcaaggctccctccacatcttctcccacttgcagtgggggacccagggtcacacgtgtactagtttgatcttttttggtgaaacagggcaagtggagtgagcgcagtctccattcaccacccttggctaattgcagccattcagtgcatttgtattgcagggacaatggacaccacacattccattttcctcagcactcaggcgaggaggagacctggaaatcacatcatatgtaagaaagcgaaggcaataccaattattttaaaaaggctactaggaaaagtcttgtaaatacaagtcaatggacagaacaaaacaattcatatgctaaaaaaaattggatggaaacccataattactttaggagttatggtaataaattatttattaatgtaaattatttcacaggcaaagaacatacaggaaacttgagcagaaggatcatacattatgtataaaaaggaattgtaaaaatattatagcagccctccttgtgccgccccagttcaggtttgtccgcattttaattataagcccttactttcagggtttaattacttggctgttaaagtctactctgtacataaaagggttgttccctggggcactctctgtattaatttctacagggtaaaccagttggctgtgttgagctggggaggactaagagattttgctttgagatttggtagcttttggtctttaaactcagccactgtttgtcatggaaagtggaaaatgattgcgcattgcaggaaaagcgtggccctcagagcttgagtgcttttgattcttagaacaaataaacgaagaatcaaaatgagtgacagcaataacaaaatcagagcttctcaggcccaatttttggtctctgccactttttctcttttgcagagacagccattttgaatgtgatctttgggccaggtcctccagtaagagactgctcattaaccagtgtaggctagaatgagatttgttttcattgaaaaaaaattacatccatatgtaagtatgtatatatatatgactttttagggtttgctttattatttttatttttattatggtcatatgtgtgatttttaaaaatctctaaaatagtttgtccataaagggtatgtaaattcttccttgtaccattcattggtttcaggcagtttttcaggaataataaagcacagaatggaagtagatgtaaaatgtggttggcacatggtaactgttgccagtgacgagtgaagacagagcttcccagggctgccttcttacccaggttgggctcacctgatggggaggggaccacaatagtgccagaggacagggaatggccactgccagcctgtctgggtgccatgccttccacatgaagaaatggtcaagttaggcagcctggcccaactgcaagagcatgaccttgggtctacagactaggttgacgtctgggctctgtcatttgctggatgtgtgtccatgggggagatgtgacatcgttctgaagcccagtttcccccatcagtcagatggagattgctgtgacaacccatgagatgagtcacgtgcttgggatgcacattcatgctctttctcagcttcagcaaggaccctattggagtgttagctgattaacagtaaatatgcatttattgacagtttcgtgaaaagctctgcctgtcgccagttccctcgtcggtttaatggcgccccgctttgctgtgtacatcagttaagagatgcatcaccagcagctgcccgtttcacttgctctgtgcacacccacaatcaggatggaaatccagaggagatggaccaaactgaccttgttgtcccttcagagttcttgttgccagtgcaaatactagctgttccctgtacatttatgaacgcctgtgggagctgaggggtagaataggaagtcctggtcagacccaaaagggctgtcacaagaccctagtctacccagccttgtgcagatggtgagattgaggcccctcttcccagtgccccatctggtgtggtttttaactgtgaggatctcactgggcatctttttgtaagagcaaagacttcccagaagcagtggcagctgccatgggccaccccaactctgctggtaagggcagggccctggtaatggctctgaaccccgatctttgtccttagtagcttctttgtcacctcccagagtcctgcagacccgcctgccttcttccttggatgtggggcctgatggtgcattacctctagccatcggaatcccttgttccttgtgccttgtgtgaggaacttggtgtcctgtgttgctgtccccgaatccaagacacagctgccattttacagtccatcccaggtgcgtgggcaggacctgaagctgaggcctggcaggcaaagcccgaggactttttgttcctgacactgctctgaactgagtctccttctggtcatacaggcaaagagactctccagggagccagaggctctaaagtccatttaaaaacagatgagacgattgtgggggagctcatgtcattgccctgcttgtgtcccccccacccccatgttcttttcgtaagatcagtttagcaaaaccgccttcagaaagacacctcggctctcttgattttcccattgatgggttggtgagcttctccccaaaccaagcatagaatctttgtggccctgaggccaagttagcacaacccaacccacagggcaggggagagatactcattgtcagcacaagtagataggtgtgaaatgtaagaatgagtcagctggttgtgatctgacagcaggcttgctaatcggggcatttcgtatcttggtctgtacttgaggtgcttaaccttttctggaaaccacattctgtacttatgtgaccataaggcaccatcgaaaacatagcacagagctctctagggctataaagctcctctatcttttgaaaatatgaaggtttatagtcccccaagaatctggagccctgggaattttccttcaaatttaagggtaggaatggaaataagaacatttgaggtcaaatgccattcgtattcctctgagtgtttttcttgcttcaagctctaggatctgtgcacacagcagtcttctgcccttcttagtcaaacggtggcaggaccagagccttgtgagtgcgaatttgggaatttgagtccttgtctctgcatatgtaggcaactcattctcctgttctttgtggcatagtcaaaagtcagaaactgcaagctcagtcatcaaacctcagctttggaagagaccttgcttacctagtctgtccaagactgtgagagaactgggcccagggatgcttgtgtgttcaccctcccatctgcaggcaaaggctcttgtgtgtttacgctacacacaaatgcacacgctctcgtgtgtatcatttcagacttgtgaagataatgctcagtggggacgtggagaagctttacatgccctaaaggctaaagcaacaggcgcagcatagaactgaatgggctggtgccatgctctcaggctgtgggccatcgcgctctgctcaggtctgccaggggcttggtgtcaggctgcagatggatggggggcccttctgcgtatctttaggacacagctgatgggcccttgcgtgttctcagggagaaagtgggaggcttcacactcatcttgttcataggagtgagttagcttctaaggcctttgctagtggctgtccatcaagagcatgttgtgtagcttgagaaggaagccctgagggtccccatcctgtcctgtgaaacctctgatgggtgaagtgatccttctccatacttcttcctggaattagcccaaaccaaaacataaacaccaactttcagtgttgttatgaattcaaatttgtagagaccagaattgtcaaccctcctgaagcttctgggcagtggtgctggatggtctggatgggccgccattcggacagatgtttgagaactcagttctccatgtcatctgctttccagaacagcatttctcaacatttttgcattgaaataacctggggagcttattaagatgcaaatgcctacccagagagactctgatttaccaagtcagagacggggtctagaaacctgcattttaacaaacacccccaaaggatgctcctgtaggtggcccagaagtcacactttgagaaatcctagtcagagaagccaggtttccattccagccggattccacagaggctggcaccctgttgcagctctggctgagtcaagcctcagctaggagagcgttttccagtaccgttaattatccttatgatgactgctgtttttgagagcctactctatgccctgtatgagatgcctatttaattctcataatagctacgaggaactgagtaacttacagagctgaggtttgaacccaggtccttgccctttccactacaccaagtgactgttgctcagtagactcctacatccatgacaattgtgacttgaaagagttatagttgtttgtgcagaagtgatattgaatggagggggcgggggcaccctgtatcctcttctcggaggcctaccgaggccctttgtatggtgtgacgtcagggcctagcgcttggggcagtttgccatgaaaaattagcttctattcctgtttcttttgtctggtgatctgacccaacaaatcgctttctgttccctgagcgaatggggaaaacacagggctaaacatagccttgattgtttttacttttctcgtattgtacttctcaaagcgataaagatagaaagaattacaatattatctgcctgcagactgagcaagtggtcacctggctggtgttgatacacaatagcagtgctttgcttttccaaagtattttagacgtgactctgtcaaccccatctccttgctgagtcacacatggccacatggcccaggtagggcagacggttcagggcacagtcctggttggacttacctggccaaggaagactcacctttgccaaggacaaaagacaggtgagtcccagagaacaccgcatcctcttgtagcttttatctgcagtttgcaatccactacctcattcatgcaccaccaactaaggtctgctgtgtgccctgctctgtgctaggcactggggagccacactggggctatgcttgagagtctgtggcttaggaggagaagtagatgtgtaagcagatcagtaattaaagttcaggtacatacgtgctgtacgatcacagagctaggagaaaggtgtatcttcagaggagctttgagttggctttttaaatgaggagactcttggtgaaaggaagataaaggcaggaaaagaacggtccaggcctttgcaaaggtgtggaatgttctttgcaaaggagtgaaagagctgatgtttgggggaagctgcaacttctcttcacagttaaaaactgactcttcgaatcttccctacgacaaagaaatcttataggccttagaggcttactctgtaacacagaaggagtaggtcctgtaggaattcatcacccagctctgatgcccctgggttttggtagttacctcaaggcccagcaagctggacttccagcctttctgcatatagatcttatctgtgcttgttcctgcagtctagttattaaactttagttttataaagaatcgctggtgcataagaattacccttttgggttgtctacacaaagctggggggaggagttgtactttgtgggctggttcaggaattcttcaaggatggttttgactctatatgattcttttctgacctccactgtcgtaggaggtttgatacctggagtgtagggtttgttgtggggaatgatgtggagatgggcccgggtgccagtctgaaatgcttgtcttctttcccggaaacagtggctgacagctgaagcgaatgggccacaataggtgggggcttcagaaagttctctagaggcagtgaggaggtaggcctggagtagggaggccctgaggggtcccttcaagaagcaccaagatcgcaggctggccatgggaaaggaaggcagatgggagggatggtgtgttcctatttagctggctcccgattccccttttggaagtgatttccctagagatggggaagattccaggccagtggtgcaaaaatggaacagaaaatggtatcctctgagagtgggatcaactccttttcatgtcacgggtttccccgaggcctggcggagacgcagtctgtagtatgtctcaggctccgtgagcaccggccaccctcgctgctctgtgccaagcccattggtttcttcctcagccggccacattcctggcccatctggtgcctcagtgccttgtctcaaaagagaagttagtggccagcattttgtatggcaacttcctgaaaacccagaggagccaacccagcagagggcgggctgtgggcccccgctccgaccctggctcacttcctgagttaagcaagggcacagcacctgtgggcttggcagtcacatcccccacatattcgataatacattttttctcataggacatttggagactatagaagaacaaaagagaaaaaataaattaaccaaccagctgtctgccaatccactattaacatttcggtttatttctttcttacctttacatacaacagacatattttgctaaataggaatcacaccctctatacagttttatatcctgtttcttcatgctcagctttatattgttagcatttccccacatcatttaatattctttgaaactctgcttcttcatgctccatgttattccttgataatttatttaaccggcccctactgtaagacgttttaactatgtttaccattttgctgtcactcatcattttgatgaacatcatcatacataaatcttcacttttttcttaggataactttctgttttcttttaaatcagataactgggatagttgtgactgtgtcaacaagagtttctatttcctttaattttactttatagctggtcacggtggctcatgcctgtaatcccagcactttgggaggccaaggtgggtggatcacttgaggccaggagtttgagaccagcctggccaacatggtgaaaccccatgtctacaaaaaatacaaaaattagctgggcgtgtggtacatgcctgtaatcccagctacttaggaggctgaggcaccagaatagcttgaatctgggaggtggaggttgcagtgagctgagattatgccactgtactccagcctgggccacagaggcaggtcctgtctcaaaaaaaaatttttttttactgtatattagtttattggactttcaactgctgaccagtgtcaagttgaaactgatttaatagaatggtgaatacccaaagggaatggtttccttggtggtgaagcatgtttgaacaacctaaagcaacttgcaggaagaggtactttggatgatttttggacgtaattgatccaatccagttggaggagcagatattgagacctgctgtgttcaggccctgggaaatttcagagatgagatgaacgatgtatgatgaagaaattggatgtttagcgacagtcttgctttgttgcagctggcttgcctgggcttttggaaggtttctctcctgcatcttcagcttctgaggccctctatgaatacagcctctggacagttctaccagtgtcccctgtcagggtccccagcccctcagtttgtatctcatgaccttggcaggatgcccaagaggaaggagtaccaccgttagctctgctgaccttggcaggatgcccaagaggaaggagaaccaccattagctctgcctcggctttttctctgggctcctggccctccctttggtctgcacaggtcattcccgttgagtcaatcaagtagctgctgcttgtgacgctcagctggggtatgtctcttggtgccctttgaggagtggccactggtagtggagataggtttgtagtccttgctgcctcgagcactcatgggttaaatctcagttttctgcacctgagcccatcttgcctgacccataaactccttagggccagggccagagtcaggctcacccacagtccacctcagcgctgcagtgtagtgaaaagggcctgcgctctggggcctgactaagctgggtttacatcctgtctggtgttagctgtgtggccttgggctagttgcttagtgtcccccaagccttggtctcctgatctggtccaggatggtacatgcactcagggggctgtgtggattacacagcccagctgaatgctcagtgagtgatctgcattgctgagagacccggcgtgcatttaaatacctaccaaatatcatttcaggtttcacttctattcttctcttgactgactcaagccattcacatgtgcatgatttataaatatatataggctcgagaaaatagtactaacaggttgttccctgatatcatggcatattttgtaactttgcttttatactgtaaacttgaatacaagaactatgtcaaatttatctttgcatctcctaaaattcccagcacggtgcctgattccatagtagaaaaacaataaatagttcttgaatatttcacaaaataaaggttcgtgtgcaaatgtagcatttcatagcagggttggttatttatttgtgtattcaagtaaagacctgaatacataagtttaagtggttcccttaagtctgtgaagcccaagacttgttcttagagattttaattgctttaagtgaaaaatcgagtgaacacagagaaagtgctgtgattggcagccattggtgacgctgatgttgagcattttgacggaggtgacctaaatcagtacaagttccagcttctattatcagcaaaggctttcaaggtggaattggggtgaactaacctggcagtgccccagccatcttttggccttggccatccgagctgttgagacatctttggttgtggtcttctgccagggcatcgagtcccagtcctgagagctgcagagaacctggtggcacttaacagatgtcttgtcccgactctctcatcagccaggggcagggttcagggcaagtcgatttcccacccataagatgagaaacattttggatgaaaaatattgctttggattctcctgggaggcagtgtggtacactggaaagaaaaccatatcaggagtcccaggggtatatctggattctaggccctgctctgcttccaacttccaactcaaagccttgggattcacttctcctctctcagcctcaatttctcatctgtaaaatgaggttggactggatggtttctaagggccttttggctctaagatactgtgtttgaaacgggctgttggtgtggagataataaagggctggagtgaaggtcttctcaaatcctgttttctccttgtcatttatgaaccagaaaatgacagatggcgagacctggacaggaaatgccctcttcagattgaccaaccgagcaccagcatctgggaatgcctgcctgaaaaggacagctcactatggcaccgggaggcagtgaccgcctgcgctgtgaccagtctgatcaaagacctcagcatcagcgaccacaacgggaacccctcagcaccccctagcaagcgccagtgccgctcactgtccttctccgatgagatgtccagttgccggacatcatggaggcccttgggctccaaagtctggactcccgtggaaaagagacgctgctacagcgggggcagcgtccagcgctattccaacggcttcagcaccatgcagaggagttccagcttcagcctcccttcccgggccaacgtgctctcctcaccctgcgaccaggcaggactccaccaccgatttggagggcagccctgccaaggggtgccaggctcagccccgtgtggacaggcaggtgacacctggagccctgacctgcaccccgtgggaggaggccggctggacctgcagcggtccctctcttgctcacatgagcagttttcctttgtggaatactgtcctccctcagccaacagcacacctgcctcaacaccagagctggcgagacgctccagcggcctttcccgcagccgctcccagccgtgtgtccttaacgacaagaaggtcggtgttaaaaggcggcgccctgaagaagtgcaagagcagaggccttctctagaccttgccaagatggcacaggtaagagccccagcagcctggagtcaccttggtgctcactggagcctctgctggttctgggccgtcctagacaagcatagattgccagtttcagaaatacccaggagtgggttaatttccttgtttttttaaatcctattcaaagaaagattatttccagttggtttttaaaaagcgtttatttctatttacaagcaaatattccctttcactgtgagctcagtgctaggggtacaagggcaggtggatggtgagaggcggggtgttggtgggcagactcactggaccaaacactggtaatcccctccggcccttcactggagccgtctctcccaggaagccacccctgcagctgctgcaagagatatacacacacactggggttcagtgtcccttggattatgctgatcctgagatcagggttgtgggtaatggtttccaagagctagcgattggggggacttattcctttgattatactgttgaaacatgaggccatcaggatgttgtgatcaatatcctctgagctgcctctgcaatcatccttgcccttcactgtagaagaagtatctggccacacgcccctgtcacttggactttatcctctttgtcttggagctctgccttgtgctaacactgatcttggatattgatttgaatgagatgaacttggagttaatactctgtcatcaggagcgtctctgagcccgagagttggctgcatctggttctggctggggatgaggaagtggtgctggcccttgtgacctctgactcaaggatgggcggatgtgatgggacacaacactgttggttctgtgttcatccaggaggccatcggttgcttaatgccacggtctgaccatcatcttttctggacttatttatataaacattggtctcgctgggtttcaaggggtaaagatcttcttgttgacgaagatggtttcagaggggttggttggaggggatggccttggtcactcagcattatggccagatccacggcaggcaggcttatcacgctcgctgcgtttcaggtgggcatagctgacttccttccaagcccagtgttgttctctcagttgggtcttctttccttttacaaagaacatgcagtttctcttcatggggttttgctcttctctcctttagttcctactcccaacatagaggtctacccagaaaagaagaggtgcaggtgtcttaagtctaaagcatacctggccccagagtccaaactttctggccacctttgttcaagagcctgggcactggctggggcattatgggagggcaagatggtggtatgcttgtgcctcccctgtgtcagtgggatccgcttgggggagagcctgaaggggtgtggggcagagctcttgcctcttctcagctagtttccatttcttccattgtggctctaggcgtgtgccaatctttttgctgtgtagtggaacgtttttgactttactagctggacagggattgaacacatttattggacaccaagaggaatttcccttctccagaaaaatttaaataggttaaaagtctggaaaggtgacagatttgggtgacttctgaggaaaaccaagagccccgagttctgggtatgataatggcttcagctaaatttttaatactgagcatattttattacctaatcagctagataggtaacaaaaacaacatgcatgttattatattttactagccacagttggaataacaccactggcatcattggagacatttcttgacctcgtttggttagaaactatttaaaaatacattgctcagtggggctgcgcccagttgtatagatggcttcatcagccccaggcaggcctcccagatctgggaaggtgtgcggagcctgaggaggctgctctggttcagcctgtctgtccttggccgcctgcttggcagtgggtctcgggcacagggaaagtagagaggggcctctggaaagtgtgtgtgcccaaggcctatggccagagccctgaggctgggcccgtggacgctgagccatgcccccaccaagagtctagaccctggtcagccctctctccatggggctctgcctgctttggctctgccatcagatgatttctagcctggggaggtggaccttgcttttctgtggggccctgagaacgaggcctagggtatccctgtgtatttatcaagagccctggcgagtgcacggccttgtgcgtgggaacctgatgagctgggcatgttgctggtgtacaaggactaacgtgttgccagatggccagtgaggtgagaccactggccacagaccccagcctctgcgtgctgtggcttcactcaacatttgggaccactgagaaggggttggggtctgctctgcatgcccatggaagcaaggcttggagttgggctttctgtatctttggaagggtaggctggtacccaggtgtggcccacgcttccttccgctgggctctggcttctctttcgtgggccttttgatcttggtttacacattcgcctttgggggtgagagctccacttgtgcattcttgtaaaggcgcccttcgtgtgtgggttctgaggccaggtgtgtgagagcctcgggttaaagctgcagagggccttttcagttagacctttggagcagctggccattctgaaaagctgcagctcccctagaggtcccgactggggcctagagcagatcttgagggtgtgtgtgagcacacgggggcttccctctggccatcattcggtgtggccagatagactgtggttagctggagcccctccaatccgccagcaggaaagggtccagggagagaacccgagagagtaagagggcaggaagctctgaggtccaaggccctgccctcatctgtatccacagttgagttcagcaggagcaagtgccctggggtgtagactctgctagaagcagaggatatcaggagatgtgacctcagagcttgtccattccagtctctcttgaggaaactgaagttctcttggtccctgtgcccatcagagtttttctgggcatggtgttcacttttggatctgcatttagaaggtgacattgacaaaccagaaggcctccagaggtggggccagagactggaagccctaggcaaattgcctgacatgtctgtgcagcagatgccaccaccgccacaggactgtgggaggagcaagggaaacaacatgtgtggataatgcactatccatatgggtgtgtgtttatgtatgtgtatgtgtccacatctgttgatatgcgtgtgtgtgtatctgtatctgtatgtacacacactccccccagtgcattggctggcacaggccgggtgctgacagatacttatgatcatcgtcacagtcgcaggacttggagggagggtgtgggctgtttctgggtgtctccagaggcagaagtaggagcagagggtggacattcctgggaggtgccctcagtctgctgtaagaatgcctgtttttctttgtttgtccagtgttttccctgtgtttccatcctcccttttctgttcacgccactttctttgtcttgtttgttcatcttcttgcctctttgcttttcttttgtaaatgggaaggaggcctgccctgcagctcagctcagcctgtagtcaactcggtgttcagagcccagggttatgaaatggtgacaattggattcacccccccttgtcagagggagttcgccgtgtgtgagcattctcctgtctgttgcccttgaaactagggtggaaatatcctgggggcctgctggccaccctgccccttcctagccacgtccctggggcacagctgtccagttaatggcagtgggggctcttgtctgtcggggatgagacacacagggtggggtgtagatattgctttcagattgtctttgctcatgtcttctgaaaaccccagtgccaagagagcaggcagagatgctgaatgaggctgcaggtgagccggccatctggatcctgagtcggggaggctgactgtagcgaggaaagccctaatgggggaaatgacgcaaggacctagtccagcagtggccgccctccctgtacttgtaattacaaccacttggttccacagagcaggttgtccaaaggcagctcagaggactggctatgctgcgatccctgcgtaagcccggccccgtgggcctcctgcacagctttcctccttacgtggtgtttttggccctcctggctggtgttctctgtgaggctgcagccttccttttgcacaatgacaatgtctgccattgaaggcagggcccagcctgagggtgtgagttgtttattagcaggacttttgctgacattttccttactgcttttttgagacctggtttgaccacccagcattggttggctcccagcaagacttgagccatacgcggccatttagacatggatcacgtgtgtgtgagcaaagatttcagaaaaaagcaacaattaaaaagttcacccattgaatgcagtccccctaggtgtcatagtccctgctgtatttttaactccaagctggtcagcttgaaagagcaacaaattgtacttctcaacagtgcttcaaacagaagcaagatgtttgtggggaggggtcgggatgtcgaaacagaggtttgattgattgcggctgcccacacactgagtccccgaacctccctgagcaggcctcagaacaggcagcaactgttgtgttagcagatgtttgagggaccgtgaaagctggccaggggcagtttggggtagaaaagaagcatgagagaaaccagcatgccagcacgtctttgggaagcctctgagagccgtattcctgggggtgagtccaggagagctgggtgggcggggccgcagggactgggcaggatgaggggttgctgcaggaagttgggagagcttgtgcgtatgctcatcagtgactcgcagctctttgctggacaggtcctccccaggtgaagccccccagccagcttccactttccatcttttgtgctggtggggccgcctttgagggacagtggcccttcttggtcgccatggggttggctacatgacttcttgcgctggcacccccagcagctgcaggccagctgtgcctttccttggccaagttcctgtgcggcaggcccagcttgcctgcacctttgtgacttttcctgtccatcctgccagtggctgttcaccttcagctgcttagggttcccaccgccctgcaccctcagcacccttcctctcagggtgggaagctgtgctgacggcaagtagaggaattcagaggtggagcaccccttataacacagactgcagacagtgtgaagatctagtgagagaggtaggcatggaaagccctagaaagcccattgcaatgaaagaaatgctaaatacaagtaaaggcaaaaacttttgtgggcaggcacacgagagtagttgcttctgacttagagatagttaggataggcttgaacaaaggaagagagcctgtaagacctgggctgtcagagtttagggatgtcaagggggcagctttggatgctgaactagcactcctccttccgtgctcttgacagacattgctaatcaatcacggcagccttttcaggtgaacttagtggaggtcttagaatcctcctcttggcagtcttggcagccattgctaattgatgggtaattgaacgtcatccaccatctctgttctaatcccctcacttgaggatgaagcctctagagtacaggaagagttggggccttgcccaaagtcacatggtgaggcacctcggaaggtgggaaccctgacctcttgaccccaggctcagtgctcccactgctgtgcttggtcctgggtgaggaccaatcagctggcccttccagaggactgatgcacatggggcatagagagtgtggcagtgagaagtgggagcttcggagtcagataactgggggtgtgtccccattctgccacttttgagctgtgtgccccaggcctcatgtctgtgtctgtaaaatgggaatggcagtgcctgttgctcatgagtgtgggaggaatcatgtcgcatggatctggcacacggttggcactcagcaaatgccagctttgatgaacaaagaaagcccgggcctgctgcagcctttcttctgttgctcccatggtagctcgccccacaccctctgctgctctgggcagtgtcctgggctctccactcttggtgggccgggatcctgccagctgtggcgcatgctggcatcaggcttccaggagactagtttcagctctagtcctcatcttccctgcttcccttccttcctttccctccctttctttcctttcttttgacggagtgttgctctgtcacccaggctggagtgcagtggtgagatctcgactcactgcagcctccgcctggatccctcctttctgtctctagtcacagccctcaggttgcacaagcaatctgcttaaggtcactgggatcggggccgagtgttgccacaatagctttgatctcctggggaagaggagttcatctggggactgctaaggaggcagcttttagtgccacttggtgatttccacgcttcaattgagagccatcctgagcagagaatgtttgagaagctatgagactctgggaggccccggctctctgaagtaggggccctttcctaagccagccgctcagatgagagccccggccatgctgggagtgctcttggcttgccaggccctgctctggtgctggcaaagaggcttgggaggccctagcaggcgctgcccttgggaggccacagcctatgggccagagggagaacaaggccttaccagctgaggcctcaccacatctgaggacatcgccagtcttgcttcatggaagccagagtaagaaaggcttgtgggtcagctggctcttgcccctttgactggttcaactccaagggcccacagaggagggtttagagaaaccctaatgtcgttcccaggcttctgaaggagaagcagggagcgtgggctgagacgaggagacagagggctggtgggagagcagggcctcagcctggagccctgcccatggagtgagccccatcctcatcctggacaactgatggaacctcttcatggttcattttccccatcctcgaggaagggtggcgacaccctctctcactgtgttaaatgtctcattaaatgaattcatttgtatgaagcgcttggagcttagttctgtgtgcccaggacacgtgctcagtaaaagttggctgccatattgggagtcacactttaggagtaaggggagaaatttggcaaaaggaggggcctgctgctcatccagtgtgaactgtcctcccctcaggaattctttgtctctgcagcgctgaggtgctctgccgcatccctgctccccagaagaaggcctcacctgagggcgcagctgagttgttgagcggtgctgctggggtatgagtcccgggctctgtaactctgagggcagggttttgccttattgccacgtggtagaggcctctcatatcctaagggaaagagaggtgcactgtcgttggaacacagctgctgttggagtcagaagagctgggtttgagaggcactctgccacctggctgtgtggtgactgtgagcccgttgccctgcttctctgagccttgggtttctgaccatgcatgcatctgcccaggtgtagccatgggcgtcaggttatctgggaagccaacacactgcaggttcctagacgttgtccaagagagtctgaattagcaggtctggggcagagccccagtacctcggggtcccagaagctccctaggtgagtctggggcttgtgggggcagcagagatgggcacattcctagcccagtgactccacagatgcccagggactagttttgtgtcatatggagatggcattgagagttcaggtccctcagtcaggaggtaccagctcagcctggattaggaagggcctgacctggaggagggatccaggtcctagggcgagtgcccactgagctgctgtacccagcagagcaatggtgtccccgcctgccaatgaaacttcccatgcaggagggctcggggttaacttatgctgagtcgagtacaaggcgctgcttcagaaatgtctggaaagcctgttctagtatatagggttgaacgtttccgaggcaagttctcatgggtgggttgttaagggcaagttccacaccctgtttgatatcctgccttgtgtgcaacggcagagtgaatgaatgacaggaaccctgagtgcagagtagaagcattagagggttttaagcaggggagcaatagcaccccttaaaaagctcctttgggacaacagtgagcagcatggactgtaggttctgggggaggtggggaggccaggcaggaggctattggcaaacatgaaggtgggctagacaagggtgggggcagtggaagtggtgataggcataaggggctcaagaaatgttctcgaggtgaaagcagcagggctggcttccaactcaccctagtcataggcctcactgggcagagaatcaattatcctaatccccaaaggtggcaactttctttaagctaccctgtttagtgtgtgctcattgtaagtccctcttgttatttaacctgcagccctcactttgactgtatttcttcttgatctgttctcagtagaactgaaatccagtggatcaccatgacctattttgtctctgtatgaaggtatctatgggactgtcttaccccccagtccttgcacatctgtgatttgctagcccagctgctccttgccactggggaggccccattccttaccctttcctgtcagccctcagtttgcaaacctctgactcctttgcccaagcttctctgttcttgtccatttgaaagtggctgcgcattctgaactctgggctggagaagggctgggggcagcttagggccacaggaggattctttcatggtttctagcgcttgtcacgctggatcttgtctcagctgtgccacatctggtcagtttacaacagctgggacagcagctccgggaaacaaggggcctgtgatggcctcctcgattctcctaatgaagcctagtaatccccagctgggcctcagaggatgcagcgaaagggaggcctggccaaccccaggaggatttcggcattccctgccttattcctgcttcctgatccgggacatcaggagaacgcctcgtgggaagcccctcccagcccgaggttagcatggtgcctgcgggctgttgagagcccagtgagggccagagcaggaagcacaaataggtgcatcacggagatgggtgtgggatggagacggagctgtgcccagagcccagcacggctggtgcctgaccgggccttttcccgacaccatgcaggctgctgccctttgtgggtccatcagtgtgaagcctttactttagcccacttcgcctttggcagcatgagcctctgtcgccccaggcactgcatcagtagagaatttctcctgctgacaggagcccatttatgtaccatttttgtggtatcagccatccggaattaccactctttcttgcaacttcaagccacagtcaagaaatcagaaagcaaatgccacacgaagaacaaaccctttgctgcaatccccatgctggcgggaacttggtttgactagactcagagtgggtgttaattgcctatttatggccaaaagattaacaatgcctcctttgaaagttagacatagtagagctcttggataattcctttttgggagggggaggagtggcttaaaaaaaaaaactcttggaaaacaaaagcaacagttggttgcaaaatataatgcaaccaccagaggcttagtttgtgagcagtaacgcgagctcacatcagtaatgtgtcaccagaggtcatcaggcaccccaccctctccctgaagggccacagactgcatttactcctcatggagtagtggtggcggtatggaggcccccgctgtttccctgctggagctctgtgggtggagtgggtgaggcaggcctcctggatcagccagggcctgttggggacagaaaccagcccgttagatccaggtgaattcactgtgagcaatggttagctaggtttctgaaaatctgaaaagccaagaagagaaaacgaagtattaatatcatgcagaagcagctacaggaagctgctccccaccttgggctaggggaccccagggcagagactgcacttctgaaagcttggcagcgtggagtccattggccgcacagggctggggcaagacctgagaggcaggggcgccggctagctggtcccgcagaaagggaaggtgatgaaattggttctgtgaatgttggaaatgcagcaaatgggaagcaactgctgtgaatggagcagattgctcctgcaggtcacgcggcatggctgggtgacggtgacagcacaggaagcagacggggagatgtacggctgcctctgtcccccagcctggctctgctcagcatccttcagttaagcgctgtctaacgttctccagcggggcgggagatctcttctagcgcgcatcgcagctccgtcctagttcttcactcagcagatccttgcctggagtgtgctggccacctggcattcagctaggccctggggatgtttctgcaatgcagaaagggggatggatgtcattcaggcctacaacaggcaggcagggccctttctgatggcaatatttgtgctaatgagaatccagcaggccagcgtggtttggatcaccaggcaggatgagaggaggtggaatgggaagtggccagctttagattggagggacagggaggccttgttgaggaggtgacattggcacaaagtcacagatgatgagatgtgttcagctttgcaaagataatcagggagaatgtcctgagtagagggaaggcaagccccagaggtgggagtgggtgtggtgagtgcagggcatggcgaggctgcggtgactggggtcggagtgggcgtggtgagcgcagggcacagtgaagctggggggacaggttcctgagtcgggggtgcaagggatgcttgagatgtcggcagggccatcacggttggccttgcaggctggggtgaggagcgggctttttgcctggagcgcagggttggaatgccatcagggctctggggccaggatctgatgggatactcagtcacctgccttacctgactgctatgcttatcttccaccttgggggttcgaccgcagacggccccagggaaaccggttcaaggaggtcacggcaagaaggcacatgagggtgaaagcataccagagagatgcttaggcagggccccagtgtcggggacaggctcagaggaagttagtcaggcacctctgcaagtgcctctcatggtgatgagtgtcaccgcccgccctctgttgctggacagtggcagcgagtggcctgaggctcacaggggtgtctgagttctcccctcccatatctgcacacacatcagcctcaccctggctctgggaagtgggtcactaactcctaatccacgggccggtgtttgcagggcgtcctccctcgggtgtgtggtcctcacccaccctgtaatcctcacccaccctgtaatcctcacccaccctgtaatcctcacccaccctatggtccttacccaccctgtaatcctcacccaccctgtggtcctcacccaccctgtgaggggctcctcctgttctactttccagggaagaaaagggagtgccgaggccatgtacttgctggctgcgtggcagagcggtgagtgggatccactcactctttggccccgacagcccgtgggcccccatgtctccatagggctcccttcctggggtgagctccccaccacttgtgaagcacagggccccgggaagtctgggatttgccctaggctttgggttccctgacggtcaggtagggatggtgacatcctcacgtggggctgctcccagcctttggcccaggacctggtgctcaggtggtgctcagaatgtgtggctgttacttaccacatcctccgggcccatcaactgatggatcagtgaatccccggtggccctgacttctcctcccagcccttgagcagactctgcatttcttgagctatgagcaggctggtaaagccgggcacggggctcatagagaggctctgtggccagcaccatggcctctctggaagagcgctttagttctgcctggcactgcggttcagctgtcctgttgtataagtccgggacacgagggagaagggcccagtgatctggtgctctgccacactgagcggaggtgtgtggacagtgcgcgttacatccctcaagtggacacatccagaatgtgaaataatcctcttactgcccaaagcagaacgtttgtgaaccatttttttggtgactttgctgaagacctctgagcccttggccactgccttctaccccctacaccccccaaaatggcttgtcttgaatggcggggaggaggtccaagccagccctgcactttccccaggccaggggcctggctggcctccgctctcgggcctcttggcagctgctccggaggcagcaccggatgccctccactcacttccctccgtgagaggcgcctttggcacatcaggccttgggaaggagtggcaggaaaacctggcattctgtgtcccagaaggaaaaggcctatcagtgcccatacttgaaacttggcacacaaggggaaggtggtttgagggcacactgtaacggtggctgtgccgtaccgtgctccgccaggcctgttctgtgcacacttgctgggcccactcagcctccatgaggtcccctcttgcctcatgacccctggccccacttatcagctgcctctttgctcttgtgcctccctaggaagatgagacaaggagagcacccttgtgggttgcctgggtcttgtcgtgcctttctggctctgtaccttgtgtccccttgtggaaggacaggtcctgcctggcatgggcacagtgctgtgctcttgtctgccaggcagttctaactgaaagtgcattgcccgtatcccccttgctagttggtagccagctttaaacaagcctgattcacctagagagtttccatctcactgtaatctagaacagtcttgggcaacagaattttctgagaattgatggcaaataaacatgggaataaataccctgcggcaggggagccggtggctagaaacaccctgctgtgggggctgtggtcctgctcagaaacagcttaggccaaggggcgagatggccgtgtgtttggggagagcatttccgcagatgttggctgattatgcagcattaactgtttggcaagaaaaaatatctcatctgaaatggtgtgaggttaattgtcactcagcagagacaccagatcttcagcttgattcacgcagggaaaactacgaacaaatatgcatgccggcatctgctccaaacctaggacagcaggaaatggaaggcagtgtctggcctgggctcccctgctaggaggaatctgggctccagagataggtgggcctggtgtggggcttggtgtgcccctcaccagccgagtagccctgagcaagtcgctgcccctccctgggcctcagtgtcctcctccccatgtcgtgggagtgaagcagcctgatgagggagagctcctacagcaggcagctgtgcagtaccccctggagaggctcagcaccagcatggtgttcttgatcttattttgttgctgcttgtgatcttccagaagggtctctgcttcttatgaaatcttccatttgaggcatttctggaggcattattctcattagcttgagggcagtccagtgagggagagagcagccctctgccctgtgaccccgggcggggctgggaggctgtagtgcgagaatggggagagtcaggtgcctcgcaccccaggcaccaggaacaggagcctctcccagccctgcccggtcctcctcagccctgtggatgtggaggctcagagggcagcctctgaccacacaggtggagtgccaggccacagctgtgggctgctgactgttggcaggtgaggtgggggatgatttgcagaagaaactcacctgttgtattttctcctccagatagccccatgaggaaggcacatcgttatccattttacaggcggtggctgagtcttagaggaagcagtccagtgaaaccagaactcaagccacatatataatttaaaattcctagtagccagttattaagagaagaaagtgaaatgactttgaatagtatatttaacccagtatttccaaaatactatcatttccacatgtcatcgatgtaagtaaatcatgaatgcactattttatgttcttttttcttactggtttcagagatccactggtgtgtcaggtgacagcaggtctcagtttggcctggccactgctccatcattcagtgactgcatgtagctttgctgagtggggctttggggtacgggtataagagtgtgggggggttgggggtcagccttggttcccacttggtgctgccatagacccttttcctctggaagggcccaatgccagctggtaaaggaggggctgggcaagaggcccctgcctgaggtgctaggtgctctgggctgtgccctctgcctcgggtatagcaggccccaggagacctgaggaccagagcgtctggtgcccacaggctgtccatggtggaactagaggttcctgggctcacctgctccaccctcctcgtggggctggtccgggaggcccggggagttcactgtttctctgagcatcctgccctgctctctgaggcctcttttctactgtacccgtgcagccctgcttagcctgctgttcctggcgtgtggccggggcagggctggggagatgggaggtggtgggagacggggtgatacaggaagacaggggcttctcatcagggggtgctgagaagacagctttgcagcatgacaggccctgggccatttttccacggttgtggtcctgcatttcatgactgggctgtgcctttgtccccacatgtcccctgctcgagccactcgcgtcaggttctacacagctggccagctgcaagccccatccacagggagctcttcggggtgagcccccatctaccagcactctggaagtgagtgtgagcctggaaggttgcagtggcaggtggagggaaggccccagaatagaaggaatgtggcagaggtggccttggaccaagccgaaggttccagagctatcctgtctctggggcttggcagcctcttaaccatagttttcctggaaaattgcatttgtggctctggtttgccccacccttctgggagggattcacaggaatgtcagggcatctagcttatcagcctgggagcttcaggaacgtggccctgcccaccaggggaactttctgggccctcagagtctaggcagccaataacctgggaagctggttcaaatcagcatgcattgattgaacaccagctgtatacaactgcctgtgccagggctcagggaagactagcgtgtacaagaccccatccttacctgcaaggtaggtgcaggctacagggctggggtggagacagctgtgtctacgtagccgactataagccgagtcacagtaagatgagctagtcttgtcctctgaggatcgagattcaattctagattaatctctttgttcagccactatttatttacctagcatttgctgtgagtcaggcccttgtaggcaccagggatgcagcaatggagaggacagttagccctggcctcctggaggtcacagcaccaacaagtcatcacttagaaacgtggaaagggccatatcaccggcccacgtgaccaatgcccagggctgtatcctctgagccttggttttctcacccatctagcaggatccataatagcagttgccaggacgaaataagatgatggacacaggacctccatgtatgcatatgggattgttctaggaagccaggagtaggaagcgaggggcacgttttgagttctgcctgtcatgtgcagggcctagcactggctcctttgcaggggagctaagaagctctctagtcaggggaacaggcttgggcagcccatcagttggagtggagaggagacacaggcacatagatgttcctaagaccaggagcagacagttgggctggaactggggttgggagagccacctggagagttgaggctttattctgtgggcagcgaaggatggccctgggcaggtggccagggacttgaacctcactcaggtgatagacaagtttggggcagtaagagaaggctatgcccacgcctttggtacccttcagtggagaaagggggctgtggaactgtgcagagcactggaggctgtgaactgctggggcctgaagcccttgggaatttcttgcctggttctcaatgagggtccaagagcctggtgcacacaagcgagggccactggctggggctggcctctgtagggccagtcaggtgggttctccctctaccttaccaggaggggaaagttcatcagggaaaaaggagctttgtcaggtttgtccttggggagccaacctgagtcagaaatcaggagccgagaaagccagaggcaacagtcctggatcgagcagcagcagaaagaagctttgggacttccctctggccccacgcagtgagaggatggggacttctgccctgggcagctacttaacctctctgtgcctcagtttcttggtctgaaaattgggtaaaagcagtgcctacatacagcaagtgcctaataaatcattgttttggaatacgggactatcccatttctgtggatggctggggtaaccactgagcatgagtactgagggcctggccttgggcacagccaggtcctgtcttttgccgtccttaggtgacttgctgagggccggagagttggctagctttgtgccatctgcgcagagttctaccctcagagctgtagccctgcgggttttgaagacttgggggccttgtagcccctggtagaaaggcagattgtgatggcggatctgggcttggagcccaggtctctgccttcccggcccagtgttgaagctccccaagctgacctgtttcctaaaggcgagcagcatgccagggtgcaccagccaccattggcttttggccccggaggcctgctttggctggggttttgcccacttcccatgcctggggtaagcgggccccagctctgaacctcccttcagggactccatggaggtgctggaggctgctctctggcaagtcttgtgcttgatctgctggtgtcaggcagccctgggggccagccctaggggaggtgccagtgtgtgcaagctccatcccttctcaagtggagaccggcacctgctcaccacaggtgtgtcttggccaggtgaggcctgagcctcaagctcctcagtgcctggtgctgtgtgaacctggtacccaagctccctggaaagcatggaggcatccaggcagcactgaccgcagggcctggcacggtgttagctcacttaaaccttgcagtgttcatggggtacactgacgaacagggaggctgggcatacaggtgtcccgtgccaggctcgggagacctgggagatttggcccagagcctcctgggttggtgggaggaggtgaggagcagtagcatcggtctctggagacgcccgagggtagaagcacagggaatataggctgctggtaggcgccctggaacaaaatgagccctggggtaaatgaaggcccatgacgaacccttgttaaaggcccaaaatcaccatggaaagcttccagctcccagagtgcagttcaccttccggcacgaagacatcacctggcagcacgatgggacttcagaacctcggtgcccaccccagacctgccggatcagagtctgtgttttaacaagaccaccaagtacatcgcgagctccttcaatatggaaagtgctgaatatgggagatgggccctctgtgggaggccacctctggtttgtctttggtttgggcagccctcctctggctcctcttgcagctggggacggattgggcctgttctgcagaggtggggccggagccttacttggcagccgctccagtgctggcctttctctagcctctgatgttggtctcctgctcgcattgtctcttttcctaggaacgagggcagtgtggttcatgtcaggaaccttagccagagctctgtacctcctttggcctaggccccactccttggaactttggtcaacacacaaatgacagcactgatggctttggtcatgcacaggcttgcactttatgtgtgtgtcctgtctaccactgcagctctgagaggcagggatgaggctctgggaggagaagcagcctgccttgtggtcttctggggtccacactcacatgacattgaaagacaaggacaagaaggcacaggcttagatttgagacttgcccctcagtgtgcaaaggactcagtgaccgtttctcgttcctgctctgtgtgagaccctgtttcacctggtctaggcttgtagacaggtgggcattccaggcttgaggtgcggtgaccaagcagtggtgacagctggcccttgaggccagggcctgtacctgtctggttctttaactagacctctagcacctaccaaggtgtgagtggtttcccaaaaatcgattgattgacaggatcttgctctgtcacccaggctggagtactgtggtgtgatcgtagctaactataaccttgaactcctgggctcaagtgatcctcccacctcagcctcccaagtagctgggactacagatgcatgccagtatgccaggctaatttttaagtcttttaattttttgtagagacagggtcttgctatgttgcttaggctagtcttgaactcctggcctcaagccatcctcctgcctgagcctccgaaagcactgggattacagatgtgagctactgtgcccaccctctaaaaatttattgaatacatggatggatggatggatggatggatggatggatggatggatggatggatgggtgggtgggtgtgtgggtgggtggatggatggatggatggacggacgaacgaactcacaaactgaggcaggaggcctggattcttccccattgggcacatcagctcctccattgatgatacttagtaagcaaggatgacagcattgtttactggggacagtgtggcaggcactgtgctaagcgtttgtgtagctgtggattatctttattacagccctggaaagtgggtattgttgtgcttgttttacggaagaggctgaggttcagagtagcggccacggtcacaggaccagctgtggccatgaggcccatgcttgttccactccccaggagggggtctgggcagggctctgggtgccaggcccctcccatctcaggtgttgtccacaaaggggtctggtccagtgagggctagagtcatggaggtgaggggttggctaggccttcctgccttgccgtggtggacacatgaggatccctggtgtgaggcagccaagcagccgggctcaccgatcggagcccagacctgggatggcagcagggatctcacatgacgtcatctagggagcttgctctggcccctgctaggccagccgtcagagccatgtaagacagtctaagatgacagttgtcactgttgtggatgaagcaggctaagattggatcattactgaaatctgaaacttgaatttaagtggggacaacgagcagtgtccaaacgggggcagtaatggtggccttggtagagcccaggaacctgttgaaggaaccccctcgtgcttttgacagggcaccagaggtgttggggtggtggtggcagaggacagtaaaaggtcccttccctcctccccactgccctggccttgaggcctagagagacctcgcagtgcgggacagtggctgtaagattgtctcagagcccaccagctgggagaaggaaaagcacaggacaggcgcagcttttattccaggtgtcagatcctgtttgggccctttcaggaggcctggcttacaaggagagctagactctgcctttttcctctgcagttgaggtgggttagagggcagccatgggcccttctgctcctgggcctctctcaaccttctggggaccattctcatcacagcatgacctggggaacactcacagaggacagaggtcccagtgtctgttgagttctgtgtgggatgcgacacacctccgtttaatatgctaactatagatctgctgagtggacagacccctggaacctcctgattcaggggacattcactgtactcatgactccagttatggccatgtcttccaggagtggtgacagctgtcacctcagagaaggggtcagcacaccatagcccacaggccagatccttccattgcctgttttttttttttttttttttaatttcagtagcttttggggtacaggtggcctttggtttcatggctgaattgtatagtggtgaagtctgagattttagtgcacctgtcactcaagtagtgtacattgtacccaatatgtagtgattgcctgtttttataaataaagttttattggtacacagctctgcctggatacatacatgttgtctccagctgctttcatgctacaacggcagggttgtgtagtggcagggctgggtcattatgacagagcccgatagcttacagaacataaatatttactctctggctctctaagaaaagtttgctggcacctgatctagatgaccttacgtctcgatttccccatttggaaagtcactggatttgcttggcaatttctcaccaaaagctaaagctggccctcgatagggcccaggaatgtggcagggctacaaggcagctggctcggctgtctcaggctctgccgtgctcaccgttggcctcgagtgggcccttcccatgcccccccaggtgataagcaggcatgctggcgagggggctgtgggaaaggggcacttagtgctcgtgaagcttggctaactggagccttggtatcagggtgagttgtattcaacggatctcagtgcacaaaagtgtaatttttacaatgaaaatggcattactctggggcattcctctggacgtaccagctgggttgcttgtctggtcccagtgagatgtcttttccaagctgtcttgtgttgccctcatgcttgagacagtgtgggccagagcgaggatggatcgtttgctctgcgttcgtttgctgcctcaatttcctctgtctcctgaagcattttggtggggctcttccgctccatatggtggaacgaaacccaaacgtgaacagcgagggcagcactgggcttctcgccactgaagacaaacccctagaaagttcgctctgggccaggcacagcggctcatgcctgtaatcccagaacgttggaaggccaaggcgggtgggtcacttgaggtcaggagtttgagaccagcctggccaacatggcaaaaccctgtctatactacaaatacaaaaattagctgggcatggtggtgcacacctgtaatcccagctactcgggaggctgaggcgggagaattgcttgaactcgggaggcagaggttgcagtgagctgagattgtgccatggcactccagcctgggtgacaagagcgagactccgtctcaaaaaacaaaacaaaagcaaagttgactctggcctgggacccagaaaactctgtcagccagatatcttctggccccttaggtggacagccagctcagaagttgctagaggagatgagcctgtggtaatggagcttggcccggcaaggtggttttgcagccactctgtgaaaataagggtggggatggttggctcagatttaaaagcctcagctggctgtggttttatcctgtgccccacctcaaagttaggcagtggaggctgtcccagggcagatgctgccattgtctgagaaacctgcagcagccagcctggagccaggaggctgttgcgtgggctggagcatctttggggacccagaaatgtgttagaaagttcttactgtaaccaagaccacttccaccactgctattagctctggccctagcactggcctgttttgaaactgacaatgaaaagatgaggggcaaggaggaaaagctgctgatcagttgtatctctccctttaaataaagctgctccttgtggctcctcttagtccttccttggtgagcagctctgctcagactttaggcctatcatggctgaaagcaggaaggctagaggtggagggagtcacgattctccaaagggtagtttagcttcaaaggctgtatgtgtcctgcaagtcctgtcagtgtacactgagctcccatgatgtgcaagatgctggcagaaggggtgggtgcacgtcagccaccaaacctgcccatccccaccatcgccatcccagtatctgggacacagctactgttattgtcatgccaggttaccaccacagacacagaagcacagacctaattaaataactcacctagggccatggtgccggttctaggcaggtaagggatttgaacttgggtggtgtggctagcagtctgtgtgctgagcccgtgcagcgcagcctcagtgggggcacagggagcagggtttgaggaccagcaggctggagaagctttgacaggcggacacggggagcatgggtggaggcagggaacgtggccttggtgttccatccccaggctgtggccctttagctcactgcactgcagttgtggcctgggttgccggggtgaagtgcagggatgttgctggaggcacctggcctgctcctaggatctcagcttcctccacatgccgtgtgcaccttcctccctctctcccacggtagtttgctgttctccaggacttgtatggatggttctcaaaggtccagcaccattaaatagatctcactaaggtgacacttctccaggtctgaatatgcttgtgtctcctagaaggggtgaagaatactcctcttagcccattttgcatgtatgagtgggggccacccacttggcaaagcagcctttgagaaacaccagtaacatgtaaccagggtagggatgtggcaatgggcaggagggtcccccttgacatctattcagaggtccatagcctgggactcctgctgaggtgacctggggcgcttctggacctgaaacctccttgggtggcattgtgtatggcagcaccgaatatggccagaggcctccgcatttgccaagcgggatccctatccccaagcacaccagtgttttccttagtttcttgcgtagcaaagcccctcccctgggttcttgctcgctgcccctgtctctgccccagactgtctgctgggtgagcctgggaactgacctggttctttgactgtgggagaaaagtcaccagtcacaaccaagatgctgccaaagtgcccacccagttccgtggtcttggtaatatttgtggttagtatgacctacatatcgtcacagctgctttcagtggccgcgtagaaaagcaagcaagcagaaaggaaccttcctggctgcggagaagctgtggagtaggctggctgcaagcaaggcctttggagcagatggagctggttgcggctctagctgtgggactttgagcaagtcattggatttctctgatcctgtttcctcattcgtaaaatgggcatgaaaagagggagttaagtgaaatgtctgtctcatgctcagggctaacagcacacaacaaatgctcaattcatggtaaatggtaatattcttgttagtagagggcacaaacacttgtatatcagctcaggagtatgtcagtttcacattcattgacatttactgtttctactggttaaaaaaattaatgcatacttgtaaaaaagtttaaagttcagaagagaaaaaatatagtttggaaatgtaaaagaacagaaatttaaattcctctgaaatccacctacagagataatgatctttaaatatttggtgtagttccttgcagtcctttttctgagcagttataacgctgagaagtgactcttgacaccctttctagccccaggagtccatggattccacaggtgcaaatacagattttaaatcatcatttaccaatgtgtggaacaatgacaagaaatacgaatttgttgctttaaaaaggggaaagaaacatgagttaaaacaaaatatattagcttagcactggtttcttactctatccaatatgaaaagcagacacagttttttttcctttcttttaatctgtatactgccatttcttatatatatatatatatgtacatatatatatacacacatatatacacatatatatgtatatacacacatatatacacatatatatgtatatacacacatatatatacacacacacatatatacacatatatatacacatatatatacacacacatatatatacatatatacatatatatatatatttatactttaagttctagggtacatgtgcacaacgtgcaggtttgttacgtatgtatacatgtgccatgttggtgtgctgtacccattaactcgtcatttacattaggtatatctcctaatgctatccctcccctctccccccaccccacaacaggccccggtgtgtgatgttccccttcctgtgtccaagtgttgtcacagtttttaaaaaaactcctggcttgtgcaacatagaattgaattattttaggctgttcagtttcaaagactgtgaatgttgatgctcttgtatccttagtttgtaataatgctatttcctctttaacaccacagaacacactccatcagtgggagggcagcacatcacctatgatctcatcaaccctgttgtcccttcgggagggtcgtgttgtctggccttaggggctgggctggcctggccgcaccaagcacaatttgaccaactgtttccagcctgtccgtgaacaacagtcgtttccaatattggtctgtgccatggacactggagcaacggtgctgatggagcagtgccctactattagtttggttttgttcttaacaaatagtctatatgtgagttcagggggtctgtgttcactgtggcattgtacccaaaccagccctccattagggccatggcgtcggggaacacctgcgctcccactacagcagggctccctggagcctttggctctcttgatcattcagagcatgcttatcgtggggcctggggtgcctccagactgcgcctccacagtgggagtgcctgctgtaagtgagcaaacctagacgcctcttggttgtatgtccgcctcccagatcttgggccttgccctgttccagtgggcagaatccaggcctcctcctcatttcctttgtactcataaaggacccatgttcaggtttctctttgccacctgttcaatgtgtctttctgggacctactgtgtgctgggtaccgtgctggtactgtagagcaggaaaaacagaagcaatgccccattgcctgctgctggatggatcccgttctggggctagttctgtttggtacgtacctgctgtgtgcacatactgctcttggcactgaggactgtgtggagcaggatggccatgggcccttctctctggcagcttccatctagtgtagacagatagacaatattaagagcaaagcagattgtgttggacaaagtaagtgctgcaaagacaaggagcatgggtagtgggacagaggcgacgagcagagaagtagaaggatcttctgcgtggaatgagagacctccaaggctggcgtgtgtgggaggagctggctgtggctggggcagagggaccccagcagagaacaggctgctggatattcatctgtgcctgctgaacccctgctgcagtcaggagccccagctctgccattaagcagtccctggatgacagtgggcgttacctggagtggccacgctcaccccaaggagaggctgtctccagagccccagtgctgggcagctcttcctcattcctcggcatcccgtgtttcctgctggtatcgtcctgagaagcttcgtgggatgagatgtcttggtggggaaagccaaggaggtagcaagttcaaggagcccctagtcttcctgttgacacccaggagggtgtggctttcaggcccctccccaggccagcaggtcctgacacctgaattcatgtggaaatgctgagcctctgaatggcctcctgctgtgtgagactgggtggtgtccaggaggtagtcccagggtgtgggtggggagatgggagatgagaatgtcctgaagctagccttgtcacctgaatgtgacaggacactgtggtcagtccaccctctccagccaagagtgtccaatgtggagtgaagttatgaatgggcccctaagctgggcctgaggaggcagccccgggccctggagctcaaatctgtgttgccatcatctaaaacgggattgtccagaagcccatcacctgtgtgcccctggggctcctgtaacctgggcacgctttgggacctgtggctcactgcagtcttggctgttggcaaagcaatcattgtgcatttcctgcctgtcttgctttcaaaaggagcccgaggggcctggtgtgacttcccccatggagctccttagaccagacacagacagggcgagcagaggcacgccggggcctccttacctccttctggaaggggcctgctcacaaacccagggactcagagctgggggagcagaaggtcccaggcctcaggaaggccaaacacctacagccctacccacaacaccactcatgtccgcagagatgtcccttcctctgtagtggaagggagtgggttctgccaccacccgagctgggggtggggaccctggcacatgcctggagtcgggctttctaccctcgccctgggcagggagggccacggggagatgaatcagaggcggattctgccttccagtaactccttctttgttctgctgtaagtggaaagtcagccctcaccatctctgctgccatccccatgactgcagacctttgggaagccaaacaccacctccctgggagcgctcttccttcccatccttgccagcatggccacagaccggaagtggcccttcccagagctgatgttccagtgtggtccagtttctgtcctggtgtggagagaggaagtccgctcagacccaggggttgggagggccaggccctaggctccaggtcctttgtttgaagatttttttctgagcaccatagcgttgcatgacgatgacaatcgcacttcgcatggctgggcgcagcgtttcattcacaacatgcatttttctcacaatgcttcctaattatttcctttggcaaggataggagcctctttctttaggatagcacctgagttcccagagccacagtttttccaaataaggaggcatgtggctggtgtccagcagatcccttaatggctctgaatgcccctcctccctgcgtcctcagcaacctggcagacttcagcccaggaagggtgctgattggagctgcctggtcggcttccagaaggttaccaggtgggaccgggctcctggggctttctagctgagtttctgcacagcactggtcagtataaagaagctggagaatccagctggcatcaaccctgaactgggcagcaggtgttccagacctggccacacatggactcccccatctgtccagcaccttggaggtcccaaagtgcgttcttgcatcctgttcatttcttcctcacaggatccctctgagataggctctgcttgggccatgtggacaaggaaagcgaggctgagactgggagggtcctggccaaggttaccctgagaagatagtggttaagagagggctttgacccaagtctggctcatgagtctgaccccactgtgccagcgagacccagctgggcctctttgccctacagatgagtgccgtcagctgggccagtgtcctggcaggggcccgcagcccatcttgttcttgcaagacctcttgaaagtgtaacacggagagtgaggcctggccatccaggaccctggcagtgcctgggtattttcagctctgtgagatgcccctgttgagtccatcagggtccccacgccagagcccttctggcaagcccctgctttactccaaccctcctggcataaaggaagctggttgtcccagcctcaggcacagctcttctggaaatctggaggacattacctcctggctggccttgagcttggggctgcatctgagaaacatatccaagcctatgggcttctccccattcactgagcagggataaaaatcctatcaaaatagtttttgaagagcaaggccctaccagtgtcattggggcacatgaggtgaggcaggcagccctcaaggctctgtttaacttagttatctgcagagccctccgggacctggttgaaaaatgctgtcctggcctcaagggcacgtgggtcctacctcttagggcctggcagcacagtctcctcctggccaaggcatctgggtgcacaagggaaggtagggccattttgtctacagctcctttgattggtcgagcacacaccaacacagggcgtcgtctgcctgtgtgggctggagaggcaagaggctcctctgccctggggactagcctgagggttccagctagtagatttttgcctttctgtggtttgctcggccgttccctgggtactcttgctaccttccatattgaaggaagtggaccccgaactggagccatataggacagatggggaatgctgctgcttcaggccctccaccacaaggcttccttgtgtcattaaaatacatactgtcctttcccactacctgtgggactggtgtttgtgatagccctggaatgtgagcaccaggaaacactgaatgtcactcacctccttggaccccttgcctctgcaggtgaagccactgaggccagaggagggaagtggctggccatggtcacccagggttatcaccgtgggtgacaggctgggaccagatgtgagtgcagctgtgggccgggccccttcttctctctaaggctgtggccacagcctcctctgacacctgacaacagcatgaactcagcccatcccggtgttgcccagggcctcagtttcctgatctgtgaattgggcatgagttccttgctcaattcacccctgggcacggctggatgtgaacgtattgtgcacatggtaagaccctggctagtcctaagccctggtattatggttgacacctactgagtagaaacagttgggaattgatagcttttccctctgcgggttttcataaccattgctggacaccggcagggacaaacttgggaaagtcttgggacccaagtggaagagaggactataaatgaaaaactagaggggataattccagcctcaaaagcatgctcgtgcttatcacactttgatgttggctttgaaattctccaggtatgccctttggaaagggactcctggagggcaggggcctcgcttcctggcccctgagttcacattgctcaggagagcacctggtggaccacagatgcttcacagatgggggacaaataaaggaaccagcaagcaaaggctgtctgggttgagaaccgccctcagtcgcagttgtcctgacgctggggctggcgtgaacgttccaggcccagtcatagtagacagcaggggtggcgtgtccccgccatgtgccagtgcccagtcactgccgacctgaggcaggggctagacatctgtggggctctgctgaccttgaccctccagagcaggcaggccccagggtcggaagtcagctgacagtctccacagtgctcccctgaggaggaaatgaggaggccgctgggcctcactgtctcggaggtgggggtggcaggggagagcagcaggaggagtggggtgcatagtccaggtccctggtgccgtgtgtgggattgtgattccgtccagcggctgggctccctgctacagtgcctgcagttcagcagtgaggggccacagcatgcctttatactgcctcccctggcagccctcttagcttcatccctgcctgtcctgtgtagctgggaggacagagcagagcaggctcaggaggatgccaggcagcaccctctgctcagccgcacccctccagcctccttctgcacctttgggaaggtgcagagggaaatggaacacgagggaactgagttagggccctggggcctcagctcctggaaaaggctagcagcaaggccacaacagagcgtctgagggcaaggtggtggccacctggctctgtctccctgtggcacaaagggagaaaccgaggccggcaaggacagaaggcttggctttgcccctgtgctgagtgcagctggccctgccttgctgccacctttgctgcagtggctttggctttggggtggtttgggcaggaagtggcctctgaagggagattggggggctcccagtgtctggcgtggctaattcacatgcgtggagcctctcggtgtgactcagcgcccgtgagtcctcgcatttcttttttctttgttgtcttaggtttgttttcattctcgttgaaggcaagaggggggtttcagagtttagggcacagaaaatccactttaggatgaaccctttcttttcaaacacatctctctctcgaaacaaatggctgatggcaaaggaatattggcctcctagcagggctggggacattgtactggggaaatagtctggaaattggtcatctgcagaagtagttttccttctggaggaggaatgcctcactctgggaggcattaggtggaagaaaacagcgcctctggagtcctggggttagggttcagctctcggcttcgctgtgctctggccaggtaaactctgagctgcagcgtcctcatttgtaaagtggagatgagaagaataacttgcctcacagggttggtgtgaagatcacataggccaaagggtgtagagcgcctagcacatctggccacactgtgcgtgcttggcagatggcagctgctgtcatcaccatcatcaccataaccaccgttactttcagcgtcacaagcaccactgccaaaaccaccatcattgtcatcatccagcgtggagggtccaactggaacgcttagaagacctaggctcatgcctggttctcagattcagggtagacgacacctgtcccgcgatgacctgggcctcttttacctttggcctcctccaaccgatagagagtccttccttggagggagaggtctgcctccttagtgcttactctgggagcagggcacagcctacagtattgtaaaattatcctatacttaattatattactaagaatatcccagctccattagggagataagtcatctgatcgataattatgtcatctgtacctgtcgccagcttgtcttgttatgacgttagttttactgctagaaatatctagtagatggctggaaatctgcaggcaaagtgcagagggagtgagcctgcgaggagagggcctgggcaagtgactgccctgggccgcagagttcttatctaaaaaatgggaacagtagtgtcttcctaaaggcaccatggacttaaaatgaatggcacgtttcctgggacttatgtatatttggttgcttatggggacttacgtatatttggttgcttttggggacttatgtatatttggttgcttttggggtctgaaggagtacaaagaatcaagtgcacacttcccagtgtgtgagggagaccagggacaccgccagcctgagttctgggtagggcagctctctggcagtaagccctccatcttacagggggacactctgcatggaaggcggcctttatccagctgtgagaaagcagactgaggcttggtctggaagctcgtttagaacaggcattgtccacatccttgcagtggctgggattttggcaataccttgtgttatgcgacggagggcagacatgttgggagaaacagctgctgacttgcctggaggtggggccggccaggcctgctgtttctctttcccaccatggctttgttgcctgggccagcctgccctgtagcaccctctctaccccatcctccattctgcttggtcagatgggtggtcagagggtgccaagctggtccaacaatagcaggaaggcctctgccagggttagtttgctgccatctactgagacaacaatattttttcttggaagacatggaaacttcgaaataatccaggctggtttccttactcccaggttagaggttgaagaggtaggtgcagaaggttctagctggagcctatacgtttcagaactggaagggacctgtcattatgtacctggtgaaacaggcctagagagttgcagtcctttgccctgggtcacttagaaagttagctgatgatggggcagtgaccagacctggccttccactgctgctgttgcctgcctttggcagtctgcccagcaggcctgcagctgcttctgcaagtcagtaggatacagctctcatcccccaccagtttcatcctgtctcccgcaagtggctcgcttgttgtggcaagcactttccaccaccagtctctccagtgacgctgcacattcgttaagggctgggacggtgctttctcttctcagggcggcttcccacaattgctaatcccggccagaccccttagcagcaaaaggagccccgaacaggcgggacaggtggactagctctgagttctgtttcatctgtaggaccttgggcaagttacttaacctttctgagcctgtttgctcatctgcaaagcaaaaaagagcacctttaggggcttgttggtgcacgcaccatgcctggcccattgtgagggcatggtggagggctctgctgttgcatttctagtgggttctccctcgtgaagccccatggcaattattcttgaggtctcatggcattcctatgaggcaggcaggacgaggtcattattgccattttacaggtgggggaggctcccaaggaggggggagatgtgtgatgatgttatggcaggtggtggagagccaggccaggacacagcaggccgcagcccatcctaccccagcttcccagaccttcccctccatggagactgcaggctcgtgggcaccaggcacactgggctggaggcacccactgcccatctgtccctctccatcctggaggtttcctgcccaaggcttggccctctgccgtgcccaggcctgtggtcttgagcgtggggttttccaacagacgctcccagagccttggatcctcgatgtgtcttggtttcctcccagaagcttggctgctgcagtgttctcagagagagggttttctggaggaggcagggtgtgccattgtgccctgcagggccaagcagattttcagcatcctaggaagaaccaagaatgcagaagtctgggggtggtgaggcctcagccagccccatggcgtccccagtgcatttcctgttgactctccccgtgcccacacccacttcctttcccatccctggctccaccctgagccctctgctggctgatagctccatgtggctactgacctgcttcatgcacacggggctgttctgggctttgtaggaaacagtgaccacaggccagggtcatcccttgagctatgaagctcctcctgtgtctggtgaagccgaagacattttcctcggctcatctcaagcagccatcttgggtctgccctcaacacttcagtgaggtgccctgggggagggggtgaccccgagggagacatagccaccccaccccatggggtgacatggaaagggtacaggccttccctgccctctgctgcttcctagctgtgacactggacacatacctgcctccctgagcctcagctgccacacgagtgcattggtgacatgcatctctgctcacacttgttctgaggacagtcctgctaatggaaagctcccgcatgtggtggggtcttggcgacagctttccttttcttctcttgcctgcctgtctacagggagcttccagttcctttggaacttcaaaatgtacagatcaacactctgcttgagaccctgaaaaatctgattgtcgcagcttggggagtggggtttatgagcaagagaaacacccgaggcctggagccttggggccgctcctcagagacagggagatttgccgtggctttctgcgccattcatccaagtcacttagactcagagtccccatttatgaaatgggtctagtaataaacttgagagcttcagggcagtgatacacattaaatgagatgatattttccccacgtgcttggcagagtgcccagcacagcctgaccatcagcacatgcggccccgatgcctcgctgtgcatcccttcccagtgtgtgccgctcaccagtcctgcctcttcattgagtttgggcttctctgaggtggaggctgttctccttctgctcccagttcccatcgcctgctgcagggtctgccaagggagggcttgctacccaggaatggcccggccaggaggctggctgtgtgagattccagggatggggcctcacttagaacctggagaggtcgacacccatacacccacatttgcctgtttgcttgccttgggtgcttctgcagtgggcaagagatgccagtagttttcccagactccctggcatccatcatggctgcttccagcctccccttaaagtaatgggatgaatcaccccagtattgcaggctcatgagttagataagaagggaagtcagagttcacataagggggttggctggaggccaggtctcccagcagcaggaggagactgggcaaaagagcgtcacagggtggccatctgagctggagggcagggatactgagggagccgtaaagccctgcacctatcgggaacctcgtctcatgtattccagaggctccgggctgggagcaaaaagaccagggaggaaacagaaggcgccggcacagcaatgggagggccttggcctgtggtagatggtaacaaaacggttccgtttgttctgggattccttacacgcttggctgtagaatggcacgtttctcctcctctctcctgtcaggcattagaggcctggggaagatgtttgagcccattgcggggccagagcagatacagcccatctgtattgaagccacgatggaaacattcttgaaggcacatagcaaatgcctaaagaaagcgagctgcactcacacaggcaatcagagggagagacgctgtgatgtggagtgacatggggcttgtgggtctgtggagagctgtccttcatgggaggatccctgactccatccgctagatgctcattgttccccctcccgcagtcatgacaagtggtcctcagctgggggcaacattgctgtggtcgagaaccactgactggagtaaaaggccttgacctccctggtgtctgcagtccctgaggccctgttacctgtttggcctcagacaggaaagctgatccttctgaattgggcagtggcaaaggagacgcaccttctcggtgcccactcagctcaaatgccatgcagtgtggggtggagctgggcggcagggcatcctgttacctgtagacacagaggcctgctgcccccgggacaggctgtttacccttattggccccaggttttccatcctggctatccctgagtccaagtccctaggagctgggaaggatggtcacatgatggtttcctggcgcacttctgccagctcccgggtgatgctggggtctcctgagcccctcgaatgaggccaggcaagcaggcgttatgccagacagccgccaacagtgtgcgtcgctgctttccataagaaaaggcgcctgagacccactgccaaagcacagagccatcttgcccattaatcaggatttcaggattcttggagtgatcttagcaactgcctggcaaaatccctactcaatttaccctcacctgtctgccttcagcagaggctgggaaggctgtgggtggaatgggggtggggtggggaatgctgccggcgtgggcccatcttgggcccctagagcctgtctcaggggctgagattttgcatctctcagcagggcctgagggggcactctgaattagtgttattgttattattgctctcaatgattactgttctccattttcaattttaaaaaattaaagagaagaagggattttcccagttactgtgttgaggaagaggctgagagagcagataggcggtcttaccacagaatggcggtgatggcagggcccactctgcacctgaggcctccagggagggcccgagttgccccggctaccccatcctatgccgagggctccagccagctccttgtggccacaggtaccctgggcccttgcttgaggctaaacctggtcatgactttgctgcggtccccaaggtgacctctgcttggcgcccttgccttgtggcctggcttcagccctgcaggtgacagtcatgtggctcctccccctggcattcagggggagagcaagaggcaggcccctcagaactctggatgtggaggggccaccatcacctacttagggacagatgttcttgcagcaccgagtcctgcagcagagggactgatgcgccgtccccttccatctcccagcctacctgtcagagcaggctctggctggaaaagccagcccaaatggccctcttctgcctccctcccccatgcccatccctgctgccacccccaggacccatctgcactctcgggttccctacccacagccatgtgggaaactgacatcccaagcttctctgagcaccccaggaaggtcacctctcaggcctccctcagtggcaaaaccctttgagtggtacatttctgagctgttcctgccaggaggaaaccctggtaatttggagaagggttgctgagtgccaggcaggtcagccagaagtgatgtgcatttcactgaaagaacagagttgccacccacatcttcatttctaggctaggagctgtcctggaattctaaagggaaggaaggaaggagggcgggcagtgagcagccccagccctgtctctgggggttctaattggcctttgcagagccaaagctcctaggtttgctggcagaggacgtgaaggggctgtagccactggtagtgctatgagttgcggtcttagctgtcactgggtaagggctgtgtgccatgactgtgctagcccagctaactcggtgagctagctctccttaccagcattttccaattgaggcaggctcggaggggccaagtgaccaggcggtagacaaatagctgcaaagtggccaggcctgggtaccctcttcccccaactataagcagctcaaggcctggtggcttgtggcccaccaggtgccctgggagcaggcaccgggtggtgaatttacctgagtcacatcttcgttggagcaaggccagttttgccctttcttcccgagcaggtgtggaggcccctggcatgagcaggaaacactagaatgttccagagacccaagggaccagccttttctgggggcagatgccatgtacagatgggcatctccaacctctggatgccctgtgtctctctgaggatggggcggtggtcagaaagggccctgtcttcctagcctgccggccgctccaggagccgcccagcgtgcaccgctgcgcctcatcttctgagccttccatcctcactgctcctgggggcagccctgtgggggaaatcacgtttttaattagcctggttcgggatggcggctctaaagctccgggccgtgaatgcagcctcttcgcctttggaatccgctgccagtggacacaatgtagctgtaggaatgaaaacaagagagagaaaggcccacaggctcagatttttaattggcactgtcctcccagccctgcacccccccgctggccctcccggggctctgtttgggcggccgggcccgggcgacgagtgatggaggctttcacagcttcagactgatttaagtggacctgtatagattcctgcagccacgctgaaagagccaggcgcaatcaccgcgccgagaaaccctgggaaatttatcagccacctgcgcgtcgtgaatagggagaactgctgagggccctgccgagccgcctgggcttcaatggccccacagcccagcctcacagaagagatttttctaaagctgcaattaatttttttcccctcaatcaattggaagttgctttcttgctttcagctgggtgagtgtgatccttgattctgtgattctcccttaacctgagcgttccaacaattgacgtttctctccagagacagacagctttatttcctgtcggccatctaggaagagacatttttgtttgtgttttgtgtgtccttttcgtgctctttcttttctttctttaagatcatctcaagctaacagtgagaaaaaaggcatatgtgagcgattctgcctcgacaggtcccacgataccgtcaggaatgtccgtttttcttgctttcatgaaaacactgtggggtcttacttagaggagacagtggtagagatgaaagaaggaaggagaggagtgcatgtaatgcggaaaggagaaaggcagtcttgccggactgccagagagccgtgtgctgcagcttcaagaggtttctcctagaccgacctccaccctgcaggaacagttatggggacaattcttggctcctatttaattttacaatgagaaccaattccactgcataagaagagaaggccaccctttctgcctggagtcactgtctgaaagcttctgtgatcggcagttgcacgtgcccctgtgtctcggggatcctgactcacggggatttcaggttccgtgttcactcagggacattgctgccgaaggatggcaaccattctggctgctgtggcagagcgggacgcctgcaagccagcctgagcacccatctgcctgttgggccaccgggcagcttctgcagatgggagtcatcaggcttgagaaggtgacatctgggctatgccgggctgcccttctgttttggtagagtcactgccttcactgccccacccttgaagctggcttgcttttgtcacaaccaccggagaggcgttggtgtgagagtgagacccgtcactgtggacgtgttcacacgcatggcgctctggctgtcctctccttccctggagcccgtgcctttgttaagatctctaggacctgctggcatggcagcttgcccgtaaagcctctcagcagggagggctactgttcttgagggtgagagacagaagtggccgccctgtggtctgagcctgcccggcacagccactgactgcacttgtggtgactgtcagttagggctccgatggcttattcttcctcgaggaacactcacgttctcagggtgggcatgtatgcacacgtgtatgcacacacgccatttgttcagttgtgtacctgctttaggcttccggctctccagctgggtgaccttagcaggttcctcagcctctctaggcctctgtttcctcaactataaaatagtatcactggcacaggcctcctgggggttctggaggaaccagcgagtcgcggtgtgccaagttcctttcgcagtgcccagcacatagttaggatctagttcatgggacctgtaagtcttatcagtgcttgccgtcttaataagacccacctgttgacacctgggaccgagggtcaagaaggggctcctctcctctctggctcccaaggaaggggcctcttgcaggcacagtggatccagtgtgttgggggtgggtggtgcttttcccctaaggccatggtggttgctccctcgaggattttagaatcttatctctgagttccccgtgactctcggctcctgttttctagtgaacatgggcctcagtgatgacacatggttgtctggcagttcctttttgtggtagccacttgctgatagaaggagaggcacctccccagtgggttctgtgctttctctgaagcaccagatgttggtgccaggacagagttggctcatctcctaacttgggctgagccagtgatggtctcagccagaggctggggccctgtcctgaagctggtcttggggtagtgttctcactattccaccacagctcacacttcccatctgcactggaagggttactgggggctcagagttaaactggccccagcattattggtcactgtagaaactgcaacatgttgaagtgaatccaacatatcgaggaagaggtatgtgtgtgacgtgtgagcatttacctttaagggaaggaactggatgagagccagtcggggtccgttggaggctgcccgggactctggacagcccctgagggtgtctgctctgggcactgtgctggtttcttcctgttttgtcttactggttttgtcttctgggtgctttcagcctctcccacacacatcatttgtcacctaggcggggtatgctccagaggaaagtaaaatacccacagcctttgtcccttcctcccatctggctgagggctcttcctagtgtggggtcagcggggcgtgccctctgcggcctttgccgggctgttgcctcactctgctctgccgcagcgggggctgtctttttcctcctcctctcttcctgcgctcggggctgtattgcatggtggtcagcgcctgatcccggattcagactgctggcacctagatcctccccactcactccctgtgtggcctcaccaaacctctgatgacagtagcgccccctcccaaggttgaggtgagggtttagtggggcgatcccatggagctcagggtaaattcttagtaaacattagctctgccatcattcgaggctctgcagctgctaggacaccagaacgaacctccagaaatgccctgcctttgttcccaggacaagacaagattctaggggatgacggactggtgggattcatggcatctccacctttgggttggttttctgcacaggaagaaacacgtggatttaagaatgatttagggtggctccaagccctgcacattcttcaggggccatcttggtgtgccccctactccccttgttatcccagccactgcctgcccttttctgggccaaggcttggctgctcaggaacacgatccctccccaacctgccgcgcagagctgtgcaggctgagggtgctggccggagaggtgtggagggcctgaggctgtgctgctcctcacactcgcagacaagcccacggggtgcacctgagaatgcacctgtagcaaggtgcagccgtcagggctccctgaattgccttctttgctgctccagttggtgtggtggctctgcccaagggctttcagccttgtagttgggaatttttaccaagcagcaggcaaggcttgctgggggttcctaggggtagaaagtgattttctgccatcctgaattctggtattttatggtagcagtgaggtgcagcgtggtggttaagggtgggtgcaggctttgaacagacagatctggatttgaacctggccctgccactgcctctcggtgggagtttgcccaaaccaacctctgtctctccaggtgtaaaaggaggctggcagagcctgtcccttgtgcctggatgatgagctgatggaggtgagaggtccccccatgcccgccccaggcatctgtctccagcactttcactcagacgcagctaggcactctgggatgcgggcgctgtgtttgtatattctgccaagcatttaaacagtaatgaacaaaaggggaaaatatagaaagggggggaaaagcctatcagaaaattcatagttatgttgaggtgtgtccctgggaaagtcaaaagaacagagacccaccccggccaacccttctggagcctgagttgggcctctgagtgggagccccacctgccaagcaccctgggccttgagctgggtcttcccaggaccccttctgatccagcctgcacagctgcctcgagaggtctgcctcgtgatgcccaccatgacccgcccaaggccactcagctagacagagcagattttctatttctgtgtctgtttggtggcaaacagcatgccccgggctgcatgcccactgctgaggatgggccctgtcctcagccctcttggggatctcctggcacctccagtactctttaaggaaacatttcctgagtgcctgaacctggcacagaatcctgacctcctgctggggtgggtctggcccggtcctggtagaaaatacagaacccaaccccccatggcccacctctgaatccctgtggtccagaagccctgaactaggggctccctgtcaggtgtcacattgggttagagagacgggacttatatgggcaagaggctgagccaccccaggaagggtccctggtgggtaagtctggggtgagtctccccacatctccacccaatagctaagccagtatttggtttgcctccaggtgagaaaagccttagcaaatgcagtctccagcaggtcctgtggggctcagggaacaccagggccctacatatactttgtccccaccactcacttctggcgctgcaggtggggccagctgagcccagaggagcagaatgtgcccaggaatgtccttccacacccaccaccagcgggcatgtccatggccagctgccctgctggacgtgctgggatgtgctggccaagccttgctggtctgccaccttgtcctcgcccctgaagggctccagtagccagcgagggccagcatggcctcccccgccccagcatgcctggggtctctgctttcatggactgtttgtgggtggggtgaggtggtcagtggtcctccttgtgctgtgtctgcctggggctgctcgtgggcaacgtgggtcactccctctgtcgtggtgcagctggcaccatcaggtgctgttcaaacccctctgagccccgagctgcttgtgatctcatttcaactccatgcagcccctctagggcagttttatttccccattttacagatgggaaaagagaaactcagattgcgtaacatgcccaaggaagcaccggtcccagtgttttgttttgttttgttttgtttttgaggtggagtctctgtcacccaggctggagtgctggagtgcagtggtgcaatcttggctcactgcaagctccgcctcccaggttcatgccattttcctgcctcagcctcccgagtagctgggactacaggcgcccgccaccacaccctgctaatttttttgtgttttttgtagagacggggtttcactgtgttagccaggatggtctcaatctcctgacctcgtgatccgcctgcctcagcttcccaaagtcctgggattacaggtgtgagccatggcgccaggcccggtcctagtgttgacaggcaggatcccaccccaaatggatcatcatttcagtccttcattcagccacctgaccctgtttttccaggcatcagggttgcagcccacagaggcactcagacagggagggcccaccagctcctgggtgcggggggctccagaatggagagcgaaattccctctgcctgcacagagaggctccatggaggctttgatagggctggggtggctgtttcatttcagctgggctatgcaatggcaggaagagtctttcgggagagagaggtttaggaagcgggcgatcctggcctatggagggcactccatgggaggggctccatgtgtccaggggagcctgagtaggcagggagggtatgagtgagattggcctggagataccgggcctttagccctggagtgaggtgtttgctttttattctgagagcttggggaggaaggtgctggatcaggtttgagacacattgagctgagaggagcgtgggacatcagcagggacatgcccattgggtctggagctcaagatgggatctggcctatggtggccattagggtggtcagcagtacaggtctgagttggatttggtgcccggtcgcaagttgcatcgaagctagtctcggtgcagtggctttgcagggtagggcagggacacccggggctcaagccgaagaccctcattgtgcagatgggcccagagcaagcaagacttccccagggcatgcccagcacaaggcggctggagccaaagccaggcacccacgtcctgccaggtacgtcctggacctgcgctgcctcatggcatgtctggttgtctcctgccacctgcggaccctgtgaggcccagcaccagcaagggtgacccagcccctgctcagaatggaggagagatggaggtccccagaggtgcatctagaccccatttccaagggggccctctcgagtgggagcagggagcattttgtcagaaagggcagcctctggagggttgtggtgactgcttgctcctggagttttctgtgctgaggcctctttgggcagataaatcagttgtgtttctgcagcgcttgcctgccttctccttatgacttctgttttgatgttgggaggaaagaagtctcgctccccccagatcgagaggaagtctagctgcacctgactctgggaactccgcctctgcatctcttctgcttggtgggtgtgaaaacacggccagtgggagcggggctctggcgtcacagacatcagaactgcagacacctggcccaggtgtccgtgttctgtgtgtcctgcggccaccgaggctgctcacagacatgagaggccattccccacccagaaccattggtgacaaacaggcagcctcctctaacctccgcaggatggggcccggcctggcagctgcccccagtggccaacgtgggcctctgtggacaagacaggtgcagctaaggctgcaggtgcaaagcaatcccagggtgggcgggcagggggccacctgaacctctgtacagcaaaacagtgttttcctgggatctccctcttcctgttgttctgtgaaagcacctaccagccatgtgaaaagccacccggctaaccacccacatgcaggcgtctggcacagggtggctcactggccgttcaggggtcggcccctcctgatgtttgcatgtcccccttgtgtgaaactcagatttaatttggtgattattaaagtgcaggaacctggggctggtagaggttttttgtccacagattttgcaaagtgccgttaaaaaaaaaaattcatacgctttgttgctaccaataaagagaaaaggaaagaaaagaactttggtagagaaacatcgagagattttaatatggagatggggtgggaattcgaccttggaaaacacaagcgatcacgtgaataggattttggccttttctaacttagtgtgtgctctgctcttaagataaatacacacacacagagatagacatggcatttcattttcggacagtacattcacgtgttcgaaaattaaaacaacatacagagtaaactcttgccccatctctcccatctcccatgccctcagatggaccgctagtttcttgtgctcctttttacaatataagcaaataggaatttcaattcttattataacagaggagataatagcatgcaatacataccttgctgtatcttgttctcttgaatagtaaaccctggaggtgttctcatgcccttttttttggctgcacggtgttccactgcacagatgtacccactttgcggggtcccctgccgactcctccgggctgcttcagctgtgaatttcacgtgcatgagtccctttgggcatgggagatccgtcttctgcagggtccgttcccattgggattgcttggtcacacgtcgtgtgcctttggcctcttggaggatgtcgccaggttaacgctgtaggagcccttcctccctgcatctcagagggccacgttcagggtggtttgtttcccaccccacctctcagtagaggctggtccagcagttgacattttcacaaccagataggtaaacggtttctctgtcattttagtttgcgtttttctaatcagttgaacatcttttgtatatttaaaggctatttttatgtccttttctgtgttcttttcatttgcccttttaaaataattgtgtcggccgagcgtggtggctcacacctgtaatcccagcactttgggaggccgaggcggatcacaaggtcaggagttcgagaccagcctggccaatgtagtaaaaccctgtctctgctaaaaatacaaaaagttagccaggtgtggtggcgggccctgttttcccacctactcaggaggctgaggcaggagaattgcttgaacccaggaggcagaggttgcagtgagccgagatcatgccactgcactccagcctgggtgacagagcaagactctgtctccaaaaacaaaaataaaaataaaaaataaaataattgtgtcattggtcgttttcttctcaattgtatattagggagattaatttttgcctgtgatatgagttacaaatatttattactaatttgttctttgttttctgactttgcttttgacattcttgagctttattgagatataattcatataccacacagttcacccatttaaggtgtacaacttagtggtcttgaatatattcacagagttctacagccatcaccacaatcaattttagaacatttttatcacctcaaaagaaagtccataccccttagcagtcactccccgtccccttcagccaccaccactcccagccactggcaaccacaaaactgtgttctgtctccatgggtgtattagtgcgtcctcacgttgccataaggaaatacttgagactgggtaattttaaaggaaagagtcttaattgactcacagttccacatggccggggaggcctctggaaacttacagtcatggcggaaggggaagcaaacacatccttcttcacatggcggcaggtgagagaagtgctgaacaaagccccttataaaaccatcagctctcgtgagaactaactatcacaagagtagcatgaaggtaactgcccccatgattcagttaccttccactgcgtccctcccacgaaacgtggggattatgggaactacaattcaagatgagatttgggtggggacacagccaaaccgtatcagtgggtttccctattctggacatttcatatcaatggatccatgaaatatgtggccttttgcgtctggcttccttcacttagcgtcatgctttcaagggtcatccacaccgtagcatgtatcagtatctcctttctttttatggccaaataatattctgttgtacagctagaccacattttatgtgtccattcaccagttgatagacatttgggctgtttctactttttggatattttgaataacactgttgtaaatgtttgtgtacaagtttctacatagacatatgttttcatttcttagacatggaattgctgggtctgatggtaactctgtgttgaacattttgagaagctgccaaactgttctccgcaacgactgtaccatcttacattcctaccagtgcttttggcattttttgacatgtaaatgtttttatcaaatttattacttatttcttttatggctctggattttgagttttagaaaggcctttttttctcacgagatgataaaggaagtctcctgttttcttctagtactttgatgggttatattacactctttggtctgtgttgagtttatcttgtatgtggtgtgagtatggagccagcattttctttaatgtagctgcctgtctgtttcagtaccatctgttgagaatgccatcttttctcctctgctttgagattctacccttatcatataccaaactgggtctatttcagaacattctgtttcattggtctctgtaggtatgcatgtacgttcatactaatatgctgttttagttatggaggcttagtaatgtgttttggcatattatatggtacgggctagtctaggagggttagcttccccactgttctttacagagttttcctgactaatctcacttgtttattttttcattaaaaacttgaaaattagtctgtcttaagaccatggggattgggagtactgttgatattttagattgggatcatattagacttctgaattaatttagggagaatttacacctttttgaggttgagtcttcctatccctcacacaggatttatttctatttgttcagtcttgcttttctgttctttaaagtttttttttttttttctatcaattttcccagttcttataagttcattcctgggtattttatcttttgtgttgctggcgtgtcttcttgctcttgaaagcagattgttgttagcaagagtggttggatataagcagagctcccagacccctttgctgtggccttgctgtgtccacagagagacagaggcacagttgtggggtggagtgtgggaaggggggatcgcacccttggtggtctctatttatccctccaaacacttctgaggctttgaggctcttattagccttgtacacatgagaaactgaggcacagaagtttaatgatttgccaagttccctcggggcacacccgagctgggattccagcccaggcctgtccagcccatactaccccaccgtcctgccggaggactgcatgctttcctgagcacagcccagagtgatggggtgcgattgcacatcacgcagctgtgcagtctggggcatgtcccttctcctcactcggcctctgtctgctcatctgcaagagtggctaaaccagttggtgatttgctcacttctccaagagtgtgccctccatggaagacaatatctggaacagagttgtgagctgctggggtggagcccagaggccgtgctcagcagtcctgtcttcagcaccccgatgtggccccaggcagctgaatgcgaacgagtgcccaccagcccctctgagagccttggacataccttctgcatcgctagtcctgctcagaagccacccccaaaactgtgagccctgctggtcgactctattcaaggtctgtgggcgcaggcagtacattagcctcggccccccgccagaaccctgtgtgctttggaaaggtcccttgacttttgttaggcaaagaattctcttcacgccaagctgcgagcgaggtggtttcacaagtcctgtcctgagtgtgtgctggctggaatgtacaccacagaaacaaaatgtttgttttccaattgtgagagcaccgggaggccctttggcgtcagctcccacaccttctgtgttcgggcaggccatctgccatctggggcctggtgcagaaacgtcgccaccgtgtggcctgtggggtgccctcggagaggggcccctgggttggccaccattcagaggacacgcgtggctctgggcctccaaggtctgttcttacccacggcatcctggggtgtaggcctcaggaccccagggctgtgcaaacagaggcccagttgggagggccgaccgggtgggcccttccttcctacctaccctctgcccccaggctgcacgatgcacccactgtgaaccaggccgtggcatgtggggtcagggttccctgcacgcttggcaggaaatggggtacacacaggagcttgggcctgcttccggagtggctgctgcagaggcgggttttggtgggagagaaggaatctgccagtgaagagggagacagggcggggccgtcaggatggtgctgacccagggctggtgcagagggggtttatgtggctgaaagaggtttgctatagaaggagtcagagcctgagtgggagcagcaagggcggagggcccaggaagcagagcctgaggaagaggggccttgggaaaggccagcccgagagtggtggccgggctctggcctgcgtggcgggtttggcccgatgagcaccactctggtgaacttgacaactccccaggccaacggagtgactttctagggctccgttatgagtaaccctctgttgctgatagcccacgggatgagtggagtccacagggcacctgctggagcccacgcttgccttccttgggtctggcaggggagatagtaggctgggcctgctggccctaggtccgtcttcagaggcctgggattttaggtgtctgggctggggatgggctgtccccaagatcaactcctccttcccccactccttcagcctccggaggccataggtaattttccttagagtccttgtccccagctgggtcctaggcctcgagttaccgtaggcaaggctacactgtgtaaagaatccagcgggaggggtgcccccaggatgcacagcatgagggccccaagagagccaccagagcggggacagcaaggccaagggatggctgggggtgtggagaccatggagagagccccaagctggtgccacccttcccgaagtgactcagcgtggcctggactggccgccacacagcatacctggctctggcaccacctgggcctcccagatctggaggggatgtcagatttggggcaagataccttgtccacagaaaaggaaaaatggcgcctgccctgtgagtctgaccagtctgagacagtgccgccaaagtctgtcccctgctgtactggcttctggaacggggtgaccacagtctggctggcatgtggcaggcgctcagtacacatttgttggcctctgcagaaatgagctaaggaaactgtcacaggaaggtgggaactttcctagtaactgaccagggccagccttccaccctgaagatatttaccacccccactgggccatttgcttctagaacctgtggtctgggaagagtcttgagtatccattgccaaatcagtggagcttccagggccctggagtaccttcccgctcctggcaacctgatttccctattttcaggccctggcaacctggcttccccatctgggttttgctgccagtgttgccctgattcctgagggtaaggaggcagtccagactcagaagggctgcctctttggggtccaaaggtggtaagcatttcacaaaaatgggctgggcatgatgctgtcccccgcttttctttttttggagagacaggtcttgccctgttgcccaggctggagtacagtggtgcaatctcggctcactgcgacctctgccacctgggcttcagtgatcctcccacctcagcctcccgagtagcggggaccacaggcatgcgccactatgtcaggctaatttttagtttttttggtagagatggggttttgccatgttgcccaggctgatctcaaactcctgggctcaagcaatccacctgccttggcctcccaaagttgtgggatgacaggtgtgagccaccccgcttggctgatgctatccctttttaagactgggcaccaacacggccctgggcgagcagctgacctggcctacacaggaggtggctgggcagcagcagaagaccagatgcccaggggaagggccctgcagagcctgggcagtcagcccctagggaaaggttggccatgcccacagccttcgaggcatctctagcacctgcagcctcagaggaaaagaagccaccaccacctgacccctctggccccaggggcaggggcagcagcttcctgtgagaaagagtacggccttcacgcaaaatccagatttaccagagatgggttaaagatgggccaaaaatatgcttgtgcctttttttcttttctgaaatagttttttaaaaagcctaggaaaccacatgccttgccgtcttggttgtttctgtgccagcttccagcacaaatgggacttagaaaatttccaggctgttggccatccattctcatagcctggtgttttcttgatacttggagaattctgttctcatgcaagcgtctgtttggggaggaaatgcgtccactcagccagagcctggggcccctgcagctttcagcagggcagctgccaggccaggctggggaccagctctgctcgtgacttgtgagttgggcttgttgatggccctttctcagagggactcgaggtagctccatgaagacctctaacacagagcgccataaaactggactaaaaagagggagagagcaagggaaggaggaaacgcagctggtcccgccatgaggagcagtggcacaggagggaagtggtcttcgcttgcccaaaagggaggcacttgagcacctctgggagacgggcttggcgcaggcaggggcccagaggaagcctcatgtgggcactacacttaagacaccgactaaccgaggagaggcgtccccaacaaccacccctccccagcacatgccaggcaggctggggccaggaactggactccccacagggccccgtggccagtctctgaccatggcttgacattcccgttctagaaagaatagtagtactaagaagcaggtgcataacctataactacattaacacccagggtgcttttacctgtggctttagattgggtctctagaagcggggcctgagccggggattctcgtgccagtgacacagagagggatgctcccagcaagaaccttcagggaggcgagggaagcccatgaactgcagaggcccaggaaagaggtgggctcagctgaagtcgcttctcagcctggtgctttgggagctgcgaagtgtgactagcacgtgggacttgatcccgcccaagaggagggacagctcctgtccctgcacctgttggtcattggctgggggtgaccccaaagggaaagggtaacctccttcctatcctagatctcccagcccagagtagttccggaaggggcagccatgaactgtcagagccaacactcacagcagtggagagtgggcactgctgtgggtttgggactccaggcgggacaccagcagcctggctttcctcttaggatccttgcagtggccctgtgaagcagcctggccagagacagcagttctgcttcccaggggaggaaacgggaagtgaggccacttggccagtggaggatctcagtgcctccagctgcagagtctagtttcccactctcctctccggaaccctccaggttcagtggagagccagggcccagggggtgagaataccgcagcctccttcggaggaggcaaccgggacaaaggggagtggtcactatctgctcccagacatatcacctgaccagccagctttgtctttgtcaccggatgcccactcctgcatgtggggccgtagctcatgagttctagggacagcagtccctagacaaatgctggggctgtttccccctccactccccaggccttgcccttcggagcccagagtgggttctgggtcactactgataaaacatgtggtttagttcagctcaggagatgtttctagcgtctctattacgtgttcaccctgctggcccaggaacagcagcacctgggagagggaatgagcttgttgggctgaggctggacggagtgagtagcagtctgcctggcagcagtacagagctgatatgttgagttgatgagtttcctgaggcaggtctgtatttcagcttgtacctagaaggcaaggaccaggccacctttgtctgtatccccgtggactcaggagaaagtatgggaataaatatctgcacagaacagccctgcagaagaggggtcattgctccaagctgggaagccctagggaggccggctggggcaggctgagcaggaaaccccagctggggccagcgggaatggccagggcctctttggtggctagagctgaggtctagggggtctgatggaaaaggcagggcctccatcccaaagttgcctctctagcaggctgctgtggtctgccttttgcagactctaggagtaggtcttgatccatgtccctggccactagcctgaggccatagggacagttcccactgagctttttacctgggcaggcctgttccagagtaggtggcccagcccagggctggggctggatgtcaagagagcagaagtcgacgggctgggggacagttggtcctggagcagcactttcaccttggaataatgtgttcatgcagcactttgaacttagccattttgcggctttttgcagacatttttgagggcacacaggcctccaggcttccaacttgcctgtgcagtgttcttccatggggtagctagagctgctaggagactctggggcgggaccttgccccggggcatggagggcacagggcagctgcagggcctgggtgtggcacaccctgggtgtctgcatgggggttgctcacgagggatggggctctgggcagaacacacaccgccccattgtggcagtcacattccttcctgacaggtggggctcgccaccagctggggcaaacagtgggtggttcttggctttcttttactgtggctgaaatggctgttttgagtcaacggaattctcaaggtttcgctggctttgtggccaggaagcaggtatatttgaagaatactggagactcagtggcattctggggtttgcttgtgacgagattcaccagcccttccttgtagactccccctgcttcacagcagaaagggcccaattagtccagatagccctgaacaccctgactcggcaggcaggctggctgcagcccagaggtggaagagttgcctggcgccgtgatgcccatgtggatggagtctgcctctgtattgcctgtctgacctcagccccttccagggcgcagtgaggcaaaagccacacgtctgtgaaaggtctagctaatgggtctccagtgcccgtgcctggctatggctaatgcataaagtgtcttactttgtttgggctgctgtgacaaagatgccttagactggggaacgtataaaccgcagaaatgtatttcttagttagaagctgggaagtccaagatccaggtgccaacaggatcggggtcttgtgagggcctgctcttcatagttggcactttctcacatccttgtctggctggagaggcacctgcgctccctccagtctctgttatgggccctcatcccatctgtgaaggcccctacatgacctcatcacctcccagaggccccaccttttgcactgaggaatggtgggggggggggggggcacaaatttcgaccgtagcaccacggttagtgccgagacccacacaatcatggtggccataagttaggcacccccgctacctgcgccttatgccagaggaggtcagtgggaagctccgagcaggaccgagagggtgagcacagacaagcgctgtgcggcgtctgtccgattgcgcaggctgcgctcctgctgcgttcacgtgcgaggccacagaaaacactcgcagcaggccacgccccaggcccctcacatgacagctcgcagaaaacgctggcacgcgttcgggcgtcaggcacacgcatctcaacagatgtggctgacacccaaggcagtcggcctcagtgccctgtcacccacctagaacctgttcacagcatgtcatccgggctgctctggccttgactggacatgattatttatccttacacaccgtggctgctctacaggccaagaaacaggctgctcagccagggtcaggagaaggtgggtcaggctccccggggacctcaggccctgacgcatcctggcctcaccctaggcctcctctgtcggggcagcctggctcagcagagcccgggacacacggctgaggccacccaggctgggccatcttgcccctgttttgtgccccctactcagttctccttctgtcctggctcaggtctaggccagtcaagagggtggctgagaagcaggaggagcctcagagaccctcccctcgaaagcactggggcttccacctcacaagcggcaggttcgctttgggagctgctggtccatcgcccaggcctggccaggggcaggcgaggatcctggttgccgatccatcgtccaggcctggccaggagccggtgaggaacctggggctgttgtgcaggggtcgccgtctccagctctctgccgtggtgaggggattgtgctgtgtgcacaccaccgggctgcatcgaatcccaccatggcccagagggtggacctgtggctccttggggggccagcatctccagtctaatgggtgcccctgccactctcctgagttcccgtgcagagctccccccaacacctcagccttcacctttctcagttaatcaaaagattccaaaaaaagcaaacccatcagaacggcttcctccaccgagtgttcaggaacaatgagcgtgcccatggcaggcacatataccttcctccagagagagcgccttttatttcccatccgctgaggctggttcaacagcttgttggctgtgacagccagtgatcacctgtatttcaaagagacacacaaacactgcagcctttgaaagaatcaggccctcgggacaggtctgtggtcttggcgtcagcaggcgtgcggcgagggaggcggcgggtgctccaaggccctgctttgcttccccagtccccacccatctgctgggaagaaactaaaggctggaattcccccctgccctctgtgcgcagctcttccctcgctcccctctgctattcgacctcgttgctgcagtccggttggggatatccaggactgcgccgggagtgcccctcactgtctcagcctctgtcctgtctgtggcgtgtgcatcattctgaggagaaggctggattttgtgctctgccctgggagcaggtgttgaactgcacccacttgtgcacagtgtcagccctacccccatcgctggcagctgacgccaagcagaactggcctgcgtacccttgaaatcctgttcaagctctgcctgccgctcgggcaggccccaggctgcctcctgccccaggccagcctgggagcacacttggtgcctgggagcacacagagggagcacacttggtgagcggagaagcttctgcgcagcctactctctctctggggcctcaaagggcccagcaaggcaggcagggagcatcatgcacctcttccagatgaggcccccagctggcgagcaccagaacctggagcctggcccctcctcagcagatcagacctcccagtccccagcacctgtggagggcacaggaccactcccttctagagactctgtgtctccaggtgaggccgagaactcatgtttccccagctccctgcatggctctgttacacaccaggctcaggacttcagctcggccccttctagcctgcggctcccgctctggttgtggagagtgggtagagcgggcgtcgtgtcgccctgtgtggggcagttacagcctgggcttcctccaagtcagatcccttctcaagggaagtatcgcggcgcgtcagttatgtttgcatagaggtccctgcttgaaaaacattgatttcaccaccattgtagggtgtttgggttactctcttcttttccatttaacggtatgttgccaaatttttacacacatcttagaatgttttcttaagataaaaatccaagtagtgaaattacctgatcaaggaattggatatattttccccaggttgcgcttcagaaaggctgtggacgaagtgttaggagcattcctgtttcaccgcagccccccagaactgggtctgcatcaaatttgtgtgctttgccgagttagtaggtgaatagtggaattgcgcgtgtctttatgagcacagagcgctcattggccggaggtgcatcttcatgagtacgttgctcatgggcccgtccttgcctggataggaggaacccgggacttgattggtcttgccacagcctggtggtctagttgctttgtggggtgtgcagtcctggggctgcgggaggggagtaacccttagtaacctgtgtgtctgcccctccacagaactgtcagaccttcagcagcctcagctgcctgagcgcagggacagaggactgcggtccccagagccccttcgcccgccacgtcagcaacaccagggcctggaccgccctgctctcagcctccggcccagggggcaggacccccgctgggaccccggtccctgagcctcttcccccttccttcgacgaccacctcgcctgccaggaggacctgtcctgtgaggagtcagacagctgcgccctggacgaggattgtggcaggagagcggagccggctgcagcctggcgggaccgcggggcccctgggaacagcctctgctccctggacggcgagttggacattgagcagatagagaagaactgagggggtgtgggcccaggcagggctggggtgtgctggcatcgacagcccccactctgggcactaggtgggcccttgaaggggagcccaactcgtgggcctgatgaaagcttcctgagtggtgtcgggtcccagagagggagcccacctgctgcctgggggagagcctggcctggccgcgtcatacagcgggtgtgtcagcctctcaccggctccccgagcgtggcagccaccaggtccacagaactactgcagcccagaggacagctttgaagtttgcgtcttttctgcctctttccctgtgggatgttgggcagtctctgttgtccccggcagagctgggcaccgctctgtatccccctggtggtgggggctgtcagggagggcctggggtgggggccaggggccatctgctatgtcagggcccttcttggcctcactcaggttcacttctggggagtcggccccgcagcttctttcactcagttttactccgtgccttctctcccaggtctccctgcttcaggcttgggaaggttcgggagatgcttccttctgtaacaccagaaccatttggccttaattccaatgtgagagacagaatccctggggtgctggactggccctccagagggtaagccatgtccggagtctcgggcccaaggaacgatttggagggtgcttgttagggcctcccgtgttgggtagaaatttggtggatctgttggctgaaaagacggacttgcttgcctctcctacagcatggagaggctgaccccatggctctgccaccgttggggcagggttagcagatggcagcccttctctgtggctgacaggtcactgagtgataagcatggttggttccggtgagtgtagggatggcacgataccagggcagcctcttgaaaacggcctcgggagacgggagctgcgagcaggtgggcagatgagggccctatgcgcactcaggggtgaagggcgtccgctggccactctgcaggggcccctgcaggattccaggcacctcccgtttgtccttgaggactgctggctgtaaccagggcacatcacccacctcaagacaagcccacgcccttgtcagcttagggggagcccagtcctgagggctgcatctctgttgtaggcccagccaccggcacaaagctggattcatgctccctgcccctaccccaccctggctcctcaccctggggcatccgaggagcctagccccctgagggtttgctctcctctcaaggtttgtagctcctctccggctgccttgcagacaccaccacatgggctctgctctatgggaatctggcttttagcgaatgtggcgtcttctgcaaacaatagcaattgggctggcttaggagcaagtggctcattttcccataaggctaaaaataactggtgcgctcccttgtgttggctgacacgcgcgttcaaagcacttttgtagtcactttgcttttgctcgtcttcatggacgagtgaacgcctcgcttctgcaggttgagtccagatgcttctcaccttctttctcctcaagaaagatgctttttgggaaacgttgtttaaatcttatttttttactacatcaaaaggatggtggttcaagttcccaatatgtgggtggcacttcttaaaaatcagctttaaggagctggcagaaagcccccagccccacagccctgagagatggtgttgctagctcaggtggctgacacatggggtatgccgggcactgggcaggtcccagagccggggaaccagctcacctctggttgctgtagctcctgccggaggcatgtctacttgtgatcccggacagccgaacccaagagctggtggctctgagcagacagagacatcttggcctgtccctgcctgggggtcatggagaccatgtcttcttagagcaaatgtggaggcggccagggcagttgttgggtgaatgtggagagcacatggccatgtcttgcccccggagtaccactgggcgtggggggtcctggcaccacatgcccggtgtggccgagggcacacagcctctatagcaggccttcctgtggaaggcagaggcagtgagggaggtggacggtgccagctgaggctgaggcatgcagcagcccccagctacctttgcttagggctggggtgggaggcacatggtgacaggtatatgtcgtgggactggggtgtgggtgacctgccctcaaaccttgcctgccacctccccattcaggcctggtggcaggaagggacaagctgtggagctggctgagtcacagccacctccccacctccccgcaagctggtcccatcgaccagcaagcccagccccagggcgcttagggagaaatgacccagcctcctcagaccccgcctgcctgtcctgtgcccaccacgcagcagtcaggggagaaaatggtggctatcccttctgcttagagaaagaaatggcctttagctggtttcatgtttgtgttttgactggagggagtagaccctatctataaggtgccaccccatcatccaagctgccacactgcccggagcagcctgttcctgcactccaccctgctggccccaggacttctgatctcagtcctctgggagggaggttcgcctaggaggtgccccccacattggtgtccccatgggcagcaggcagacagctcacccccaccagcatgatggccccagctgggggcagtggcaggagccttacttttgtcacagccttgcccacaaaccctgcctctgaggggagactgaggaagggcagagccagaagcaagccgtgccaggccatctgcctgctcatggggtcctaaagcgcgggctaagcctgcaggaaagccggggcggtggggggggcttagtgccacatgcaccccactcattccaaagccaccaaactgccaggggctgccgtccacccgtggggcccaggggctggggccacagccttgccattttcgttgccataccctcttgccttactcgcggtggaggccggatttgcacgggcagacgtgcacctgggcccgtggggagcttgttctgaccagacgtacagattttcattctcagaaagccttacttttcaaccaaatttttgtagccagttttgtgaatttgtacactgaaagaaaatttaaataaaggggaagtccacattaaaaagaaaacaaaacaaaccctaactaacttccaaatgggtctcctggtgcgggggcgtgagtggccgtgccctgggtgtgctgcctgtctgagcaagcttccctagctgtggaaccccgggccccctgctgcgggctctgccttggtgtcatgcctgctgcacccccgtttccactgacgtgccgtctgtggctatgggggtggtcactggaatgacggtcactccagacgtcagccggcagggatgcagcaggctggccgcgcaccggggctcgggcaccctctggccccacactggcaatgatgccacaccttgccatgtccacgctgttggtcaaacccctctgtcatgcctctttaaagagaaaagaagagaaagattttttttttttttaatggcagaccgaagtggagatcttgtagcctagataggatagtctgaccttctagcatagtctttttggcaaatgatttgtgttttcagtgtgtggggaagctgtcctgggggctggggcgacagatagcacataggctgtttctggggctgcaggggcttccctgagctggatgttgtgggtgttgccgtgcttcaggaagtgtggcgaccagaaagcgtagacccggggcccagggtctgcccgcccctgcagcctggcctccccgcacaggctgtggcttgcactccagccgctctagtctctcaggaatttgcttgttacttgtactgtgtaaataaagcttcctggttcaatacccaagtgcctggtgccagctgtgtggtttctgttgggtgtggtgaactggcaggtcccccctgctcacaggagcattagctctgggcgcagagagacctagactggacccttctgtcccctccaagcctcggggtctgaatcgataaaatggggctagcagacatcacagagctgtggagacgccgggggacgggggaaggctgcccatggccacagctgcatcatggggagcccttctagggccaggagccccaggacagcagtggggagacactccttgtgtcacttgagttagaagccatggaggagtctgcccttccgagcacagcagctcagccttcgacagcgctgggaggtgaggccacacagcagcgtgcggagatgggcccagcctggcctgcagccctgaggggcctgggatggcccccaccacccacccaccagggtagctgaggtggcacagacaggctcactggctccgggtttctgcccccgctgcaggcagcacagtgcagacttctgctgcgtgagtgagttgcgggggccccagaagcacgaagcccagcccggcgtggcccactgtctcccgtgcatggccctctgcttacccggactcaggagaagggcgtgtttgcggcctggaggacaggcgtggagaggtttgcttgatttccataactcaacacttgcccacacaatctgcccatggaagtctggcctagaatgcttgttagggccagagcagcccctctgggaatgaggctctgtagcccccgcttttcttttggtttttgcttttagcaagattttttttttttaagtctatgagcactgaactcaagaaacaaacatgtgaagtggggctgctggggggaggtgagccccttgtcctcactgccatccctgcagccctgccttacccaaggcctagggactcactgattcgaggctggatgcattgacttccccagcacaccctcccctcacccctgcctccgtatctgacagatgactggtgggccaggggctggcggggggcttctacccagcgcagtgcccccacccttgtgccccacctgagggtagggcacagagtggccctggaattacctctggcccttaccagccccttgctgcccccaatccctagatgaggtccctggctggatggatagctccgttctgcccccacgtggggcctggccccaggcctcacccccagtgcagtgcccaggccaggcacaggtgcttctgacatggggcacacgtgtagtctccttacctgcacagcgatcataaccctgtgggcttacgagagagactcagccactctgtccagtgtgcagggaaagggctggaaggaagaaggccgaaaggaaaggccccagagagcacagtgctcagactcccgggtgacttctggtttctttttatatacttctgttaaatttcctgtaataacacatgctgcttttataatgttaaaaaaaccacgtagaatgtaggctgccccgtgtgttcacctcctaaaccaggacagttctgaggggcagctggaactgttgacacgcactctggcacgggaggcggacccaagagcacccaccccagaggggcaccacactcgcccgtcccgccctgtgtccccacctctgccctgaggtgaacacaggaggctttccacctgccagctgccagccaacctccccgagaggggcaggaaccgaccagcaggacagacccacccaggacagcggcaccaggtcaggcctcagcctttccgatcctctggagggctcaagccgaacggaaggagggaagaactgcagtcacctgggccggtggcgctcacatctgacgtggaggcctctgcttcacttggcccagttcccagccttgtcggcagtgaggacatggaccctcgctggcatccgtcctccgtctggcacaacgtgccgtgttctctctggttagggtttgggtgggacggagactgcgcccctgttcctggtccgcctaagtctctgccagtctgagtctcgtgggccttttctgcaggccctggggttgcggagcaggcagggggacgtcggtggctgggggacatcccgccacctgccaagtagctgcaatgggaagagatgcggttcccgtgacagccaggcctggatgttcaagtcatgtgagaccaccaaataccttgttgcactaagccaatttgaattgagttttcataagtggtacattgagcccagggcttggtactgtgtgggccctagagctggaaggtgcaagggtgggtgaggcccgagaggcctgctctccctgtcctcccctccaccccccaccctgctacccttcacggttgcctggcctggcagctcccgagcctgggaggtgtggctgggcctaggctgctgctcactcccagcctcggtgggaaagacccctgggagcaccccggacctgtggtcctgagtctttttttcacgacagttccgcgacatgtgttgaacacagggccttagcccattggcagccccgaactccagccccgcatgcggccggcggttccacaccgtctctgccagggcccgggccccctccacatgctggaagtggccaggctgccggaaggagccaggggtgaaggaggtcattcctcacttctaggcaacaccgacccccaggcaagcatcacaccacggctcatcagctccagccagagacagggcaccccgcagggccaggaagtgcctgtaaaagaagtgaatccctctgttttatagacggggtaacaggctcgggctacaccaccccaccacaggtgtggctggacctcacccctcagaagagctcatctctagagtgaggacactggtgccctggctcagccggaaagtcagccacaggggccaccacatgcgtcccccacaggaggattccaggcaagggtgggaagcagcacggcaacagaaggggctagaaagggcctgggaggcggggctggaccttcctgcaagtcgcagctccacccctcactaactgttggccctcagcaagccgcgagctcaccgcaccccagactctagacccgtgcagtgggaaggatgacaacacccacttcactgagcccaccgcggctcagagggtggcatgctcccgccccaacaaagcagggggctgcacctccaggggctgtccctctgggcaccccactcctgggtagcaacttgaaagaggaggtctcggctgggcgcagtggctcacgcctgtaatctcagcactttgggaggccgaggcaggcggatcacaaggtcaggagatcgagaccatcttggctagcacggtgaaaccctgtctctactaaaaaatacaaaaaattagctgggcgtggtggcaggtacctgtagtcccagccactcgggaggctgaggcagggaaatggtgtgaacccgggaggcggagtttgcagtgagccgagattggccactgcactccagcctgggcgacagagcgagactccgtctcaaaaaaaaaaaaaaagaggtctcagcttgaactccttcccccagaggggttgctgtcttggcgggaagcttccccattaaacacaaaagaaagaaaaaactaaagacctacaaacaaaccggcatcacgcacagcctggcatcacgcacagcccggcatcacgcacagcccggcatcacgcacagcccggcatcacccccagcccggcatcacgcacagcccggcatcacacacaaacccggcatcacacacagccccggcatcacccgcagcccggcatcacccgcagcccggcatcacgcacagcccggcatcacccgcagcccggcatcacccacaaacccggcatcacgcacagcccggcatcacccacaaacccggcatcacgcacagcccggcatcacccgcagcccggcatcacccacaaactcggcatcacccacaaacccggcatcacgcacagcatggcatcacccacagcccggcatcacgcacagcccggcatcacgcacagcccctccaggctgccactgaactgcagccgccgcctgaacgtcctgtattgtctcctaaggagctgccatcaggggactccatcaaggagccagccatctgcatattttccaactaaggggccaaatggccctccctcaaatccagtgacactggcccggctggtggcctctcatcttgctgaaaagactgtcaccgtttcccccaatcctgatttaatgggcggccttgcgggggctgtacttgcccctccccggcgtgggtcccacactttcttatcgtccaccttcatgtggtggaaatcctgctccggagacccatggcttctctcataagaagcgctctccaggccgggcgcagtggctcatgcctgtaataccagcactttggaaggccgaggtgggcggatcacctgaggttgggagttcgagaccagcctgaccaacatggtgaaaccctgtctctactaaaaatacaaaaaattagccaggcgtggtggcgggcacctataatcccagctactcgggaggctgaggcgggagaatagcttgaacccaggaggcggaggttgcagtgagctgagatcacgccagtgccctccagcctgggcaacgaaagcaaaactccatttcaaaaataataataataaaataaaataaagaagcagtctctcaagggttatcagtagcttctgaactgatttggggagaaatggagcaatcaagttatctgttcagctgactgattctgaaacctgaaacttcagttatgagtgatttgttcccagggcccctgtgggaaggccgccgcgcccttggtcgggaaagcaaagctcaccacccccaggccacaggctgttccgttagggaaggcagtgccaaagtttgccctggactgccttgttccagatagggccaacagcagctcactggcccctctgggcctcagtttccccatctgctaagtgaaggggctggagcaggtgaggtgtttcagggcccttgtccctcgcacctctgatattcagtggctcaagcataaggcaggactagagacagtggcccagaccctgctggtggcctcccccatacggttcttcctagcagtcaaagcctgagtcaaaggctgctggtcaaggcagagtttactgaactgttagtttcctcctgcacacaccgggcatgacaccttcaagtctgtccagcagtgggtccagaaagtaccctgtgtgccttggacgcagaggctacagttctcactgtgtggcatgggagccttcacagtgccctcgggagctgcccctggtctttgtctgcaaaggtgactgggaggatagaaaaagcagcgggctggcattgtttcgggggtggggtggtgggcagtgtgcctgggcagtcgcagggaggctgacttggttctgggctgcaagatctgtgcataggaggcccctgggtttcttccaggctcttcactgaaatgcaaagagtctgaagaggaggcagtgggcatagtgcccctgaatctggttaggtggagtttactgcatttaaaggcccatggtgagtggtgagttctgggatttgggagattcccagaggcctgacaggcctgtcccaccctcctggacttcactacagggagctgaagtcagggcccaggcaggggagcaggccacccaggtagggaacaaatgcctgcccatgcagggcagagggcagaaggcagggctgtcagggccttggttggtctgggcactggggcaggtggaggggaggcaggggtggaggagaggcaggggtggaggaggtggggctctcctgggcgggtggaggagaggcaggggtggaggggaggcaggggtggaggagaggcaggggtggaggaggcggggctctcccaggaggccatcacttgtcggcgtgctgcagcagcaggtccactgcctctgcgaggttgtccacgtacccatcagccttcacttccggatggtgctcgtcactgggcctggagaggatggccggaggttagtcagtgcccccacgctgacccctctgcagccacacccaccctcccagcatctaacatgggcctggccttagcttgaggaaacctccaggtcctgccaggcagcctggcccgtggccactggccatccccctcctccccctgccctactcaggcacacatggcccctcctgactgtgccctcaacctggacacctccccaaacctgtctcccactggggagcctgctcagccttgtggtggagtgacagccggcccagctccctctgggcctccagcacagacatctcaccttggatggtggggacatgagtgtaccctgctctgggctccccaggggctcaccccacacccctggcctggcctagtgccccgtgggaggagcctagtccatgtgcactgtggggacagctggggtagagactcggagctcctgcctgccctaacgctgggggcccgcatgtcagtgacagcatgtgtcttctggttggtgccctctgaggccacgcccacccaacagaggaggcaccgggctcctggataaactgccctctggctgggattctgggggcagcaacctctccaaagccttcagccattccccaggcatctcctgaggtctcactggatgctgaggacacaggaatgaagccatgagacagtgcagaggcctccgggccctgccaggggactttgtggaaggggctgtgggctgagtcctgaaggcaggcaggagctacgggtagacacgtgggtgggagaggagagccccaggagcaggaaggggtcaggtgggttcgtggagacatccagagccttttttattttttatttttttgagaccaagtgtcactctgttgcccaggctggagtgcaatggtgcgatcttggctcactgcaacctctgcctcccagtttcaagcgattctcctgcctcggctcttgagtagctgggactacaggcacccgccaccacgcccggctttttttgtattttttagtgtagagatagggtttcgccatgttggccaggccggtctccgactcctgacctcaagtgatttgcccgccttagcctcccaaagtgctgggattacaggagtgagccaccgtgcccggcccccatcccagtcttgacagtcatttgaggaagtggcacctcatcctaggggctgtgggcagcctggagggctgtgagccagaaggcccctccccacagccttgcacccacagaggtgccgctggagcttggcaggaagtggggagcggcccgtctgcaaacctaccactaccgagggacatgttgcttggatctccccacggcctggcccaagctccctgagaagcagggaaaccacagtctcccggcagcagcgcccccactttggaagctgccaccctggtctgagaggaagtgcttgaagttggttctcacgtcatctaaaagccgtgttggccctttcaaagggtttggtttctgcaaagggctttcttgaccctaaaatgactgtcatgggcaggggggctttttcttttaagggttctcagcccagtggcctggaggctacctcctggccctcagggactgctgaggctgtggacctggacgggggccacaggggcagtccctgggaggggagggcagtgtgggctcccctgtgactgtgagggtataccttttggctcttgtccaggtcccaaggacagaaccccttgtcccctaagcccctccagcgcccccacttccttgcccacctgcttgtatggggctacggccgcttcccctcctgcacagtctccgagcacagcactcacgagcctcacatccctctcccttccatcctccaaggaagaagtggtcacccccatcttgaacaggtgaggaaacagctcagaaaggttcagagacttgctataggtcacacagcagggagagcagagctgggatctgactgagttctactcccagccctgtgttctttcgagagcttccaccactgctggacattgctgccccttccagcaaagggcagttgccagcacccgctccaagcaggggcacctacagatgccagtaccagtggggatcgcttggctggccgtcccaagcacggccactctgctgctcctgaatgagcacacaccaaagtaggagcctgggggaccaggcaaggggatgagtatgcggccccctcacccgcacccgctccatcagcaccctcacccgcacccgcttcattaacaccctcacccgctccaccagcaccctcacccgcaccctcacccgctccatcagcaccctcaccctcaccctcgcccgctccatcagcaccctcaccctcaccctcacccgctccatcagcaccctcaccctcaccctcacccgctccgtcaacaccctcaccctcaccctcaccctcacccgctccatcagcaccctcacccgcaccctcacccgctccatcagcaccctcacccgcaccctcacccgctccatcagcaccctcaccctcaccctcgcccgctccatcagcaccctcacctgcacccgcacccgcacccgctccaccagcaccctcacccgcaccctcacccgctccatcagcaccctcaccctcaccctcgcccgctccatcagcaccctcacctgcacccgcacccgcacccgctccaccagcaccctcacccgcaccctcacccgctccatcagcaccctcacccgcaccctcacccgctccgtcaacaccctcaccctcacccgctccatcagcaccctcaccctcaccctcaccctcacccgctccaccagcaccctcacccgcaccctcacccgctccaccagcaccctcacccgcaccctcacccgctccatcagcaccctcacccgcacccacacccgcacccgctccattagcaaccccagcaagaacaacccgtgtcagtgtcagggctttagaggcctcttgtcttgtgtgtgtcattctgtgatgccacacagggtgtctacgatctaggagaggggcattgaagacatgcgtgatcctgcgtcagtgctgaaatagggacttggcaccacgcaatcctgcgtcagtgctggaatatggactcggcatcaccacgaggccttctatggtacgggccacattggaaaactgcgtgttgatatccacttgcaaccctgcagtcccactcctaagtatgtacacagcagaaatgcatcctcacgttcaccaaaggcacgttcaccaaaggcacactgctccacacagctttagttgcaatagcaaaagtcaaacactggacaaatgcccgccagggggaggatgggaaaacagaccacggcagaattgcacactggaatactccacaacggctcaatctggggtgagttcctgccgcggcaatgggggtgagccccagacctgaagagcaactgaggccagactcgaggaatacacacagcaggactgacttacagagagctccagagctggcaaaggcagactagtgacagagggtgggacggcagcttcctaacggaaaggtgaataggggtgccaggaatgttctagatcttgacctgggtggggctaacatcctattcttcacttttagagcactttactaatgttatacctcaaaaatttaattaaaaagccacatatgggccgggcgtggtagctcacgcctgtcatcctagcactttgggaggctaaggcaggaggattgcttgagcccaggaggtcaagaccagcctgggcaacatggtgaaaccctatctctacaaaaaagtacaaaaatcagccaggtgtagtggcaggcgcctgtagtcccagctacttgggaggctgaggtgggaggatcacctgagcctgggaggttgaggctgtggtgagccgtgatcacaccactgcattccaacctgggtgacagatgagagtctcaaaaagaaagagaagccacatataatgctcacagttgctattgtgtaggccagagggccaaatcctacctgcggcctgtctttatatttttaaaggggtgtaaaaagaagagagtaatatgcaagagagaccaaatggaagctggcagagcctgaagtggtaacgattcggccccta

SEQ ID NO: 432 - DNA, 6508 bp, Homo sapiens
cccgtctctatggcggccccaacggccgtccaggacgtggagcgaaatgagctcgggcgctgacggcggcggtggcgctgcggtggcggcgcggtcggacaagggcagtcccggggaggacggtttcgtcccgtcggcgctggggacccgcgagcattgggatgctgtctatgagagagaactgcaaactttccgagaatatggagatacaggtgaaatctggtttggagaagagagtatgaatcgactaataaggtggatgcagaaacacaagattccactggatgcttcagtgcttgatattggaactggaaatggtgttttcctggttgaacttctgtctggatttcatatttgtattgacaaagggacttttgatgccataagccttaatcctgacaatgcaattgagaagaggaagcaatatgtgaaatctctctccagggtgttgaaagtaaaaggcttttttctaataacgtcatgtaattggaccaaggaagagttgctaaatgaattcagtgaaggatttgaacttctcgaagagctaccaacacccaagttcagctttggaggcagatctggaaacagtgtagcagcattggttttccaaaaaatccgccgcgcctagcgcccgggcccgcgacaccgcccgctaagcgccgggccgagttcacgcagccgcggtctggcggctccgcggcggcggcgggtgcgggcggcctggccggtgccggttaaagggacgagttgcaaacacttcaggaagtgacaagtcgatttcctcctccccgggagtcgctcgtacaaagcgctcggcgccggcaggcgagcgtgcgcgcggcggacgcgcggcgggcaccccggacgacttggcgagcgctggcggtgacggcgcggggtccgcgcccggagcgccccgccgcgcacaggagttgaccacatttggccatttcccagaagggccccaccccaagggtgagtggccaatggggagctgtttctgctgacatcaattccccaggaggtactcaccccaagtctgcccaagtgaagatggctgatacccaccctgggatggagcccagcgcctgaggcccttatcatggtgatggtcctaagtgaaagcctcagcacccggggagctgactccattgcatgtgggaccttcagccgtgaactgcacacgccaaagaagatgagtcaaggacctacacttttctcttgtggaattatggaaaatgacagatggcgagacctggacaggaaatgccctcttcagattgaccaaccgagcaccagcatctgggaatgcctgcctgaaaaggacagctcactatggcaccgggaggcagtgaccgcctgcgctgtgaccagtctgatcaaagacctcagcatcagcgaccacaacgggaacccctcagcaccccctagcaagcgccagtgccgctcactgtccttctccgatgagatgtccagttgccggacatcatggaggcccttgggctccaaagtctggactcccgtggaaaagagacgctgctacagcgggggcagcgtccagcgctattccaacggcttcagcaccatgcagaggagttccagcttcagcctcccttcccgggccaacgtgctctcctcaccctgcgaccaggcaggactccaccaccgatttggagggcagccctgccaaggggtgccaggctcagccccgtgtggacaggcaggtgacacctggagccctgacctgcaccccgtgggaggaggccggctggacctgcagcggtccctctcttgctcacatgagcagttttcctttgtggaatactgtcctccctcagccaacagcacacctgcctcaacaccagagctggcgagacgctccagcggcctttcccgcagccgctcccagccgtgtgtccttaacgacaagaaggtcggtgttaaaaggcggcgccctgaagaagtgcaagagcagaggccttctctagaccttgccaagatggcacagaactgtcagaccttcagcagcctcagctgcctgagcgcagggacagaggactgcggtccccagagccccttcgcccgccacgtcagcaacaccagggcctggaccgccctgctctcagcctccggcccagggggcaggacccccgctgggaccccggtccctgagcctcttcccccttccttcgacgaccacctcgcctgccaggaggacctgtcctgtgaggagtcagacagctgcgccctggacgaggattgtggcaggagagcggagccggctgcagcctggcgggaccgcggggcccctgggaacagcctctgctccctggacggcgagttggacattgagcagatagagaagaactgagggggtgtgggcccaggcagggctggggtgtgctggcatcgacagcccccactctgggcactaggtgggcccttgaaggggagcccaactcgtgggcctgatgaaagcttcctgagtggtgtcgggtcccagagagggagcccacctgctgcctgggggagagcctggcctggccgcgtcatacagcgggtgtgtcagcctctcaccggctccccgagcgtggcagccaccaggtccacagaactactgcagcccagaggacagctttgaagtttgcgtcttttctgcctctttccctgtgggatgttgggcagtctctgttgtccccggcagagctgggcaccgctctgtatccccctggtggtgggggctgtcagggagggcctggggtgggggccaggggccatctgctatgtcagggcccttcttggcctcactcaggttcacttctggggagtcggccccgcagcttctttcactcagttttactccgtgccttctctcccaggtctccctgcttcaggcttgggaaggttcgggagatgcttccttctgtaacaccagaaccatttggccttaattccaatgtgagagacagaatccctggggtgctggactggccctccagagggtaagccatgtccggagtctcgggcccaaggaacgatttggagggtgcttgttagggcctcccgtgttgggtagaaatttggtggatctgttggctgaaaagacggacttgcttgcctctcctacagcatggagaggctgaccccatggctctgccaccgttggggcagggttagcagatggcagcccttctctgtggctgacaggtcactgagtgataagcatggttggttccggtgagtgtagggatggcacgataccagggcagcctcttgaaaacggcctcgggagacgggagctgcgagcaggtgggcagatgagggccctatgcgcactcaggggtgaagggcgtccgctggccactctgcaggggcccctgcaggattccaggcacctcccgtttgtccttgaggactgctggctgtaaccagggcacatcacccacctcaagacaagcccacgcccttgtcagcttagggggagcccagtcctgagggctgcatctctgttgtaggcccagccaccggcacaaagctggattcatgctccctgcccctaccccaccctggctcctcaccctggggcatccgaggagcctagccccctgagggtttgctctcctctcaaggtttgtagctcctctccggctgccttgcagacaccaccacatgggctctgctctatgggaatctggcttttagcgaatgtggcgtcttctgcaaacaatagcaattgggctggcttaggagcaagtggctcattttcccataaggctaaaaataactggtgcgctcccttgtgttggctgacacgcgcgttcaaagcacttttgtagtcactttgcttttgctcgtcttcatggacgagtgaacgcctcgcttctgcaggttgagtccagatgcttctcaccttctttctcctcaagaaagatgctttttgggaaacgttgtttaaatcttatttttttactacatcaaaaggatggtggttcaagttcccaatatgtgggtggcacttcttaaaaatcagctttaaggagctggcagaaagcccccagccccacagccctgagagatggtgttgctagctcaggtggctgacacatggggtatgccgggcactgggcaggtcccagagccggggaaccagctcacctctggttgctgtagctcctgccggaggcatgtctacttgtgatcccggacagccgaacccaagagctggtggctctgagcagacagagacatcttggcctgtccctgcctgggggtcatggagaccatgtcttcttagagcaaatgtggaggcggccagggcagttgttgggtgaatgtggagagcacatggccatgtcttgcccccggagtaccactgggcgtggggggtcctggcaccacatgcccggtgtggccgagggcacacagcctctatagcaggccttcctgtggaaggcagaggcagtgagggaggtggacggtgccagctgaggctgaggcatgcagcagcccccagctacctttgcttagggctggggtgggaggcacatggtgacaggtatatgtcgtgggactggggtgtgggtgacctgccctcaaaccttgcctgccacctccccattcaggcctggtggcaggaagggacaagctgtggagctggctgagtcacagccacctccccacctccccgcaagctggtcccatcgaccagcaagcccagccccagggcgcttagggagaaatgacccagcctcctcagaccccgcctgcctgtcctgtgcccaccacgcagcagtcaggggagaaaatggtggctatcccttctgcttagagaaagaaatggcctttagctggtttcatgtttgtgttttgactggagggagtagaccctatctataaggtgccaccccatcatccaagctgccacactgcccggagcagcctgttcctgcactccaccctgctggccccaggacttctgatctcagtcctctgggagggaggttcgcctaggaggtgccccccacattggtgtccccatgggcagcaggcagacagctcacccccaccagcatgatggccccagctgggggcagtggcaggagccttacttttgtcacagccttgcccacaaaccctgcctctgaggggagactgaggaagggcagagccagaagcaagccgtgccaggccatctgcctgctcatggggtcctaaagcgcgggctaagcctgcaggaaagccggggcggtggggggggcttagtgccacatgcaccccactcattccaaagccaccaaactgccaggggctgccgtccacccgtggggcccaggggctggggccacagccttgccattttcgttgccataccctcttgccttactcgcggtggaggccggatttgcacgggcagacgtgcacctgggcccgtggggagcttgttctgaccagacgtacagattttcattctcagaaagccttacttttcaaccaaatttttgtagccagttttgtgaatttgtacactgaaagaaaatttaaataaaggggaagtccacattaaaaagaaaacaaaacaaaccctaactaacttccaaatgggtctcctggtgcgggggcgtgagtggccgtgccctgggtgtgctgcctgtctgagcaagcttccctagctgtggaaccccgggccccctgctgcgggctctgccttggtgtcatgcctgctgcacccccgtttccactgacgtgccgtctgtggctatgggggtggtcactggaatgacggtcactccagacgtcagccggcagggatgcagcaggctggccgcgcaccggggctcgggcaccctctggccccacactggcaatgatgccacaccttgccatgtccacgctgttggtcaaacccctctgtcatgcctctttaaagagaaaagaagagaaagattttttttttttttaatggcagaccgaagtggagatcttgtagcctagataggatagtctgaccttctagcatagtctttttggcaaatgatttgtgttttcagtgtgtggggaagctgtcctgggggctggggcgacagatagcacataggctgtttctggggctgcaggggcttccctgagctggatgttgtgggtgttgccgtgcttcaggaagtgtggcgaccagaaagcgtagacccggggcccagggtctgcccgcccctgcagcctggcctccccgcacaggctgtggcttgcactccagccgctctagtctctcaggaatttgcttgttacttgtactgtgtaaataaagcttcctggttcaatacccaagtgcctggtgccagctgtgtggtttctgttgggtgtggtgaactggcaggtcccccctgctcacaggagcattagctctgggcgcagagagacctagactggacccttctgtcccctccaagcctcggggtctgaatcgataaaatggggctagcagacatcacagagctgtggagacgccggggga

SEQ ID NO: 433 - protein, 420 aa, Homo sapiens
MVMVLSESLSTRGADSIACGTFSRELHTPKKMSQGPTLFSCGIMENDRWRDLDRKCPLQIDQPSTSIWECLPEKDSSLWHREAVTACAVTSLIKDLSISDHNGNPSAPPSKRQCRSLSFSDEMSSCRTSWRPLGSKVWTPVEKRRCGGSVQRYSNGFSTMQRSSSFSLPSRANVLSSPCDQAGLHHRFGGQPCQGVPGSAPCGQAGDTWSPDLHPVGGGRLDLQRSLSCSHEQFSFVEYCPPSANSTPASTPELARRSSGLSRSRSQPCVLNDKKVGVKRRRPEEVQEQRPSLDLAKMAQNCQTFSSLSCLSAGTEDCGPQSPFARHVSNTRAWTALLSASGPGGRTPAGTPVPEPLPPSFDDHLACQEDLSCEESDSCALDEDCGRRAEPAAAWRDRGAPGNSLCSLDGELDIEQIEKN

SEQ ID NO: 434 - DNA, 6733 bp, Homo sapiens
cccgtctctatggcggccccaacggccgtccaggacgtggagcgaaatgagctcgggcgctgacggcggcggtggcgctgcggtggcggcgcggtcggacaagggcagtcccggggaggacggtttcgtcccgtcggcgctggggacccgcgagcattgggatgctgtctatgagagagaactgcaaactttccgagaatatggagatacaggtgaaatctgagaggtggggtgtcattctgtcatccaggctggagtacagtggcatgatcatcataactcgttacatcctggacctcctgggcccaggtttggagaagagagtatgaatcgactaataaggtggatgcagaaacacaagattccactggatgcttcagtgcttgatattggaactggaaatggtgttttcctggttgaacttgcaaaatttggtttctctaatattactggaattgattactctccttctgcaattcagctttctggaagtattatagaaaaagaaggtttatctaacattaagttaaaggtagaagactttttgaatctctccacacagctgtctggatttcatatttgtattgacaaagggacttttgatgccataagccttaatcctgacaatgcaattgagaagaggaagcaatatgtgaaatctctctccagggtgttgaaagtaaaaggcttttttctaataacgtcatgtaattggaccaaggaagagttgctaaatgaattcagtgaaggatttgaacttctcgaagagctaccaacacccaagttcagctttggaggcagatctggaaacagtgtagcagcattggttttccaaaaaatccgccgcgcctagcgcccgggcccgcgacaccgcccgctaagcgccgggccgagttcacgcagccgcggtctggcggctccgcggcggcggcgggtgcgggcggcctggccggtgccggttaaagggacgagttgcaaacacttcaggaagtgacaagtcgatttcctcctccccgggagtcgctcgtacaaagcgctcggcgccggcaggcgagcgtgcgcgcggcggacgcgcggcgggcaccccggacgacttggcgagcgctggcggtgacggcgcggggtccgcgcccggagcgccccgccgcgcacaggagttgaccacatttggccatttcccagaagggccccaccccaagggtgagtggccaatggggagctgtttctgctgacatcaattccccaggaggtactcaccccaagtctgcccaagtgaagatggctgatacccaccctgggatggagcccagcgcctgaggcccttatcatggtgatggtcctaagtgaaagcctcagcacccggggagctgactccattgcatgtgggaccttcagccgtgaactgcacacgccaaagaagatgagtcaaggacctacacttttctcttgtggaattatggaaaatgacagatggcgagacctggacaggaaatgccctcttcagattgaccaaccgagcaccagcatctgggaatgcctgcctgaaaaggacagctcactatggcaccgggaggcagtgaccgcctgcgctgtgaccagtctgatcaaagacctcagcatcagcgaccacaacgggaacccctcagcaccccctagcaagcgccagtgccgctcactgtccttctccgatgagatgtccagttgccggacatcatggaggcccttgggctccaaagtctggactcccgtggaaaagagacgctgctacagcgggggcagcgtccagcgctattccaacggcttcagcaccatgcagaggagttccagcttcagcctcccttcccgggccaacgtgctctcctcaccctgcgaccaggcaggactccaccaccgatttggagggcagccctgccaaggggtgccaggctcagccccgtgtggacaggcaggtgacacctggagccctgacctgcaccccgtgggaggaggccggctggacctgcagcggtccctctcttgctcacatgagcagttttcctttgtggaatactgtcctccctcagccaacagcacacctgcctcaacaccagagctggcgagacgctccagcggcctttcccgcagccgctcccagccgtgtgtccttaacgacaagaaggtcggtgttaaaaggcggcgccctgaagaagtgcaagagcagaggccttctctagaccttgccaagatggcacagaactgtcagaccttcagcagcctcagctgcctgagcgcagggacagaggactgcggtccccagagccccttcgcccgccacgtcagcaacaccagggcctggaccgccctgctctcagcctccggcccagggggcaggacccccgctgggaccccggtccctgagcctcttcccccttccttcgacgaccacctcgcctgccaggaggacctgtcctgtgaggagtcagacagctgcgccctggacgaggattgtggcaggagagcggagccggctgcagcctggcgggaccgcggggcccctgggaacagcctctgctccctggacggcgagttggacattgagcagatagagaagaactgagggggtgtgggcccaggcagggctggggtgtgctggcatcgacagcccccactctgggcactaggtgggcccttgaaggggagcccaactcgtgggcctgatgaaagcttcctgagtggtgtcgggtcccagagagggagcccacctgctgcctgggggagagcctggcctggccgcgtcatacagcgggtgtgtcagcctctcaccggctccccgagcgtggcagccaccaggtccacagaactactgcagcccagaggacagctttgaagtttgcgtcttttctgcctctttccctgtgggatgttgggcagtctctgttgtccccggcagagctgggcaccgctctgtatccccctggtggtgggggctgtcagggagggcctggggtgggggccaggggccatctgctatgtcagggcccttcttggcctcactcaggttcacttctggggagtcggccccgcagcttctttcactcagttttactccgtgccttctctcccaggtctccctgcttcaggcttgggaaggttcgggagatgcttccttctgtaacaccagaaccatttggccttaattccaatgtgagagacagaatccctggggtgctggactggccctccagagggtaagccatgtccggagtctcgggcccaaggaacgatttggagggtgcttgttagggcctcccgtgttgggtagaaatttggtggatctgttggctgaaaagacggacttgcttgcctctcctacagcatggagaggctgaccccatggctctgccaccgttggggcagggttagcagatggcagcccttctctgtggctgacaggtcactgagtgataagcatggttggttccggtgagtgtagggatggcacgataccagggcagcctcttgaaaacggcctcgggagacgggagctgcgagcaggtgggcagatgagggccctatgcgcactcaggggtgaagggcgtccgctggccactctgcaggggcccctgcaggattccaggcacctcccgtttgtccttgaggactgctggctgtaaccagggcacatcacccacctcaagacaagcccacgcccttgtcagcttagggggagcccagtcctgagggctgcatctctgttgtaggcccagccaccggcacaaagctggattcatgctccctgcccctaccccaccctggctcctcaccctggggcatccgaggagcctagccccctgagggtttgctctcctctcaaggtttgtagctcctctccggctgccttgcagacaccaccacatgggctctgctctatgggaatctggcttttagcgaatgtggcgtcttctgcaaacaatagcaattgggctggcttaggagcaagtggctcattttcccataaggctaaaaataactggtgcgctcccttgtgttggctgacacgcgcgttcaaagcacttttgtagtcactttgcttttgctcgtcttcatggacgagtgaacgcctcgcttctgcaggttgagtccagatgcttctcaccttctttctcctcaagaaagatgctttttgggaaacgttgtttaaatcttatttttttactacatcaaaaggatggtggttcaagttcccaatatgtgggtggcacttcttaaaaatcagctttaaggagctggcagaaagcccccagccccacagccctgagagatggtgttgctagctcaggtggctgacacatggggtatgccgggcactgggcaggtcccagagccggggaaccagctcacctctggttgctgtagctcctgccggaggcatgtctacttgtgatcccggacagccgaacccaagagctggtggctctgagcagacagagacatcttggcctgtccctgcctgggggtcatggagaccatgtcttcttagagcaaatgtggaggcggccagggcagttgttgggtgaatgtggagagcacatggccatgtcttgcccccggagtaccactgggcgtggggggtcctggcaccacatgcccggtgtggccgagggcacacagcctctatagcaggccttcctgtggaaggcagaggcagtgagggaggtggacggtgccagctgaggctgaggcatgcagcagcccccagctacctttgcttagggctggggtgggaggcacatggtgacaggtatatgtcgtgggactggggtgtgggtgacctgccctcaaaccttgcctgccacctccccattcaggcctggtggcaggaagggacaagctgtggagctggctgagtcacagccacctccccacctccccgcaagctggtcccatcgaccagcaagcccagccccagggcgcttagggagaaatgacccagcctcctcagaccccgcctgcctgtcctgtgcccaccacgcagcagtcaggggagaaaatggtggctatcccttctgcttagagaaagaaatggcctttagctggtttcatgtttgtgttttgactggagggagtagaccctatctataaggtgccaccccatcatccaagctgccacactgcccggagcagcctgttcctgcactccaccctgctggccccaggacttctgatctcagtcctctgggagggaggttcgcctaggaggtgccccccacattggtgtccccatgggcagcaggcagacagctcacccccaccagcatgatggccccagctgggggcagtggcaggagccttacttttgtcacagccttgcccacaaaccctgcctctgaggggagactgaggaagggcagagccagaagcaagccgtgccaggccatctgcctgctcatggggtcctaaagcgcgggctaagcctgcaggaaagccggggcggtggggggggcttagtgccacatgcaccccactcattccaaagccaccaaactgccaggggctgccgtccacccgtggggcccaggggctggggccacagccttgccattttcgttgccataccctcttgccttactcgcggtggaggccggatttgcacgggcagacgtgcacctgggcccgtggggagcttgttctgaccagacgtacagattttcattctcagaaagccttacttttcaaccaaatttttgtagccagttttgtgaatttgtacactgaaagaaaatttaaataaaggggaagtccacattaaaaagaaaacaaaacaaaccctaactaacttccaaatgggtctcctggtgcgggggcgtgagtggccgtgccctgggtgtgctgcctgtctgagcaagcttccctagctgtggaaccccgggccccctgctgcgggctctgccttggtgtcatgcctgctgcacccccgtttccactgacgtgccgtctgtggctatgggggtggtcactggaatgacggtcactccagacgtcagccggcagggatgcagcaggctggccgcgcaccggggctcgggcaccctctggccccacactggcaatgatgccacaccttgccatgtccacgctgttggtcaaacccctctgtcatgcctctttaaagagaaaagaagagaaagattttttttttttttaatggcagaccgaagtggagatcttgtagcctagataggatagtctgaccttctagcatagtctttttggcaaatgatttgtgttttcagtgtgtggggaagctgtcctgggggctggggcgacagatagcacataggctgtttctggggctgcaggggcttccctgagctggatgttgtgggtgttgccgtgcttcaggaagtgtggcgaccagaaagcgtagacccggggcccagggtctgcccgcccctgcagcctggcctccccgcacaggctgtggcttgcactccagccgctctagtctctcaggaatttgcttgttacttgtactgtgtaaataaagcttcctggttcaatacccaagtgcctggtgccagctgtgtggtttctgttgggtgtggtgaactggcaggtcccccctgctcacaggagcattagctctgggcgcagagagacctagactggacccttctgtcccctccaagcctcggggtctgaatcgataaaatggggctagcagacatcacagagctgtggagacgccggggga

SEQ ID NO: 435 - protein, 420 aa, Homo sapiens; identical to SEQ ID NO: 433

SEQ ID NO: 436 - DNA, 5893 bp, Homo sapiens
ccgccgcgcctagcgcccgggcccgcgacaccgcccgctaagcgccgggccgagttcacgcagccgcggtctggcggctccgcggcggcggcgggtgcgggcggcctggccggtgccggttaaagggacgagttgcaaacacttcaggaagtgacaagtcgatttcctcctccccgggagtcgctcgtacaaagcgctcggcgccggcaggcgagcgtgcgcgcggcggacgcgcggcgggcaccccggacgacttggcgagcgctggcggtgacggcgcggggtccgcgcccggagcgccccgccgcgcacaggagttgaccacatttggccatttcccagaagggccccaccccaagggtgagtggccaatggggagctgtttctgctgacatcaattccccaggaggtactcaccccaagtctgcccaagtgaagatggctgatacccaccctgggatggagcccagcgcctgaggcccttatcatggtgatggtcctaagtgaaagcctcagcacccggggagctgactccattgcatgtgggaccttcagccgtgaactgcacacgccaaagaagatgagtcaaggacctacacttttctcttgtggaattatggaaaatgacagatggcgagacctggacaggaaatgccctcttcagattgaccaaccgagcaccagcatctgggaatgcctgcctgaaaaggacagctcactatggcaccgggaggcagtgaccgcctgcgctgtgaccagtctgatcaaagacctcagcatcagcgaccacaacgggaacccctcagcaccccctagcaagcgccagtgccgctcactgtccttctccgatgagatgtccagttgccggacatcatggaggcccttgggctccaaagtctggactcccgtggaaaagagacgctgctacagcgggggcagcgtccagcgctattccaacggcttcagcaccatgcagaggagttccagcttcagcctcccttcccgggccaacgtgctctcctcaccctgcgaccaggcaggactccaccaccgatttggagggcagccctgccaaggggtgccaggctcagccccgtgtggacaggcaggtgacacctggagccctgacctgcaccccgtgggaggaggccggctggacctgcagcggtccctctcttgctcacatgagcagttttcctttgtggaatactgtcctccctcagccaacagcacacctgcctcaacaccagagctggcgagacgctccagcggcctttcccgcagccgctcccagccgtgtgtccttaacgacaagaaggtcggtgttaaaaggcggcgccctgaagaagtgcaagagcagaggccttctctagaccttgccaagatggcacagaactgtcagaccttcagcagcctcagctgcctgagcgcagggacagaggactgcggtccccagagccccttcgcccgccacgtcagcaacaccagggcctggaccgccctgctctcagcctccggcccagggggcaggacccccgctgggaccccggtccctgagcctcttcccccttccttcgacgaccacctcgcctgccaggaggacctgtcctgtgaggagtcagacagctgcgccctggacgaggattgtggcaggagagcggagccggctgcagcctggcgggaccgcggggcccctgggaacagcctctgctccctggacggcgagttggacattgagcagatagagaagaactgagggggtgtgggcccaggcagggctggggtgtgctggcatcgacagcccccactctgggcactaggtgggcccttgaaggggagcccaactcgtgggcctgatgaaagcttcctgagtggtgtcgggtcccagagagggagcccacctgctgcctgggggagagcctggcctggccgcgtcatacagcgggtgtgtcagcctctcaccggctccccgagcgtggcagccaccaggtccacagaactactgcagcccagaggacagctttgaagtttgcgtcttttctgcctctttccctgtgggatgttgggcagtctctgttgtccccggcagagctgggcaccgctctgtatccccctggtggtgggggctgtcagggagggcctggggtgggggccaggggccatctgctatgtcagggcccttcttggcctcactcaggttcacttctggggagtcggccccgcagcttctttcactcagttttactccgtgccttctctcccaggtctccctgcttcaggcttgggaaggttcgggagatgcttccttctgtaacaccagaaccatttggccttaattccaatgtgagagacagaatccctggggtgctggactggccctccagagggtaagccatgtccggagtctcgggcccaaggaacgatttggagggtgcttgttagggcctcccgtgttgggtagaaatttggtggatctgttggctgaaaagacggacttgcttgcctctcctacagcatggagaggctgaccccatggctctgccaccgttggggcagggttagcagatggcagcccttctctgtggctgacaggtcactgagtgataagcatggttggttccggtgagtgtagggatggcacgataccagggcagcctcttgaaaacggcctcgggagacgggagctgcgagcaggtgggcagatgagggccctatgcgcactcaggggtgaagggcgtccgctggccactctgcaggggcccctgcaggattccaggcacctcccgtttgtccttgaggactgctggctgtaaccagggcacatcacccacctcaagacaagcccacgcccttgtcagcttagggggagcccagtcctgagggctgcatctctgttgtaggcccagccaccggcacaaagctggattcatgctccctgcccctaccccaccctggctcctcaccctggggcatccgaggagcctagccccctgagggtttgctctcctctcaaggtttgtagctcctctccggctgccttgcagacaccaccacatgggctctgctctatgggaatctggcttttagcgaatgtggcgtcttctgcaaacaatagcaattgggctggcttaggagcaagtggctcattttcccataaggctaaaaataactggtgcgctcccttgtgttggctgacacgcgcgttcaaagcacttttgtagtcactttgcttttgctcgtcttcatggacgagtgaacgcctcgcttctgcaggttgagtccagatgcttctcaccttctttctcctcaagaaagatgctttttgggaaacgttgtttaaatcttatttttttactacatcaaaaggatggtggttcaagttcccaatatgtgggtggcacttcttaaaaatcagctttaaggagctggcagaaagcccccagccccacagccctgagagatggtgttgctagctcaggtggctgacacatggggtatgccgggcactgggcaggtcccagagccggggaaccagctcacctctggttgctgtagctcctgccggaggcatgtctacttgtgatcccggacagccgaacccaagagctggtggctctgagcagacagagacatcttggcctgtccctgcctgggggtcatggagaccatgtcttcttagagcaaatgtggaggcggccagggcagttgttgggtgaatgtggagagcacatggccatgtcttgcccccggagtaccactgggcgtggggggtcctggcaccacatgcccggtgtggccgagggcacacagcctctatagcaggccttcctgtggaaggcagaggcagtgagggaggtggacggtgccagctgaggctgaggcatgcagcagcccccagctacctttgcttagggctggggtgggaggcacatggtgacaggtatatgtcgtgggactggggtgtgggtgacctgccctcaaaccttgcctgccacctccccattcaggcctggtggcaggaagggacaagctgtggagctggctgagtcacagccacctccccacctccccgcaagctggtcccatcgaccagcaagcccagccccagggcgcttagggagaaatgacccagcctcctcagaccccgcctgcctgtcctgtgcccaccacgcagcagtcaggggagaaaatggtggctatcccttctgcttagagaaagaaatggcctttagctggtttcatgtttgtgttttgactggagggagtagaccctatctataaggtgccaccccatcatccaagctgccacactgcccggagcagcctgttcctgcactccaccctgctggccccaggacttctgatctcagtcctctgggagggaggttcgcctaggaggtgccccccacattggtgtccccatgggcagcaggcagacagctcacccccaccagcatgatggccccagctgggggcagtggcaggagccttacttttgtcacagccttgcccacaaaccctgcctctgaggggagactgaggaagggcagagccagaagcaagccgtgccaggccatctgcctgctcatggggtcctaaagcgcgggctaagcctgcaggaaagccggggcggtggggggggcttagtgccacatgcaccccactcattccaaagccaccaaactgccaggggctgccgtccacccgtggggcccaggggctggggccacagccttgccattttcgttgccataccctcttgccttactcgcggtggaggccggatttgcacgggcagacgtgcacctgggcccgtggggagcttgttctgaccagacgtacagattttcattctcagaaagccttacttttcaaccaaatttttgtagccagttttgtgaatttgtacactgaaagaaaatttaaataaaggggaagtccacattaaaaagaaaacaaaacaaaccctaactaacttccaaatgggtctcctggtgcgggggcgtgagtggccgtgccctgggtgtgctgcctgtctgagcaagcttccctagctgtggaaccccgggccccctgctgcgggctctgccttggtgtcatgcctgctgcacccccgtttccactgacgtgccgtctgtggctatgggggtggtcactggaatgacggtcactccagacgtcagccggcagggatgcagcaggctggccgcgcaccggggctcgggcaccctctggccccacactggcaatgatgccacaccttgccatgtccacgctgttggtcaaacccctctgtcatgcctctttaaagagaaaagaagagaaagattttttttttttttaatggcagaccgaagtggagatcttgtagcctagataggatagtctgaccttctagcatagtctttttggcaaatgatttgtgttttcagtgtgtggggaagctgtcctgggggctggggcgacagatagcacataggctgtttctggggctgcaggggcttccctgagctggatgttgtgggtgttgccgtgcttcaggaagtgtggcgaccagaaagcgtagacccggggcccagggtctgcccgcccctgcagcctggcctccccgcacaggctgtggcttgcactccagccgctctagtctctcaggaatttgcttgttacttgtactgtgtaaataaagcttcctggttcaatacccaagtgcctggtgccagctgtgtggtttctgttgggtgtggtgaactggcaggtcccccctgctcacaggagcattagctctgggcgcagagagacctagactggacccttctgtcccctccaagcctcggggtctgaatcgataaaatggggctagcagacatcacagagctgtggagacgccggggga

SEQ ID NO: 437 - protein, 420 aa, Homo sapiens; identical to SEQ ID NO: 433

SEQ ID NO: 438 - DNA, 2399 bp, Homo sapiens
cccgtctctatggcggccccaacggccgtccaggacgtggagcgaaatgagctcgggcgctgacggcggcggtggcgctgcggtggcggcgcggtcggacaagggcagtcccggggaggacggtttcgtcccgtcggcgctggggacccgcgagcattgggatgctgtctatgagagagaactgcaaactttccgagaatatggagatacaggtgaaatctggtttggagaagagagtatgaatcgactaataaggtggatgcagaaacacaagattccactggatgcttcagtgcttgatattggaactggaaatggtgttttcctggttgaacttgcaaaatttggtttctctaatattactggaattgattactctccttctgcaattcagctttctggaagtattatagaaaaagaaggtttatctaacattaagttaaaggtagaagactttttgaatctctccacacagctgtctggatttcatatttgtattgacaaagggacttttgatgccataagccttaatcctgacaatgcaattgagaagaggaagcaatatgtgaaatctctctccagggtgttgaaagtaaaaggcttttttctaataacgtcatgtaattggaccaaggaagagttgctaaatgaattcagtgaaggatttgaacttctcgaagagctaccaacacccaagttcagctttggaggcagatctggaaacagtgtagcagcattggttttccaaaaaatgtgagactttttcttggacgaattcaggtagctacacagaatctacacagcaaagttaacctgacacagaaaatccttgtgcaaataaatgcttagtaagtacacaggatgcacatgttgaatagagtatactggattggtgaaagaaaataataataatgagcatctaagtggttgggttttagagatcaatcaagaataattttaattttcttttgtatttgaaatgtaaatagttttcttttcgattaaaaaaatttcctataactgctaaacagttaaaaactttaaagtagtaaatgagtttatagaaagcatgtattcttgatttttgtgccttggtaaagttgataactatttatgaatatttgaccaaattattccagcatcagaataataagcaaaataactttgttagtgttttgttagactgtttatgaaatataacaagaaatactattttgtgttggatggcggttatttttaaacttaattaatacctgtgaaaaggcctcttacctttatgtatataattaaacaaaatcagagaaatgtatcagttgctcaagttatcaagcctgcattttgcagctatggtcttctacacactgtaagggtagtagaaggaaagagaactaaggaatgttattatttgctagcgctatgttaagttgtcttattaagtaattgagtcctttcaatgtcttcttgaggtatgtattgcttgttcttgtttctacgtataaggaaaatgaagctgagagaagtgaagtcacttttatgaggttcaacagtacaggatggagccaggatttttatctgggtctgtctgactttaaaacacatactcttctcctagcatattctgcctcacaggtgcttagtctttgcctttgtagcatttacagtacagctggagacccatgatgattacatataaagttcagttagaaaagatgggtagttactttattagtgttcatctgtggagtatcagaatagcagtcagccaactctgtctcatatcatccttcattacttttccccatctccctactcaaagacttgcctctattaagaattttgtcattcttctgtgaaagggtagtgtaagttatataagccctcagcgatacatgcacaaagatgttctagttaggggctaatttggcaagagaaacagtttattaatgtttttgaaaagataagtcatattcatacttaataccattttgtatttgtggtaatattttaatattggagctaaatacaaatttttgcataattttttgatgattttcagctttgtgggcctattgggttacataagtgactttttgtttggcaaatgttactcctgtattgagtaagtctaacattacgtcccttttctttttggggaggggtagccagaggagtgagtttttcatttagatcaacattgatcaaccattaagacaagatagttgaagacatgtatgtggactgtcaacaaaaataacattttttgaaaagcttttattttcaacatgtaaaaagtgagaaattacttcaaaatatatgcaatttaaattttttagaagattgtgttgattttaccaagacaggagatcttaaactgtagaaacttttatagtttttgagat

SEQ ID NO: 439 - protein, 236 aa, Homo sapiens
MSSGADGGGGAAVAARSDKGSPGEDGFVPSALGTREHWDAVYERELQTFREYGDTGEIWFGEESMNRLIRWMQKHKIPLDASVLDIGTGNGVFLVELAKFGFSNITGIDYSPSAIQLSGSIIEKEGLSNIKLKVEDFLNLSTQLSGFHICIDKGTFDAISLNPDNAIEKRKQYVKSLSRVLKVKGFFLITSCNWTKEELLNEFSEGFELLEELPTPKFSFGGRSGNSVAALVFQKM

SEQ ID NO: 440 - DNA, 6538 bp, Homo sapiens
cccgtctctatggcggccccaacggccgtccaggacgtggagcgaaatgagctcgggcgctgacggcggcggtggcgctgcggtggcggcgcggtcggacaagggcagtcccggggaggacggtttcgtcccgtcggcgctggggacccgcgagcattgggatgctgtctatgagagagaactgcaaactttccgagaatatggagatacaggtgaaatctggtttggagaagagagtatgaatcgactaataaggtggatgcagaaacacaagattccactggatgcttcagtgcttgatattggaactggaaatggtgttttcctggttgaacttgcaaaatttggtttctctaatattactggaattgattactctccttctgcaattcagctttctggaagtattatagaaaaagaaggtttatctaacattaagttaaaggtagaagactttttgaatctctccacacagctgtctggatttcatatttgtattgacaaagggacttttgatgccataagccttaatcctgacaatgcaattgagaagaggaagcaatatgtgaaatctctctccagggtgttgaaagtaaaaggcttttttctaataacgtcatgtaattggaccaaggaagagttgctaaatgaattcagtgaaggatttgaacttctcgaagagctaccaacacccaagttcagctttggaggcagatctggaaacagtgtagcagcattggttttccaaaaaatccgccgcgcctagcgcccgggcccgcgacaccgcccgctaagcgccgggccgagttcacgcagccgcggtctggcggctccgcggcggcggcgggtgcgggcggcctggccggtgccggttaaagggacgagttgcaaacacttcaggaagtgacaagtcgatttcctcctccccgggagtcgctcgtacaaagcgctcggcgccggcaggcgagcgtgcgcgcggcggacgcgcggcgggcaccccggacgacttggcgagcgctggcggtgacggcgcggggtccgcgcccggagcgccccgccgcgcacaggagttgaccacatttggccatttcccagaagggccccaccccaagggtgagtggccaatggggagctgtttctgctgacatcaattccccaggaggtactcaccccaagtctgcccaagtgaagatggctgatacccaccctgggatggagcccagcgcctgaggcccttatcatggtgatggtcctaagtgaaagcctcagcacccggggagctgactccattgcatgtgggaccttcagccgtgaactgcacacgccaaagaagatgagtcaaggacctacacttttctcttgtggaattatggaaaatgacagatggcgagacctggacaggaaatgccctcttcagattgaccaaccgagcaccagcatctgggaatgcctgcctgaaaaggacagctcactatggcaccgggaggcagtgaccgcctgcgctgtgaccagtctgatcaaagacctcagcatcagcgaccacaacgggaacccctcagcaccccctagcaagcgccagtgccgctcactgtccttctccgatgagatgtccagttgccggacatcatggaggcccttgggctccaaagtctggactcccgtggaaaagagacgctgctacagcgggggcagcgtccagcgctattccaacggcttcagcaccatgcagaggagttccagcttcagcctcccttcccgggccaacgtgctctcctcaccctgcgaccaggcaggactccaccaccgatttggagggcagccctgccaaggggtgccaggctcagccccgtgtggacaggcaggtgacacctggagccctgacctgcaccccgtgggaggaggccggctggacctgcagcggtccctctcttgctcacatgagcagttttcctttgtggaatactgtcctccctcagccaacagcacacctgcctcaacaccagagctggcgagacgctccagcggcctttcccgcagccgctcccagccgtgtgtccttaacgacaagaaggtcggtgttaaaaggcggcgccctgaagaagtgcaagagcagaggccttctctagaccttgccaagatggcacagaactgtcagaccttcagcagcctcagctgcctgagcgcagggacagaggactgcggtccccagagccccttcgcccgccacgtcagcaacaccagggcctggaccgccctgctctcagcctccggcccagggggcaggacccccgctgggaccccggtccctgagcctcttcccccttccttcgacgaccacctcgcctgccaggaggacctgtcctgtgaggagtcagacagctgcgccctggacgaggattgtggcaggagagcggagccggctgcagcctggcgggaccgcggggcccctgggaacagcctctgctccctggacggcgagttggacattgagcagatagagaagaactgagggggtgtgggcccaggcagggctggggtgtgctggcatcgacagcccccactctgggcactaggtgggcccttgaaggggagcccaactcgtgggcctgatgaaagcttcctgagtggtgtcgggtcccagagagggagcccacctgctgcctgggggagagcctggcctggccgcgtcatacagcgggtgtgtcagcctctcaccggctccccgagcgtggcagccaccaggtccacagaactactgcagcccagaggacagctttgaagtttgcgtcttttctgcctctttccctgtgggatgttgggcagtctctgttgtccccggcagagctgggcaccgctctgtatccccctggtggtgggggctgtcagggagggcctggggtgggggccaggggccatctgctatgtcagggcccttcttggcctcactcaggttcacttctggggagtcggccccgcagcttctttcactcagttttactccgtgccttctctcccaggtctccctgcttcaggcttgggaaggttcgggagatgcttccttctgtaacaccagaaccatttggccttaattccaatgtgagagacagaatccctggggtgctggactggccctccagagggtaagccatgtccggagtctcgggcccaaggaacgatttggagggtgcttgttagggcctcccgtgttgggtagaaatttggtggatctgttggctgaaaagacggacttgcttgcctctcctacagcatggagaggctgaccccatggctctgccaccgttggggcagggttagcagatggcagcccttctctgtggctgacaggtcactgagtgataagcatggttggttccggtgagtgtagggatggcacgataccagggcagcctcttgaaaacggcctcgggagacgggagctgcgagcaggtgggcagatgagggccctatgcgcactcaggggtgaagggcgtccgctggccactctgcaggggcccctgcaggattccaggcacctcccgtttgtccttgaggactgctggctgtaaccagggcacatcacccacctcaagacaagcccacgcccttgtcagcttagggggagcccagtcctgagggctgcatctctgttgtaggcccagccaccggcacaaagctggattcatgctccctgcccctaccccaccctggctcctcaccctggggcatccgaggagcctagccccctgagggtttgctctcctctcaaggtttgtagctcctctccggctgccttgcagacaccaccacatgggctctgctctatgggaatctggcttttagcgaatgtggcgtcttctgcaaacaatagcaattgggctggcttaggagcaagtggctcattttcccataaggctaaaaataactggtgcgctcccttgtgttggctgacacgcgcgttcaaagcacttttgtagtcactttgcttttgctcgtcttcatggacgagtgaacgcctcgcttctgcaggttgagtccagatgcttctcaccttctttctcctcaagaaagatgctttttgggaaacgttgtttaaatcttatttttttactacatcaaaaggatggtggttcaagttcccaatatgtgggtggcacttcttaaaaatcagctttaaggagctggcagaaagcccccagccccacagccctgagagatggtgttgctagctcaggtggctgacacatggggtatgccgggcactgggcaggtcccagagccggggaaccagctcacctctggttgctgtagctcctgccggaggcatgtctacttgtgatcccggacagccgaacccaagagctggtggctctgagcagacagagacatcttggcctgtccctgcctgggggtcatggagaccatgtcttcttagagcaaatgtggaggcggccagggcagttgttgggtgaatgtggagagcacatggccatgtcttgcccccggagtaccactgggcgtggggggtcctggcaccacatgcccggtgtggccgagggcacacagcctctatagcaggccttcctgtggaaggcagaggcagtgagggaggtggacggtgccagctgaggctgaggcatgcagcagcccccagctacctttgcttagggctggggtgggaggcacatggtgacaggtatatgtcgtgggactggggtgtgggtgacctgccctcaaaccttgcctgccacctccccattcaggcctggtggcaggaagggacaagctgtggagctggctgagtcacagccacctccccacctccccgcaagctggtcccatcgaccagcaagcccagccccagggcgcttagggagaaatgacccagcctcctcagaccccgcctgcctgtcctgtgcccaccacgcagcagtcaggggagaaaatggtggctatcccttctgcttagagaaagaaatggcctttagctggtttcatgtttgtgttttgactggagggagtagaccctatctataaggtgccaccccatcatccaagctgccacactgcccggagcagcctgttcctgcactccaccctgctggccccaggacttctgatctcagtcctctgggagggaggttcgcctaggaggtgccccccacattggtgtccccatgggcagcaggcagacagctcacccccaccagcatgatggccccagctgggggcagtggcaggagccttacttttgtcacagccttgcccacaaaccctgcctctgaggggagactgaggaagggcagagccagaagcaagccgtgccaggccatctgcctgctcatggggtcctaaagcgcgggctaagcctgcaggaaagccggggcggtggggggggcttagtgccacatgcaccccactcattccaaagccaccaaactgccaggggctgccgtccacccgtggggagcttgttctgaccagacgtacagattttcattctcagaaagccttacttttcaaccaaatttttgtagccagttttgtgaatttgtacactgaaagaaaatttaaataaaggggaagtccacattaaaaagaaaacaaaacaaaccctaactaacttccaaatgggtctcctggtgcgggggcgtgagtggccgtgccctgggtgtgctgcctgtctgagcaagcttccctagctgtggaaccccgggccccctgctgcgggctctgccttggtgtcatgcctgctgcacccccgtttccactgacgtgccgtctgtggctatgggggtggtcactggaatgacggtcactccagacgtcagccggcagggatgcagcaggctggccgcgcaccggggctcgggcaccctctggccccacactggcaatgatgccacaccttgccatgtccacgctgttggtcaaacccctctgtcatgcctctttaaagagaaaagaagagaaagattttttttttttttaatggcagaccgaagtggagatcttgtagcctagataggatagtctgaccttctagcatagtctttttggcaaatgatttgtgttttcagtgtgtggggaagctgtcctgggggctggggcgacagatagcacataggctgtttctggggctgcaggggcttccctgagctggatgttgtgggtgttgccgtgcttcaggaagtgtggcgaccagaaagcgtagacccggggcccagggtctgcccgcccctgcagcctggcctccccgcacaggctgtggcttgcactccagccgctctagtctctcaggaatttgcttgttacttgtactgtgtaaataaagcttcctggttcaatacccaagtgcctggtgccagctgtgtggtttctgttgggtgtggtgaactggcaggtcccccctgctcacaggagcattagctctgggcgcagagagacctagactggacccttctgtcccctccaagcctcggggtctgaatcgataaaatggggctagcagacatcacagagctgtggagacgccggggga

SEQ ID NO: 441 - protein, 420 aa, Homo sapiens; identical to SEQ ID NO: 433

SEQ ID NO: 442 - DNA, 6625 bp, Homo sapiens
cccgtctctatggcggccccaacggccgtccaggacgtggagcgaaatgagctcgggcgctgacggcggcggtggcgctgcggtggcggcgcggtcggacaagggcagtcccggggaggacggtttcgtcccgtcggcgctggggacccgcgagcattgggatgctgtctatgagagagaactgcaaactttccgagaatatggagatacaggtgaaatctgagaggtggggtgtcattctgtcatccaggctggagtacagtggcatgatcatcataactcgttacatcctggacctcctgggcccaggtttggagaagagagtatgaatcgactaataaggtggatgcagaaacacaagattccactggatgcttcagtgcttgatattggaactggaaatggtgttttcctggttgaacttgcaaaatttggtttctctaatattactggaattgattactctccttctgcaattcagctttctggaagtattatagaaaaagaaggtttatctaacattaagttaaaggtagaagactttttgaatctctccacacagctgtctggatttcatatttgtattgacaaagggacttttgatgccataagccttaatcctgacaatgcaattgagaagaggaagcaatatgtgaaatctctctccagggtgttgaaagtaaaaggcttttttctaataacgtcatgtaattggaccaaggaagagttgctaaatgaattcagtgaaggatttgaacttctcgaagagctaccaacacccaagttcagctttggaggcagatctggaaacagtgtagcagcattggttttccaaaaaatccgccgcgcctagcgcccgggcccgcgacaccgcccgctaagcgccgggccgagttcacgcagccgcggtctggcggctccgcggcggcggcgggtgcgggcggcctggccggtgccggttaaagggacgagttgcaaacacttcaggaagtgacaagtcgatttcctcctccccgggagtcgctcgtacaaagcgctcggcgccggcaggcgagcgtgcgcgcggcggacgcgcggcgggcaccccggacgacttggcgagcgctggcggtgacggcgcggggtccgcgcccggagcgccccgccgcgcacaggagttgaccacatttggccatttcccagaagggccccaccccaagggtgagtggccaatggggagctgtttctgctgacatcaattccccaggaggtactcaccccaagtctgcccaagtgaagatggctgatacccaccctgggatggagcccagcgcctgaggcccttatcatggtgatggtcctaagtgaaagcctcagcacccggggagctgactccattgcatgtgggaccttcagccgtgaactgcacacgccaaagaagatgagtcaaggacctacacttttctcttgtggaattatggaaaatgacagatggcgagacctggacaggaaatgccctcttcagattgaccaaccgagcaccagcatctgggaatgcctgcctgaaaaggacagctcactatggcaccgggaggcagtgaccgcctgcgctgtgaccagtctgatcaaagacctcagcatcagcgaccacaacgggaacccctcagcaccccctagcaagcgccagtgccgctcactgtccttctccgatgagatgtccagttgccggacatcatggaggcccttgggctccaaagtctggactcccgtggaaaagagacgctgctacagcgggggcagcgtccagcgctattccaacggcttcagcaccatgcagaggagttccagcttcagcctcccttcccgggccaacgtgctctcctcaccctgcgaccaggcaggactccaccaccgatttggagggcagccctgccaaggggtgccaggctcagccccgtgtggacaggcaggtgacacctggagccctgacctgcaccccgtgggaggaggccggctggacctgcagcggtccctctcttgctcacatgagcagttttcctttgtggaatactgtcctccctcagccaacagcacacctgcctcaacaccagagctggcgagacgctccagcggcctttcccgcagccgctcccagccgtgtgtccttaacgacaagaaggtcggtgttaaaaggcggcgccctgaagaagtgcaagagcagaggccttctctagaccttgccaagatggcacagaactgtcagaccttcagcagcctcagctgcctgagcgcagggacagaggactgcggtccccagagccccttcgcccgccacgtcagcaacaccagggcctggaccgccctgctctcagcctccggcccagggggcaggacccccgctgggaccccggtccctgagcctcttcccccttccttcgacgaccacctcgcctgccaggaggacctgtcctgtgaggagtcagacagctgcgccctggacgaggattgtggcaggagagcggagccggctgcagcctggcgggaccgcggggcccctgggaacagcctctgctccctggacggcgagttggacattgagcagatagagaagaactgagggggtgtgggcccaggcagggctggggtgtgctggcatcgacagcccccactctgggcactaggtgggcccttgaaggggagcccaactcgtgggcctgatgaaagcttcctgagtggtgtcgggtcccagagagggagcccacctgctgcctgggggagagcctggcctggccgcgtcatacagcgggtgtgtcagcctctcaccggctccccgagcgtggcagccaccaggtccacagaactactgcagcccagaggacagctttgaagtttgcgtcttttctgcctctttccctgtgggatgttgggcagtctctgttgtccccggcagagctgggcaccgctctgtatccccctggtggtgggggctgtcagggagggcctggggtgggggccaggggccatctgctatgtcagggcccttcttggcctcactcaggttcacttctggggagtcggccccgcagcttctttcactcagttttactccgtgccttctctcccaggtctccctgcttcaggcttgggaaggttcgggagatgcttccttctgtaacaccagaaccatttggccttaattccaatgtgagagacagaatccctggggtgctggactggccctccagagggtaagccatgtccggagtctcgggcccaaggaacgatttggagggtgcttgttagggcctcccgtgttgggtagaaatttggtggatctgttggctgaaaagacggacttgcttgcctctcctacagcatggagaggctgaccccatggctctgccaccgttggggcagggttagcagatggcagcccttctctgtggctgacaggtcactgagtgataagcatggttggttccggtgagtgtagggatggcacgataccagggcagcctcttgaaaacggcctcgggagacgggagctgcgagcaggtgggcagatgagggccctatgcgcactcaggggtgaagggcgtccgctggccactctgcaggggcccctgcaggattccaggcacctcccgtttgtccttgaggactgctggctgtaaccagggcacatcacccacctcaagacaagcccacgcccttgtcagcttagggggagcccagtcctgagggctgcatctctgttgtaggcccagccaccggcacaaagctggattcatgctccctgcccctaccccaccctggctcctcaccctggggcatccgaggagcctagccccctgagggtttgctctcctctcaaggtttgtagctcctctccggctgccttgcagacaccaccacatgggctctgctctatgggaatctggcttttagcgaatgtggcgtcttctgcaaacaatagcaattgggctggcttaggagcaagtggctcattttcccataaggctaaaaataactggtgcgctcccttgtgttggctgacacgcgcgttcaaagcacttttgtagtcactttgcttttgctcgtcttcatggacgagtgaacgcctcgcttctgcaggttgagtccagatgcttctcaccttctttctcctcaagaaagatgctttttgggaaacgttgtttaaatcttatttttttactacatcaaaaggatggtggttcaagttcccaatatgtgggtggcacttcttaaaaatcagctttaaggagctggcagaaagcccccagccccacagccctgagagatggtgttgctagctcaggtggctgacacatggggtatgccgggcactgggcaggtcccagagccggggaaccagctcacctctggttgctgtagctcctgccggaggcatgtctacttgtgatcccggacagccgaacccaagagctggtggctctgagcagacagagacatcttggcctgtccctgcctgggggtcatggagaccatgtcttcttagagcaaatgtggaggcggccagggcagttgttgggtgaatgtggagagcacatggccatgtcttgcccccggagtaccactgggcgtggggggtcctggcaccacatgcccggtgtggccgagggcacacagcctctatagcaggccttcctgtggaaggcagaggcagtgagggaggtggacggtgccagctgaggctgaggcatgcagcagcccccagctacctttgcttagggctggggtgggaggcacatggtgacaggtatatgtcgtgggactggggtgtgggtgacctgccctcaaaccttgcctgccacctccccattcaggcctggtggcaggaagggacaagctgtggagctggctgagtcacagccacctccccacctccccgcaagctggtcccatcgaccagcaagcccagccccagggcgcttagggagaaatgacccagcctcctcagaccccgcctgcctgtcctgtgcccaccacgcagcagtcaggggagaaaatggtggctatcccttctgcttagagaaagaaatggcctttagctggtttcatgtttgtgttttgactggagggagtagaccctatctataaggtgccaccccatcatccaagctgccacactgcccggagcagcctgttcctgcactccaccctgctggccccaggacttctgatctcagtcctctgggagggaggttcgcctaggaggtgccccccacattggtgtccccatgggcagcaggcagacagctcacccccaccagcatgatggccccagctgggggcagtggcaggagccttacttttgtcacagccttgcccacaaaccctgcctctgaggggagactgaggaagggcagagccagaagcaagccgtgccaggccatctgcctgctcatggggtcctaaagcgcgggctaagcctgcaggaaagccggggcggtggggggggcttagtgccacatgcaccccactcattccaaagccaccaaactgccaggggctgccgtccacccgtggggagcttgttctgaccagacgtacagattttcattctcagaaagccttacttttcaaccaaatttttgtagccagttttgtgaatttgtacactgaaagaaaatttaaataaaggggaagtccacattaaaaagaaaacaaaacaaaccctaactaacttccaaatgggtctcctggtgcgggggcgtgagtggccgtgccctgggtgtgctgcctgtctgagcaagcttccctagctgtggaaccccgggccccctgctgcgggctctgccttggtgtcatgcctgctgcacccccgtttccactgacgtgccgtctgtggctatgggggtggtcactggaatgacggtcactccagacgtcagccggcagggatgcagcaggctggccgcgcaccggggctcgggcaccctctggccccacactggcaatgatgccacaccttgccatgtccacgctgttggtcaaacccctctgtcatgcctctttaaagagaaaagaagagaaagattttttttttttttaatggcagaccgaagtggagatcttgtagcctagataggatagtctgaccttctagcatagtctttttggcaaatgatttgtgttttcagtgtgtggggaagctgtcctgggggctggggcgacagatagcacataggctgtttctggggctgcaggggcttccctgagctggatgttgtgggtgttgccgtgcttcaggaagtgtggcgaccagaaagcgtagacccggggcccagggtctgcccgcccctgcagcctggcctccccgcacaggctgtggcttgcactccagccgctctagtctctcaggaatttgcttgttacttgtactgtgtaaataaagcttcctggttcaatacccaagtgcctggtgccagctgtgtggtttctgttgggtgtggtgaactggcaggtcccccctgctcacaggagcattagctctgggcgcagagagacctagactggacccttctgtcccctccaagcctcggggtctgaatcgataaaatggggctagcagacatcacagagctgtggagacgccggggga

SEQ ID NO: 443 - protein, 420 aa, Homo sapiens; identical to SEQ ID NO: 433

SEQ ID NO: 444 - DNA, 35972 bp, Mus musculus
  misc_feature (1)...(35972): n = A, C, G or T/U
tcaaaagaaaagaaaaagaaaagggataactttttccccccaaggcagggagtgcttctctgtgtagccctggctgtccttgaactcactcagtagcctctgcctcccaattgctgggattataaaggagtgtaccagaaaaagaaaggaacagaagttacatgggaaaaagacactcagattagtttctaagataaaatactttattgtaaggacagcaaacagacccaacataggcttctgtaaaactccacaactgtcaaaaataaaaaataaaaaacaaaagagtatcccgtgtactgagagtccttcaggctgaaatgctgatcagacctgaggattgaggagagttacaacgtttcagatcctgagacaaagtttctctgtctttatcatacttagcagctattcatttcccacctctacctgtaacttccgtttggactctgggttaaaacctggggagtgtattcttttttgaccactctccttcaccaaatccaaacctgataatactatcagcgccttaaggcctataccacagattgccctgctttgctgcaactgctgcaacttcattagctgtggccgacatcagtgtaaagtgtatttagaaaatgcagtcctttcctcccgcctccccccaggctcttccctttataatccagacatcatttagaacctgtactctcactctctcactcaatctctccccctcccttcttcttccccccttttctcttcccccttctctttcttttcccctctctctctctttcccctttcctccctcttccttcccatagtgacttcttcttcttcttcttcttcttcttcttcttcttcttcttcttcttcttcttcttcttcttcttcttcttcttcttcttcttcttcttccttgggggcagtaaactctcccacagtttcccagtaaacctgcatttactataatctaatctggtttgagttggcttttttttttttttttttttttttgctggcagcagagaaataattgaacaccttccttccctagcaggcctcatgcattccaggaagtccatggcctggagcagtgactcttttctgctttccttcatttcttttgcagcaaatgcttttcaaagtagccaatgttgaaagagtgagaggtcagactccaggcactgaagaaaataaaaaaaaaggtcatcacttgcattagaataaaaacccaaatgcatatcctgtctcctacacaatcgtgggtaaagtttaccccttagtcacacttcttgtggagtgatggtctctttgtatttgaccttgaatttattcttagcatactatactgaggcaaaaatgtcttatcaatgctcttgtgctgctatcagattcactggtacatttgataccagtagagagatgtatagaagagtctccctgcctggcagtggtgacacaaacctttaatcccagcacttgggaggcaggggcatagttggaggccagcctggtctacagagtaagttccaggacaaccagggctacacagagaaaccctgtctcgaaaaaaaataaaaaaagaaaataaaaagagtctcccttaagcacctttacagtagtcatattagatgttggatgcctagaaatggtggtgcgtgcctttagtcccagcctccaaggcaggtggagtgtgagaccagtactataggctagctggctcttgaaaaggagctggctttcctgaagaagaatttttgcttctgcctaccatgtcccccataggagtactagggttacagatgcctgctatagaatgcagcttcttccaagggtatcggagttaggtcttccttcaggtttgtgcggctagcacttttaccttctaagccatttctctggccttggataggtttggcattttggttttccttttttttttttggtttcttgacacagggttattctgtgtagcccagggacaatcctggaactgctctctgctctgtagatcaggctggccttgaactcactgagatcggcctgcctctgtctcacgagtgctgggattaaaggtgagtgccaccacacctcagccatgggtagattttttgttgtgacaaggtctcggcctacaattcaccatgtagcccaggctgactagaaatgcagccatcctttctgcctcaggtagctagtgttgagattatgggcatgtgtcctactcagtcttatttgattagggttttgtcagcagtggggctgtatctatgctgagcttttgaaactggacttcttgactacaccccaggagatttcagggtgagtcagaatgaagtaaagccggaattaattaagaagagaatttaacacaggtctacacatggtaggggggtgggtaataggcatatggggaagacagttgtacacacccaagcgggaatgtgggtttctcaagagattctcccttaagtctcccttacagtagccatgtaagatgttggatgcctggaaatggtggcacacacctttattccccgcactggcactcaggaggcagaggtaggtggagtttgaaaccagcctgatgtacagagcaagatccaagacagccagggctacacggagaaaccctgtgtcccaaaccaaacccaaacaaagatgttgatgtcatctgacgttacatctcaaggggttgctaaggaatataaatgtggtcctagagtggctctcagtgtgcactggataggactaaatggataaaataaaaccctgggtcacaagggttggatggagctttgactggaaacttttgtttgtgaaactttcaataattttcaggcttgcatctgggaaagaagtaaccccgtattctaaggtcatatacgctcagggtttgagtatggtttattggtattttaacatagctatttgaaaatatttctgtaaaaaagtaatatagtgcctctacatagacaggtagccagtcttcacggcaaatgtcagttgcgctggaattcttgactttcagctggggaggggctcctttctacttacattctcctgtctttctagcctgcctcaatgtttgcaacttttacagtttgttgtttttttgttttcttttgtttcgagacagggtttctctgtgtagccctggctgtcttggaactcactctgtagaccaggctggcctcgatctcagaaatccacctgcctttgttacagtttgttaaaatactcaacaccttaatactgaaccttgctctacgaacaaatatgtgtgagtcttctggtaagctgagtgcttgcctctctgtacctcctgccacccattgctctagtccggtgtggctctactcgttgtgttggccctgacttatctgtgtgtgtgtgtgtgtgtgtgtgtgtgtgtgtgtgtgtgtgtgtgtgtgagactggacaagacggggctagatatgagggcagggttgggccttaatttccatcctgtaagggatcttgaagcagctgaaagcttgatggagttggcagtaccccgactgcattgtctgcgactgagacgatggcctgtacatacgtaaggcgaggtgatgccgggccaagcgaagtagaatcctgcgctggtcggctagctaccggcttatcccttaccaataacgccacgaacggctgcctccaagccatccatccttttgcgccccgtccttgcacctctctggtgagctcccttggaggcgagagttagcttccctagtgtgggtgtttctccccatcagagaccacgcctcctttcgcccagacaaagctgaatgcagtaacttcaactcgagactgcttctgcgaggggtggctcgctggcttgggggcatcgtctgggattggtctagggcccctgacctctggaagggcagtctggggtcggactatgttcaaaggcggggtttcgggtggactgaagtgacgatctgtgggtaaggcggatagggcggggcttatggttggggcgggtcaatggcgtggccaggctctggtgcctggggcatgggcggttccagggaggagtcaagacctaaaggtccagcccaaagaacacagctcaggggcggagctgagttacctagggttcaggtcctacaagccggccggcattggatagaggcggtctcggcaagggtgtggtctaaaaggaagagtccgccttaaaggaccacgctgttcgctgcaaactccagcgatgtgctttggaaaattctcccaaattctcaacactttacaaatgcttttagtttcacaactctctcttttttttaatatttatttatttattatatgtaagtacactgtagctgttttcagacactccagaagagggagtcagatctcatttcagatggttgtgagccaccatgtggttgctgggatttgaactctggaccttcggaagagcagtcgggtgctcttacccactgagccatctcaccagcccccagtttcacaactcttgagttttatttttgcatcttgtttaggaacagagatgctgaacagcgctaagtttaaggatctctactcctaacacttcacaggaacgcgaagcttctaccagaacttcaggaatctgcaggcgttccctccgcttgtaggttcgcacctgtgtgtcaccttcatctcgtccgaaggctgcaaaagtcctcacctctgttcctagggagcagaatacagagtggccttttctcagctatgaagaagcctcctgtcagagacccaaggctctggagccagacaggacttaaaggaagtggcaaattccggccttaccctgggaagaagggcgccaacgctcacgtgggcgtggtctggcctgacttcagagctcaaggtttccttaggccctaggaatcacattcagggtgggaaatggtagaacactggcggaaatacttttctaaaaatactcgtcaagaaaggagagaaagcctttgcaaaggaacaatcatatttcaactggtagggtaaatcataaagctgaatggattatagaaaactcgttcccagcacacctgctacttgggagtttgtttgtttgtttttttttttttttttttaaagatttttttatttatttgtttgtttgtttatttatttattatatgtaagtacattgtagctgtcttcagacactccagaagagggggtcagatcttgttacggatggttgtgagccaccatgtggttgctgggatttgaactctgcaccttcggaagagcagtcgggtgctctaacccactgagccatctcaccagcccctgtttgtttgttttttaaagatttatttattactatatgtaagtacactgtagctggcttcatatgcaccagaaaagggcgtcagatctcattacgggtagttgtaagccaccatgtggttgctgggatttgaactcaggacctttggaagagcagtcagtgctcttacctgctgagccatctcgccagccccccttttttttgaggggggagttttttttaaggagcaaagcagaaaaactgaacattctgtagggcagccccacccatgtgtgaaaaacacaaggccagcttcagaaagagagatgtgataggctggcaacctgagagacgattgagtctccccttgcatggaacaaggttggaaaccagcccagagagaagataggaagtgggttcttggaggcagccacttccactcagaggcatcttggtcaaagggatggagtattatctagtcacatgattgacacattcctgaagggctggaggtcctagggcaagggcacctagcctttggagtttcactgccccctagagccctcgttggtcttgtccatcccatccacagtgaggtcactgggtctcagttagcaacagatgcctctcaatgcactttggcccttgaaaggtgccaagatctgtagctggagaaataaggaaggagtggaaaggtccatggtccacagggaagaagagtcagcgccacatggggcctcggccaaagttctctgcctagaaagacagggcagcaccgccaatatcaaggagactgggccacacttcacagcagggcctcattcacagtgccacttccacttcagctgcaccgagaacagaggccaaagggtgtagcgagtctagcaacactaggtctgaaacactaggtcgtgatatgctaataaatagtaataaacacaaccaagtcgatgtgtgtttgtgatagaaaatgtgaaagaaacaaagtaacatagggaagaatcaatgaattagccttttttttttttttttttttttttttggttttttgagatagggtttctctgtgtaaccctgtagccttggctgtccttgaactcactctgtagaccaagtgctggggttaaaggcatgtgccaccactgcccagccaatgaattaaccttacacaaacaggaacattgatttgtgaacctgagtttctagcgttttcatagttctctagttgaaatctcatgtgtttcagtgtctttgttgttcattataagccttttttctatattctcacggactgcattcttcctgtttgttagttatttttgcagtgtatgggatggactccggacctctagtttgctatgtatacattctgctgttgagttgaactccagctccaaagcacaattctgtttattttgtttttagagataggttctcactctgccttgcttatcttgtggaagggtccacattctgggaagggagtacagctggagctggtcttatgtccctatctggagagaagttgagccaggcattttagatgccaatccccaagactggccaacagcctcagcactctttctgatggtgtccattaacttcacctcctataactgttctgagagggaaatttcaaaataataaagagatacatatatagagagatctcttttgtatcccaaactgcataccatctagattttcaataacatgaaaaatctgggtaaacatagtttattccatccactaaaacttgtgttcctaccaagttgcaatcccagagttcaggaagccaaggcaggaggaacactgcaagttctgggctattgtgggctatatagaaatttaaatggcattttgtctcacacaatgaaagaagaaagaaacagagaggatgggagaggggagcaggtgtcctggacagacatccagctgtagtttgggtcttagcttggattcaagccttgctgattttttttactgggtatttgagactgtaggttgaagatgctaagtacaagggtcctactttcttccttagaaaaaagaatcacattccccaagcttccttgccctatggtatggttacgtgattagatatgtgaagggtggggcgcactctattcccccttgttgttctggagtgtggatgtaatgctgttgagcagccatcttggaagagaggagtaatagtttcctgctgaaggactacacttcccagcttcccttgcagacaacagacatatctccagtcctataaggaactacctctcatctccctccataggctctttggccatccacctgtgtaggtgacaagatgccccccttgctgtgaataaacgtggccccactcaagggcagaccaagcctgtctttctggcccctatctctcagcagctgccttttaagataatgtaacaaaaggagtaaggaccaagtgaaggtggtgacacacagaaaggaaaatctggacccctgatatttatgcttcagcatccagccccagacttcttcctagaggagaaaatacagaaatgtgtgtcagtcactaccaactccatttgtcgcccatatgctagtacacccttctagtttggtttttttacttacacagtgtggcggtttaaataggaaaggcccccttatagtcatttatttaaatgcttagctatcaagggattggaactctaacaggattggaaggattagaaggtgtggccttgttggatcgatctctctctctctctttctgccttgagatcaggatgtagctctcacgtactgtaccagtgccatgcttcctgccataatgataatggactaaacctctaaagctgtaagcaagcccccagttaaatactttcttttatgaaagagttgccttggagggctggagagatggctcagtgattaagagtactgattgctcttccaaaggttctgagttcaaatcccagcaaaccacatagtggctcacagccatctgtaatgagatctgatgccctcttctggtgtgcctgaagacagtgtctttacatataacaaataaatctttaaaaaaaaaaaaagagttgccttggttatggtgtctcttcacagaaatagaacggtgacaggtgacaactaagacatagttacactgctggctctctctttcccttcttccctctctagtttgatatttccccctcttcccacccccccacccccgacctgctatagttcaatcctagagccttctagggccctgaagctgaaggagaggcctgccatttatctgagaatcctgagcaagtctatgccaagtcaatgcctgaactgtaggaacgtcatatacagtgttacagagtgacacagtgttgagcaggtgacattgggtgtgtcctggctgccagccaccctgtgatagatacttttagagatcctgccctgacttatcaaccctgttcctgcatcttcagcttcacagtgcttttcagattgggcccctatgtgcccttcctgaggaagaccatcctgcccctgctagcctcagcatcctcaggctgctcccacacattggttactctaattctgcccatagccttctccggcagcagctgtcagtgcagctgcacagcagggctcagtctcaggatccccggcttcaggacatcacaggagcccaggaatgagaagtccgttcctttgggactctgtcttgctatccctttgcctctttctcctctgtggagtcgacagtacatttggaaggtcaggaatggactctgcagatgtctcaaggacaggtggtactgagtacctatctattaaggccgtccatgtcgccattttctctcgaagcggggtgtgtgtgtgtgtgtgtgtgtgtgtgtgtgtgtgtgtgtgtgtgtgtgtgagacggactctaccttgcagccagggcatccctgcagggaagagaatagaaaacccaggagagggctccaccttacccttgagaagaaggtgttggggtggcgggacactggaagggattttcttggcgggcttgctgctggctcctccccagcatacttgggcaagcaatcagaggagtaggcggggcaaatccacaaggaagtcaggtaacaaccgggagcccgcaggcactctcacacctgccagtgccagccagcatccagagccccacattgaccgagggaccagccaccagcatgcaggtgagcctcggttctgagggtacatgcctgcagcctctacagctgtcatccttccctgaaggcttggtggcgggcagttcccaacaacctgccatctcagggagcacgctggctagagttggatccttgactatggggcaggctaaggaagaggcacgattgatgaaatagctttctagtcctattctggaattctgaagatcccaggaactgggatcctataggtatgtgatgtagggtttttctgccagacttacctatgtaaggtgagaacagagatgctgtggtgggacactcagacctgtgacttccactgacggggagggactatgggcaccaggttagactggcctgtgtagctgtgtgccacactttctggatcctgctccaggcagactggacctggagcctaggtgtagtccagaaggtaagatgtgtgtgttcttggggtaccttttagaaagcactatgtccccttttgtcaaccaaaatggtcacctggggcagaggccagcacttaatctccagggaggaggcaagggcgaggtagagagtgaaactaacttcccacggaggcaccaggcctccaggtgtgggctgtgtgggtggctgctccctctgcttttatgcagtcctctcactaggccttccagacccagctctgggaactgagtgttcaggttagcacatagacacccttaacctggctccaatatccatccccttgccagcctctttctcaagctagtggtataaggagagagagcatgagcctttaggacctaaagtttaggtacacagagggtttggtggtcccaggtcctagtggatctgagcctgccctctactgtttaaatttcttccatgactctccagagcttttgtcgaagtccaagaaaccttccttgacctggctactgtaaacgtctagcctcgcctggtggctttctccttgccctttatactcctgcaaagttgaagtgctgaggacaaagtcaccgggtgtagtgactacccagttcccaggggtgctgaggactgagtcctgtggggacttgcatgcgcagggtcagaagacaagcctctagagtcagttctctcctttgaccacgtggtcctagggatcaaactgaggcttggtggcaggtgcctttatctgccgagctatctccctggtccgggcataagttcttcagatccatagcttgtgagtcttctgaggtggtaaggagtgagtccctgaaggggttgagagctgaataaacttgccaagtgcagcctgcctctcaggactgacacacatgcatgtctctctcccagaaatgctgccccaatcttttccctagtttgttcatcttttgccttaggaggtaaagattgggaccacctctcccacaaggtaaacatgactccggtccctatatgtgtccacccatgcaccaccctccagggctcagcactgagaacacagagtttccagtttagtgtctggggatggatatggggaggtattactaggcagggtgccaaggacataagggtgccctggccgcttctcttgttggaagagtgttacaggcctcagagcactagcaagggaggtaaacatgatcttgggacaaggtgggccaaaggacaagtggggtgggaagccaggtccacgccttcatgcatgtgtgccgtgacctgtgggtcagcctcggtttggagatggatgctctgtatgcacgcgtctcttctgtctgcactgaccgggaaggcagctcggaggtgagcaccagggagcagggctgccctgcgctggttccctgcatccctgaccctcaggagggaggattccttaggagatttgatggcccacaaactgaagaggtggcctgtgtccataatgaagagctaggggccctacctgagtcctgaaccttgagccctaggccattgtgtatggcctgtaggactggagatgccaagggctggggaaaatggcaggaacgttagtggccaggctggtgattttcttcactcttttcctgcccgtgtcaggctgattctttgttgcggaagtgatatccttggattctattagaaagaaattgaatctctgaggggccaatcacatcagagccagggtgtctgcctgtgcttgaaccctagtctggctgtatacggtaaggtgaaagtctaggtccaaggcccagctgagtgtgtggggacagccttgtccctatcctgggtatcctggagtttcaggagcccacacaacctggaggtggaatgcagtggattaggacccaggagttttgagcacttcaggaacactgagcaagctgtttggctggaggtaaagatagtttcatgagctggtcccatcatgaacgccccaagggcaatactgagatagatgcttacaggcattgctttgccatggatagatatatagtggtcctgcccagagtggcttcagcttacactggctgaagtgatgtctccagcccctggaggcttcaggtaactgttccaaagctgcacacatctctaaggggatttctgatataattttgggactggctagagacagcctcttagcccagccttcaaaggtatactttgtggatggcctcttcttcccagggtgccccctagtttggattccaaagtcctacaggttcctggttctgacctaggtcttgcctgtgctctaatatgttctacacactaacattttgggcccacactgatgactgtggcttatgggagagattgtggcttatgggagaggggagacatcagaggacatctgcccaggtcgatcgaaagtcaagctcatctcactcaccaattcatcccacatgacacttgctgggcccttgcggtgggtggattactaggcagggtgccagggatataagggtcccttggccgcttctcttgttggttggggtgtcaccttcttctcaagttgagacacaggtgcagctctaagtgtgggtttctctcctagagaagtttcaatccctgcccacgatatctgggttgcacgcgtctgtgggcagtgaatgggaaaccaagagagcccaggagtctggggaatgttgtcagaggcgggagggcgggagcagacagaaatgtccaggtagagaggcaagtatagcgcacagggtgcacacaagacagggagaaggtctgaggcctgtgctccttctgtcagctggatggggatgcagggaggggcagcacctgcccattcttgaaccagaagctcctcccgcatgtgtgcgaatgtgagtctgcactcacagggcttcaggagggcatggattcagcggcaaggcaaataaacaaacaagcagaaccaaaccaaaccaagcaaaaccaccttaggtcaaattggatctcagtatacccaggcaatattgcaatatacttatacttaaaaataagcaagcaagcaagcaatcaaacaacacccccccccccaaaaaaaagggtccttaattttgtttggttttgctttactttgtgataaggtcttgttatacagagcaggctggcctggaacttgcaatgtacatcaggctggccacaaattcaccccaaccctccgaatcattggcatgtgctaccatgcccatcccaaagcctgtttatctatctgaaattcctacatgattgggtggcctgtattttgcctggcagctcgtcggctggcctgttggagcagtatggtgagagtctctggaggaggtaggaggaatatgtttgagaaggggagggataacaggttcgtggggcgggggaagcaagagtcagacttggcattgcggtaacttcaggaatgataatatgcagtgtggggatagaggcaggggctactgaggatgtgcactggagttggtaatgggctaaggaagacacgcacccctcggaccatggagtatgagaacagcttcccaaccagctggacagctagaaaaacagctttatttggctcaagtgtctagaaggacatagtccctgcttctgggaccatggagccacggggtccttgccactgtggagtccctctatcaactcctgcattgtttgtaggggcatggatgggactatatcactcatgtgtgcagatgctgtctccttagccagtgcatcggcccactcaactcctcccttggcctttactccatctggtttggaaaagcacaacttgctccaacctgcctggcagccccgactttcccagttcttcctccctgcttcctacagtccacaccctcaggaaagaagccctgactgccaccgacttcagtcctcaggcaccttgtttattcagagtacatgaaatcctaagaacccagcacccagcaccaaggaaacagaacagagcccacagcatccattgccctgcctctgctccctcccttggtggtgtatatagcttaattagtgtatgtagtgtattttagtgtatgtagcttaattagcaggtagctttcttagcacacacgaaaccctgagttcagttactggtatcataaccaggcatggtagtgtctgccagtaataacagaattttgtaaaattttgtaaaagcaaattttatttttaaaaattaaaacaattacagagacctgggttcgattcccagcacccacacagtggcttacaactgcctgtgactcctgctctagagagtccaatgacctccacagggacataaaggcaaaatgtacaataaaaagaaacaaaaagtaaaatgggaaccagacagtggtggcacacgcctttaatcttagcactctggaggcagagacaggaagttttctctgagttcaaggccagcctggtctacagagatcattcaaggacagccagggctacatgaagaaattctgtctcaaaaaccccaacccaacccaaacaaacaaacaaacaaacaaacaaactggggacaggtgtgatggcggcacacacctttaatcccagaactctggagagcagaggcatgtggctctctctggtctacatagcgagttctacctagccaggctagaaccctgtcaaaaaaagaaaaaagaaagaaagaaatgggttagagagatggctcagtggccaagagtactggctgctcttccaaaggtcctgagttcaaatcccagcacccacctggcagctcacaactgtctgtaattccagatccagctaatctgacaccctcacacagagatatatataggcaaaacaccaatgtatataaaataaaaaatagattttaaaatgtttctttaaaaaattttaaaagcagagctttacttgttaattgctttttattttgttaaaaaaaaagagtatatcttgctggggactggagagagttcagtcacgatgaggagcagcagatgctctccccgaggaccttggtttaattcccagcatccacgtggtggctcacaaacatctggaactcctctggtcttgctgtgtcacctacccagttccatctatcagatctgatgctcccttttggtctccatgggcaactgaaaaatctcaagtccttcagattccacttgtggctctcggcgatggggactatgcccctgccctgtcccgagtttcttgtctgtgtcctcaaggatggccaggccacaaggtctagtactgcccagtgcaaatgtcccccaagtttgtgtgaactagtaccagtagtacacacgcgtatccctgatgtccctccctgatgtccccagactttggtattgtcagacttttctttttttttttaatgttttatttatttatttatttttcgagacagggtttctctgtatagccctggctgtcctggaactcactttgtagaccaggctggcctcaaactcagaaatccacctgtctttgcctcccaagtgctgggattaaaggtgtgcgccaccacgcccggctttctttttttttaaaggaataatttatttgttttatgtttatgattatgctgccactgtcttcagacattagaagagggcatccactgagccatctttccagccccctcttcggactcttttttttttttccttgtttttttttttttttttttttccgagtcaggctttctctgtgtagccctggctgtcctggaactcagtctgtagaccaagctggcctagaactcagaaatccacctgcctctgcctccgaagtgctggggttaaaggcgtgtgcccccactgcccggccaccctcttcgaactcttgggtagctggtgtcttctaggtctccagctatcagaagtactgacctgcatcaccttgattgtcctgaggtcgccatttcctgcccatccagtgttcactgagtctccccagctcggagcaggatagggagtctcactcccttgagtgcccatgtacctgctcagagactgtaggaagaggcttgtgaggggcttacatacttgtctccccatctttttctgtcttccaggatgatgagagttcccagatctttatggggccagaaggggaccagttgccattggtggaaatgggcagttgtaaggtaggtctgctcagacctcccaagctggattccacctgctctctctgtgtggtcccacctgctctgtgtggtcccacctgctctctctgtgtggtcccacctgctctctctgtgtggtcccacctgctctgtgtggtcccacctgctctgtgtggtcccacctgctctgtgtggtcccacctgctctgtgtggtcccacctgctctgtgtggtcccacctgctctgtgtggttccacctgctctgtgtggtcccacacctccttccatatcccatgctctatgctgggttcctgtcccacaccttctcccctcctgtgtcttgtgctgggttccagatttacatttcctcctatctgtgttcagagttctgtgtctatcccataccttatccctccagcctgaggcctctgatcaatgggactgtgtcctggtggctgacctccagaccctgaaaatccagaagcatgctcagaagcaactgcagttcctagaaaacctcgagagcaatggcttccacttcaaggtgggctggtttgcttcaggggccaagtcatgggccagagagtcatgaggaatggcgtgacaggggacagaggacaagatggtaactgtggttgagttcttttcttgtgactctcaagatgttaaaggaccagaagaaggtgttctttgggatccgagctgacagtgacgtcattgacaagtaccggactctcctcatgaatcctgaagattctggctccagagacgagcagagcttcaacatagctaccacaaggttaggatgtgtccagagccaggccaggagaacccttgccctgtgtctaggcaggacaagggccacatcccatctgtggtaggacaacagttccatacagtcttagtatggatgtcacaggagatcagacctggttctgaacaaggctctgtgcctcagttcccattttgtaatagtaatattgacactcacttattgacatcctgtgagaactctttatcacagtttccctggagatccagaatcaaagtcattagtcaccacttctggactctggggtcttatctcccatagaccctcatcagcctcatagatcctcatcagcccaaatgctcctctctggacacctggtccttgatatctgacagggagagccttctgtgtccccagttacctgctcctccacaaatactcatacagccccatctggtccttctgtgtcacttacccaggtctaagaatagctttctggggccctggctagttgactctggcaaaggacagacaggggactgggtagcaggcaacagagtcctgtgaacacagaattttttgggaggaatgaggggaaatcagaagagtagaaataatgtcttcattacagttttactgctgtgaacagacaccatgaccaaggcaactcttataaggacatttaattggggctggcttacaggttcagaagttccatccattatcatcaaggtaggagcatggcagcatccaggcagaggagctcagagttccacctcttgttctgaaggttgatagaagactggcttccaggcagctaggacaagggtcttaaagcccacatccacagtgacacacctactccaacaaggccacacctcctactagtgccattccctgggccaagcatataccatcacagacaccttgatgggggcaaaacaagacagacttgtggggggatgtccctgtgatcacaagatgactatctcagacacttaaactatatctgactctggctgcacgaatgcctgcgtggcctcagtcaagttaccctaacctctgagcatcagttcccaactaagcaggataactcatagccatgtaaacaagtttgtgcacattaacactcagcatgcacaggggagtgtggtcagaggtggggggagggggactctaacccctgcatctgggagagatgtggaagcctgagttggtccccattctggaggcgaggcacatttgacctgagtaggttttcagggagatttatggactctggattctggtcggttgtggtgggatgcctcttctagaacagagagggcctggatgtatggagaacagggcctttaggagcagagttccctaggctatcatggggccatcctgatccttagattcttgggtttcagaatccgaattgtgagctttgtcgtgaacaacaagctaaaacctggtggtgagctcagatgggcaggtggccgaggagggagctgccgtgggctggattcccccgtcctccattgctctctgactgaggctccctgtaaccctagacacctttgaggacctggtgaaggatggggtttttgagaccatgtttcttctgcacaaggtgaggggcagaccagctcagaatgggcctaagggtgggaatccaaggtaggaagccaagctctcgttctcgtcgtctgtttccggggcccagggagaacaaaacctgaagaatatatgggctcggtggagaaacatgtttgaaccacagccaattgatgaaatcaggtaataccataccaagcagctcacctgtgggtcagacacatctgtgttcaaaacagataacctgtggcccagccaatccagtcctgactgacagacacagtagtccccacttacactgaggctagcagtacctcctctccccccgcccccgcccttctcctcaaatgcccataccctaccaggtactgaggccaatggggagggtggccttgatggggaagctttcccacagggaatactttggcgagaaggtggctctgtacttcacctggcttggctggtacacctacatgctggtgcctgcggctgtggtgggcctcatcgtctttctgagtggctttgccctgtttgattccagccagatcaggtgggttggggcctgaggcctgcagtctcattgtgggccaggtatggaggtggggacctgaatgggttctggatctctgaatcgccagtcttgtcttcacactcacagcaaagagatctgtagtgccaatgatatcttcatgtgccctcttggcgaccacagtcacagatacctgcgactctcagagatgtgcactttcgcaaaggttagatgctactggagtctttcctgggctcatgcaagggttggcacagtatctcagtctagaagtacggaagatacccactggacccaaggcagctggatgcccccaagagccaggttctgccttccccaccaggggacacggtaggtaggaaacttagcatgaagcccttctgttcctctccccagctcactcatctctttgacaacgagggcaccgtgctatttgccatcttcatggcactgtggggtgagttgcttccggacatccctggagggttccaggagtccagccaacctgagctcttcagccaccctgactcggcccaggtatcctgtgacatttctctgcgctcactgcagctacggtcttcctggagatctggaagcgaaagcgtgcccatgaagtccagagctggaaactgtatgaatgggatgaggaagaggtaaggcagggacagcagcatcaagtctgcttgctctcaatgccccatgtggcccataactgaatccttgtgtctgaggcatgtctggtgacctccctaggaagagatggcccttgagctcattaactctccgcactataagctgaaagaccaccgtcactcctacctgagcagcaccatcatcctgatcctgtccctgttcatggtacttccgggagctgtggtatgggctagagacccagttatccctactcttcacgcccaaccccaaccctttgcagatctgtttaatgattggcatggctcatgtgctggttgtctaccgtgtgctggctggagccctcttcagcagcctcgtgaagcagcaggtgaccaccgctgtggtggtgactggggcagtggtacattatataatcattgtcatcatgactaaggtaaggatcaggcaggggaggccctggggggctccactgaagtcctaggtaagtcccacttggttccttcttccctcaggtcaacaaatatgtagccctgaagctttgtaaatttggtgagaagaggctagcctctctctgggaactgggaggactcagggctgagagttacagggctgtgatcaaacatggggtgggggcttcctgctcttctggggtccctcacttgagagtctaggtcatgctgtcccactggtctaaggacagacaagatggccatgtctcattccagaggaatccgggaccttctcagagcaagagaggaagttcactgtcaagtttttcatcctgcagttcttcgcccacttctcctctctcatctacattgccttcattctgggcaggtatgttccccagccccaagcctgctctctacccaggcccccagggtcttcaggctcatccctcctgtcttgtgtttcttgcctttaaaagtgcccagacttggggctggagagatggctgctcttccaaaggtcctgagttcaattctcagcacccacatgatgcctgatgaccatttagaaagggatccgatgccctcttctggtgtgcaggtgtacacacagcagagcactcgtacaaaaaatgaatgaatgaatgcagcagagcactcatatattacatttaaaataaataaacaaacaaataaacaaataaaataaactttttaaaaagtggccagatcttagtcaggcatggtggcacaaacctttaatcctaacactgagctggcagaaagcaggtagatctctgtaaatttgaggccagcctggtctacatgttgagctccaggagagccaagactaaatagagagactctgtctcaaaaaacctaaataagtaagtaaatataagtacatacatacatatatacatatatacatacatacatacatacatacataaaagtggccagaccttgatgctggtgatgtagctcagttgaagagagtgcatgaagccctgtgtttgcctcttgtatgtggtggcattctcttgtaatttcagaactcaatcattggagtgagcctttggtcagcctaagaccctgcattaaaaagaaaaagttcccccttcagcagcccgtgtactaaaattggaacaatacacacaagataagcatgggccttctgtaagcatgacatgcctagagtacttagaaactcaatatagaacacccttggtgaccctcagccttagaagggacatgagccagcgtggtgggtcttgttgtttgttcatgtttaccaactgcttaggtagctttgctatgtcagcaatcagactgatgtttctgtgttgtttttttttaaagatttatttatttatatttatttatgtatatgagtacactgtagctgtcttcagacacaccagaagagggcatcagatcccattacggatggttgtgagccaccatgtgggtgctgggatttgaactcaggacctctggaagagcagtcagtgctcttaaccactgagccatctctccagccccaggctgaccttttccatggaaacatcctagtggctctgcccagtgtaccatcctctcctcaccttttatggggtgctgcgtttcatgaagaatctacatgaatatcctcttgccttccctatttaaatgaaccgtttttggtgcagtcaatgtacacaagaaaataattgctgctttatttacgtgcttaaatgtcataaggcattcaaacattaccagttagtcgcaaacttcctaccaaccttgcgtccccaccacacctcccagcaagttcagagataccagactccctaaactgtccttggaagtcattcctggcaatttgtccaagctcctaggaagactaggatggcccattaagctggacccacagcattcaaccacttatcttgtccaaagtcccaaagtctttcacatttctccaaaaacaacatagtcaggtcttttttcagcagtaagtagtccactgcctggtacctccttctgctttagttactcttctattgataaaacagcgtaaccatgacaacgtataaacggaagtgcttaatttgacccatggtttcagaggattagagtccatgatggtggagtgaaggaacagttgagagctcacattttggtctacaaccaatgaggcagagagaggggggtgtgaagaggagcctaaccccagtgacttatctcttccaacaaagccataccttctaatccttcccaaaccattcccccaactaaggacacagtattctaatatatgagcctactgggagtgggtaggcattctcattcaaaccatcacactgctactctaccttcccatggtcgcaagatcagggtgctgtccatcttcctcacaggccttgattttctccctaggatcaatggtcaccctgggaaatccacgcgcctggctggcctgtggaagctggaggaggtcagtctgtcctgagacctcattgcccagttcttgaattcccctcctccctcaagccccatccatgaccttcatgttggccccacagtgccatctcagtggctgcatgatggacctgtttatccagatggccatcatcatgggcctgaagcaaaccctgagcaactgcgttgagtacctgtgcccgtgaggacctctttccatcccacttcagcctcccgcagtgcccatccccagtgccctgcagtctttctgtatgttccccatattcttcgtgcccacaggttgttggcccataaatggcgcttaatgtgggcttccaaacatggtcacatgtccaaagacccagaactgaaggagtggcagcgtaactactacatgaatcccatcaacaccttcagcctgtttgatgagttcatggagatgagtgtgtggcgctctgtgggatgggcagatggggtgggtgtgcagggtaaagagtgggtggctggactggacacacagtgagatttttcaccctgcagtgatccagtacggctttaccaccatctttgtggctgctttcccactcgcacccctgttggcgctcttcagcaaccttgtggaaatccgtctggatgccatcaagatggtcagactacagcggcgcctggttcctcgcaaggctaaggacataggtcagagcacacacatattgtacagtggaggagagcagccagggcgctgggaagagcaacttccaatcctgggcttttcaccagcccaggccaggccacgttgaagcaatgtaataactgcagcccctcccattactctagagacatcccttaggttgtcagatatggtaactaagcctcatgggctcaacccctagaaaagggcaggctagaacacacacctgacaaggctctcccatgagcctctgacatgtgtctggagagcttgcagcctccaaggggaccttatggaagagcaggactttgatcacatggaagaatggcggatcagagagcccaagacctcagtcatcctgactttccatagtgagaatgacagacgtcagggaaacagatggcttagttgctagacatggggagaagcagcagggagagcctcagtcctgaggtggggttcaggaattctcacttgggtggggtccaggagataaacaaccagtagaaaagttccaggaagaaggtggggatggggaagcctgagtcctttaccaatccagtctgggagaagagggtgcaaccatactatgtctgccttagctggggatttcccagcagataacttagctcctcccatggctgcgctggggtcacaaacagagataacacgaggctcctggaccagttaggctccaagcttttagggcagaagactaccaatgatcaggactggctgcttcattccacttctgtcattcagggacctggctgcaggtgctagagaccattggagtgctggcagtcattgccaatggaatggttatcgccttcacctctgagttcatccccagggtagtctacaagtaccactatggcccgtgccgaacgaatcggaccttcacagatgagtaaggcgttgaactaacccttccagttaagtccttggagcccagacctggggctctcctgggtataagtgggtgctgccagacctactgggggctgtactgaggctgggacttgactccttgtactgtctacgtggcctgcataccttggctggattctgggaataactgatggacccttgttggaagggaagttggtattgagcaggcagtacctaaatgcctcgcttgctaagttttacgtccctgtcctgtttctggtacgggaaggcaaagcagaaatgtctagctcccactgcacctgcagactgggctctttaggtcaaccctagaagtattcttccagtctgctagggcagactgttgatagcatccccaaaaccccacagcctcccttcactctcccaggggtagccttgtgcttagatagtgggacttttctgatgaaggagaatggaggaggccttccatggtggcttgcccccaaagaccctctaggtgcagaagacttctcagtaagggcctcaggccaagcaaacaccacacttttctttctttagctgcctcacgaactatgtcaaccatagcttgtctgtcttctacaccaaacacttcaatgaccacagcaggatggaaggccaagaaaacgtgaccgtgtgcaggtttggaacctttcatcccccataaacggcctctaaactcctgattcctgacctgggtatttccctactccaggtaccgggactaccgaaatgagcatgactacaacttgtctgagcagttctggttcattttggccatccgactgacctttgttatcctctttgaggtgggtaaattgtgagtgagcctgaggagagggcttattcctcttattcctctttcctagcccccaaatcctaaagattcttcctagccactgaccttgctgggccacgctccctattgcctgcagcattttgccctgtgcatcaaactcattgctgcgtggtttgtgcctgatgtgccccagaaagtgaagaatgaggttctgcaggagaagtatgacagaattcgccatagaatgcggtagggatgtagaggctcacctggctggagcaggtctctgcctggggacaggcctggcctccgacccataccaaccctatccttcctgcagcttcagttccaggagcacggatgtatagacgacctggggcaggtggagaaatgccactttccaggagcctggactaggaataagtccccacctctacagcttgcccctatccataacaatgtgtatgtatgtgttgagggaggctgtaaaatggcccatgtatatgtaggatcctggatggtctacatatatgttaatacatgaagatcaaaggagggcctagactatatgtaggtgtatatgggcatcctacgaagcccatgtgtatatgttaaccacgggagacttgtatatgtagggatcattgaaatccatgtatatttagggtatttatgaacggcacagatgtgcctgtggggtttgcttcaactttcctacggttcagattggtacagacctgacttgagactcttgaatgaccctagtacctatagaactgcaggttgctcataaaacccccatgcagtaaaattagcctaaatgccatggacctcctggcttctgggcctcagatcctgctctgtggcctcctgctttgtgggaagccatggacctcctggcttctgggcctcagatcctgctctgtggcctcctgctttgtgggaagcctagagagtaacttctggatcccctccctcccagttaacctggatccgtacagcggcaaaactttttacaagcaaaataaacctgtgtgtattgatttctgagcctcatgatgtagatccagtttctagagattatttcttccctgggctagattgagatgggatgaattatggcagcctggggccacctggctcttctttggtttgcctcattgtctttggtttttgtttggttggttggttggtttttcaagacagggtttctctctatagccctggctgtcctggaattcactttgtagaccaggctggcctcgaactcagaaatccgcctgcctctgcctcccgagtgctgggattaaaggcatgcgtcaccaccgcccggctttgcctctttgtctaagcgcggggcaccttatggaagaaggttcttccaaatatctggggttttgagtggcaagagaagacacggggtcagttatgagtgggatgtgaatcaagaaagactttctggaggaaaaggaagagtttgggctggagaggcaaaacaccatgacagtcagcagggtggccctttgcgggttgcgctggttgggctcctttggtcaaaccaaaccctgcccctaagccgggaagtttgaagatcccgggacggaacttcctacactcaccagcactagcctcaggcttaaagcgggacactaggtccgccctagccctgcctgcggggcggggctgcacctgccgctgggtctgtcgccgctgcgcacctcggacaggtaaactgtcagcttccgcgcgagtctcaggtgggtggcagtcgtgactcagacacgcggaggtgagtagaggtcctggttcctggagccgctccagttttagggttgaggacctgggagcactttgctccgaggagccttggggccatggtcccgcaggaagtagctctgaaccagacgggtttcccgctcagcccggaagctcgagagcactgcgtccagtccccttctctggccttgctcttttcattctgcccaacatggtcaatagcttcctcttgatttaagtgcaagcctgtagaggcgggcgaggggtcgtaatacctcgccttcgctcccaacaaacgtatctcaaacctaagcaagtctaggacacctgagcagagtgagaggctggcagggacccgggctcgcggggaccctagcagagccttcgcctcctgtgagcgccagcgttcggtgcgcgcccagactagctgtcggcgcgcttccgctctccgtgcgcgtccccatcttctgcacgcgtgcctgataggtcggcttgcctcacctgttgagttccgggaaacaggtcgtgcgccacccgcagaagaccaagggcaagaagtaggagctggatgaactcggggaattggtctcctcgaggccttttatgcacactcctttctttaaagaaagatatgtggggatccaacacacaccagaaacaggggcggcgcaagagtagcgctgagcagcacccaggtgtcgagatgctgagcagcaaaaaaccggatccacaagtggggagcgggcctggggcttcgagctccgaagctccagaacactcactcatctgatagcacaggatgcccctatagctcaaggactgtgcctccaggacctgggccttccaggaacctcaaaatacggaggcaatgctgagtgatccgagggtctaggctgggatttaaattctgaggccctggagtgccttcaaaagactgcagaggcaaatatctgaggccatctgagtttttatgcaagagtggcctgaggctggggtatgggatagaacagtggttctcaaccttcctttaatacagttcttgttgtggtgactcccaaccataaagttatttttgttgctacttcataactaattttgctactgttatgaagctgcaactctttaatctttaatacaattccccatgttgtggtgacccccaaccataaggttatttttttttcttttttttggggggggggttcgagacaggatttctctgtgtatccctggctgtcctggaactcactttgtagaccaggctggccttgaactcagaaatccgcctgcctctgcctcccaagtgctgggattaaaggcttgggccaccacagccaggcttcataagattattttcattgctgcttcataactgcaattttgctacaaaatttgattttgatacaaattcattgttatgaatttacaattcataacagtagtaaagttacaatactgggctggtgggatggctcagcaggttgctcttctgaaggtcctgagttcaaatcccagcagccaaatggtggctcacaaccatctgtaatgagatctgatgccctcttctggtgtgtctgaaggcagctacagtgtacttatgtataataataaataaatctaaaaaaaaaattacaatcctgaccccacggattgagaacctgctgggatagagggtggtagatgttagcagacaggaaaggagaacagtattgacccaagattctgtgaggatgacattaatttcttgattcacaacatgggaaacacagccagttactgtgcatgggatgttcaggaggccgagacggcttcaggcagcaaacggatccataagtgtagaggaagggcatctgttcccttcagcctttccaggcttgagccaaaagcgctccatcacccagtgatcatgaatgccaggccaggggggtgggggtgggggtggggggccacttgagcagggttgggtcatagtccaggtaaggtgccagggaagactgcttctgcactgagcatgctcctggattggagatgcttctgggtgacctgaaccagaggcaggaaggtcccaggagatttccaggacatactcctgtagctatgattgtgaagggagagtcaggaactagagaagacccttgtttaagtctgtaaatactgctactaagtcccaaggctcaaataaatctagtgggaggtggggagcgtgggggggtggagagacataggtagcaataggagaaatcagctaacttctcccctgtcccacagctgagccaggggcttgtggcttttgtgttttggcacatgaaaggggctctgctgactgaaggaaaggccatccagagactgccccaccttgagatcatcccatctgcagacaccaaacctcaacgctattgctggtaccaagacgtgctcctagatgggagcctagcatgtctgacctgagaggctatgccagcatctgactaagacagatgcagatacagcaaccatcagactgagcctggggaccccaatggaagagttaagggaaggaataaaggagccgaaggggattgtaaccccataggaagaaaaacgatgtcaactaacctgactactcagagctcccagggactaaacaggcaaccacaaagtatacatggatgggtccatggctccagctatatatgtagcagaggatgaccttatctggcatcaatgggaggggaggcccttggttctgtggaagctcgatgtcccagcatagggggatgctagaggggtggggtgggagtaggtgggtgggtgggggaccactttcttaaaggcnnnnnnnnnnnnnnnnnnnntaaataattaaaagaagaaagaaagaaaatgggctttgctatctcatgccagccctaagctaacatctgagagatattgtagcctccacagctattcacgcctcccagtcatttgcctggtaggtggacagggtaaggatcagagaaaaacgccctaggtttcattattggtcacccgtttctgagagatcccctttgccacagtaggtcagaggtgagtcatggatggggctttttattgttgtcgttgttggagggtgcagatagcataattctttctctctactcatgagaatataataaatgagagtgttaccaggctgggtacacacctttaatcccagcaatcaagagacagaggcaggcggaactctctgaggtccaggccagcctggtctacatagatagttccaggtcaaccaagactacatagcaagaccttgtgtccaaaaaggtgtgtgtgggtgggggtggaatctaggaggcacgcctcctgcccagcttgtcttccttttgtatgtttaggatgactctggctggggatctccttgccaggatctctgcacatcaccctagcctctgccacctggagtagccacttccaccctagtacaggaacaaatgtagtgcttagggacaagggcggcccccagaggaaggggccttcttattcagagttacaggaagagccaggcaaggcggggcaaagaccgccaacagcccgcccccgccaggggaaggggtgggtacctgggtggggtttgggtttaggagaggatgtgactgcaaggccaggaaactaagggggaaagttctgactaaaatacatatcaacaaaagcctggtcctcgcccaagcttggtgatgcattgtgggtagccacaatactgtggctcctctctggggcccagctgaggggacagtttgctcccaagtgtatgctactgacctcaatggccatctcccttctaaaggaaagatccggaaccaggtgactgtgctctccctattgctctgagtgatcctgtggccttgtggtctgccctgggaggtaggcttgcctaaggagagggccgtggccctgaggtgcatgaaagcacactggggtgtgtgtgtgtgtgtgtgaagtgtgtgtgtgtgtgtgtgtgtgtgtgtgtgtgtgtgagagagagagagaagtgtgtgtgtgtataagtgtgtgtgtaggtgtatgcatgatgcacgggtatacttgtggcccctgaggtgtttaggagcgagtctgtgaggtgaggtgcatgcagcccaaaccctgtgggaaaggcagggttgtagagaacatccatgcgtgcacgttggcaaaggtgaactcagcatggctgagtggggtgggagagggggtgtgcatgcacagaatgtgaaagagaaggggacacctgctgcttcagtgagtcacatcctggaagcttggtcttgactgctggcagtctctgtggctgcctttgcaggggtcaagatcttctgagctggaggaggttgagggctatggccggatgtctaggatctgctgggctcgggtatgtcccctggtcactctgagggggtcagctgagtagctttggtgggtagttcagcttctggaattgtagtaggactccccattcactccaaagagttcctggaaggattaccttgcctccctgacagtaatgtgcctcttgccgggctagcccccaggcctgaggtttctggctgagcattacccagtgcagaacaagggagtcagagtaagagactcattctcattaaagcttctgcggccttaggtagaggagggacatctgaggcaggccaggcccagggtcttggggcttgaccccatgttcctgctggcccacgtgtctgtgtgacatgaaggagagtagaactcaatgaatgcttgttgcatgaccttggacacccaggaaagagggatcacctagggccctgggctgctaaagcaaagctcttggatgcttcctgccctcatggcactacagagctctttgaatcccgggtgtgtataactgctgtgggctgagaatggcccagagccctaggaaggagtcatctatgtttcgggttccgagaaggagttcccaaggcccttcggagtggcctctataccagcctggttcccatttaccttctcctggcccagatgagcctcagggcgtccacaggtgtgatgtgtccattcacatgtgcatgtgtgactgcatccaggatctcacagttagggttcacttatgcctcatatccccttaatctccaggtcctggccaggtgacaagcacccatgcacccacctgcatacagcaatccatccattacaggggacagccaggaatgaggctaactgctctctcctgaggtcagatccttcttggagcatgtctgctgtggccctgagtcaccacagtggccacaggacatgtgaaggtggtccatgggcctgcccccttccaaaccgtgtgaggcagaatctgctctgtgcttgtgagatctgggagctcacccagaactccgagactggccaaggttgcaaggcaagctctctggtgtgcagccagtactgctggtggctgacagttactggttaactcatcctgttcctgtttaacttgtcccctggggatggtggcagcctctgacctccaggacctcctgtccgtctggctgaatctacagaaaggagcccttctcagcctgcagtggaccccatctgctcggttaaggagccacggcggtgccagggagggaaaccagcgtttggcctgccgtgaagaggtcccagaagagccatggcaggtaggcaagccagagagggctaggacaaagtctccaccccaatttctgaccgtcaggctggccccgcattgctctctctctgtgcttggatacaggccagagggcaaagcctaggctcgtcccttccttccagtagtcggttctgaactcagggcagtgatgaaagcctctactgcaccccccccccccccgccccgcccaaggcctccagatgagccatgcaggaatcaataaacctaggaatcttaatgaggtcctgggggtgtgagtgtgaaatgaagtagtgcggggtgcctctccagcctcctgccagggtcacagttttactaaaagatgggaagagttcggcctcagagaagtaggagggcagtctgtggccagtagatgggattcctggaagcccagactctggcttgccctgtctctgtggaagaagttcgaacgctatatgtattctttcaacctttggtacccacagtccctgtaggtcttcagtagaagcctgaaggatgagggaggcaggagctggctctactctgacggggtagtatggagcctggactcgtgtctaccagggataaaccaacagatgggctccgctggctgggctggctcagctcacttatgactctggccactcccctttctgttaatgttccccctgagcacaaggctgtcacatgagggccagcagaacacaactgcccactgctgaggaaagaatgcaagcccgggctcttgcctgtaggactcatgatggatgttgtgtgatcactgttgtgtgcccattgcaagtgtttttagagcatctgtggatagcatggcagtaggctgacctgttgtactctttctgcaggtgtctgtgacatggcccctaatttcctttccccatctgaagaccaggccttgggtcttgcccttggcagagaagttgctttgaattgcacagcttgggtgttctctaggccccagtgtccccagccatcagtgcagtggctgaaagatggtctggcattgggcaatggaagccacttcagcctccatgaggacttctggtaagaaggcatccaggattagagtaaccactgggatacacccatggccagcctttctgacctacacccttaactctaacaccatgagtgaaggcgatgtattacttatgcaaatctgacatggccaactatctccatgaccacagatagagggttgactctgggtctttgtttattcatgtatcttgtagactgtctgggcatagaattcttagtctataatggttcattgactagctaagcctgtaaccaaaggatccccatgacgtaggcccaaattctgtccacttagcctaaatctgcaatctctccctggatgaatctcagacaggtgggacttgggcatccccccaatgttcttggttcccaggtaaggatttggcctggttttcccagggtcagcgccaacttctcagagattgtgtccagtgtcctggtgctcaacttgaccaatgcagaggactatggaaccttcacctgttctgtctggaatgtcagctcccattccttcactctttggcgagctggtgagggagttcaaggtggtggagggcaagggcttcctgtagtcctaacattaaaggagtagtggttctccctgtctgcaggccctgctggccatgtggctgcagtactggcttccctcctggtcctggtggttctgctgctggtggccctgctctatgttaagtgtcggctgaacatgctgctttggtaccaagacacttacggggaggtggagatgaacggtatgtgggtttctgcatggattagggcacaggtttcagccaagggcctagctgcaagccgggttcagtcctaggtggagggagttgtagctgtagagggatctaggtgttcagaggcagtggaaaggcagtgtctcagaagggcacaggactggggtcaaccgaaggaagagacatgttcagagaagtgctgaacatggactagaggtgcctctttaactggccctgctgactggctttctctacagatgggaagttatacgatgcctacgtgtcctatagcgactgcccagaggaccgcaaatttgtaaattttattctgaagcctcagttggagcggcgtcggggatacaaactcttcctagaggaccgcgacctcttgcctcgcgcgggtaccgcccaagtcctgcctcctggtccctactctgttccctgagtcccgcccttgtcactggccccgcctctcacccgtcctcccacgcccttgcctacagagccctctgccgaccttttggtgaacctgagtcgctgtcggcgtctcatcgtggttctttcagatgccttcctaagccggccctggtgtagccagagcttccggtgcgttgggctgttggcttgggatgggggaccaggagacctatcctgcccctcctgacagtccggtcttttcagggagggactgtgccgcctactggagctcacccgcagacctatcttcatcacctttgagggccagaggcgtgagcccatacaccctgctctccggctcctgcgccagcaccgccacctcgtgaccctggtgctttggaagcctggctccgtggtgcgagggctgggggcgggaggggagttgtgcctgagatgctggagggctgggggacctgcgagtcagccaagggcagtgctatttgggcctgggtggctagaggcttcctgtttatagatccctatgtgtttatactttctgtccaaacctggcccccagactccttcctctgatttttggaaagagctacagctagcactgccacggaaggtgcagtacaggccggtggagggagaccctcaaacccgacttcaggatgacaaagatcccatgctaatcgtgagaggacgtgctgcccagggccggggcatggagtcagagctggatccagaccctgagggagacctgggtatgctcactgcagatcaaggggtcaaacacagctccagcgtcctggaaaggactcaggcttggaggactctggcatcgagagatcctgtctcctaaggaggtttgacctccacagacagtggccctcagtgcctctttctgaggaggtgttttgctcctaggcttctgtaggggaactttcagggcctctagtgtctttgtggctgatgggtgagcatacagtaaccccctctggtcacagatcctagtagaagactggctgtcgatcttggagcctcaggccttgtggtatcctgcaggtgtccgtggacctgtctttggggagccaccaactccactgcaggaaaccaggatctgcataggagagagccacggcagtgaaatggatgtctctgacctcggctctcgaaactacagtgcacggacagacttctactgcctcgtgtctgaggatgatgtgtagcccatatcccagcagcccagaccatgagatcacggtggcagcttccagggtagaggcagcaggcactccttcctaggatcacaacccttgcctctatccctgggcccctcaggaaaggagtgtggccccagggtgtcacaaaataaaatcctgttggttc

SEQ ID NO: 445 - DNA, 2959 bp, Mus musculus
cagcatccagagccccacattgaccgagggaccagccaccagcatgcaggatgatgagagttcccagatctttatggggccagaaggggaccagttgccattggtggaaatgggcagttgtaagcctgaggcctctgatcaatgggactgtgtcctggtggctgacctccagaccctgaaaatccagaagcatgctcagaagcaactgcagttcctagaaaacctcgagagcaatggcttccacttcaagatgttaaaggaccagaagaaggtgttctttgggatccgagctgacagtgacgtcattgacaagtaccggactctcctcatgaatcctgaagattctggctccagagacgagcagagcttcaacatagctaccacaagattcttgggtttcagaatccgaattgtgagctttgtcgtgaacaacaagctaaaacctggtgacacctttgaggacctggtgaaggatggggtttttgagaccatgtttcttctgcacaaggtactgaggccaatggggagggtggccttgatggggaagctttcccacagggaatactttggcgagaaggtggctctgtacttcacctggcttggctggtacacctacatgctggtgcctgcggctgtggtgggcctcatcgtctttctgagtggctttgccctgtttgattccagccagatcagcaaagagatctgtagtgccaatgatatcttcatgtgccctcttggcgaccacagtcacagatacctgcgactctcagagatgtgcactttcgcaaagctcactcatctctttgacaacgagggcaccgtgctatttgccatcttcatggcactgtgggctacggtcttcctggagatctggaagcgaaagcgtgcccatgaagtccagagctggaaactgtatgaatgggatgaggaagaggaagagatggcccttgagctcattaactctccgcactataagctgaaagaccaccgtcactcctacctgagcagcaccatcatcctgatcctgtccctgttcatggtacttccgggagctgtgatctgtttaatgattggcatggctcatgtgctggttgtctaccgtgtgctggctggagccctcttcagcagcctcgtgaagcagcaggtgaccaccgctgtggtggtgactggggcagtggtacattatataatcattgtcatcatgactaagacaagatggccatgtctcattccagaggaatccgggaccttctcagagcaagagaggaagttcactgtcaagtttttcatcctgcagttcttcgcccacttctcctctctcatctacattgccttcattctgggcaggatcaatggtcaccctgggaaatccacgcgcctggctggcctgtggaagctggaggagtgccatctcagtggctgcatgatggacctgtttatccagatggccatcatcatgggcctgaagcaaaccctgagcaactgcgttgagtacctgtgcccgttgttggcccataaatggcgcttaatgtgggcttccaaacatggtcacatgtccaaagacccagaactgaaggagtggcagcgtaactactacatgaatcccatcaacaccttcagcctgtttgatgagttcatggagatgatgatccagtacggctttaccaccatctttgtggctgctttcccactcgcacccctgttggcgctcttcagcaaccttgtggaaatccgtctggatgccatcaagatggtcagactacagcggcgcctggttcctcgcaaggctaaggacatagggacctggctgcaggtgctagagaccattggagtgctggcagtcattgccaatggaatggttatcgccttcacctctgagttcatccccagggtagtctacaagtaccactatggcccgtgccgaacgaatcggaccttcacagatgactgcctcacgaactatgtcaaccatagcttgtctgtcttctacaccaaacacttcaatgaccacagcaggatggaaggccaagaaaacgtgaccgtgtgcaggtaccgggactaccgaaatgagcatgactacaacttgtctgagcagttctggttcattttggccatccgactgacctttgttatcctctttgagcattttgccctgtgcatcaaactcattgctgcgtggtttgtgcctgatgtgccccagaaagtgaagaatgaggttctgcaggagaagtatgacagaattcgccatagaatgcgcttcagttccaggagcacggatgtatagacgacctggggcaggtggagaaatgccactttccaggagcctggactaggaataagtccccacctctacagcttgcccctatccataacaatgtgtatgtatgtgttgagggaggctgtaaaatggcccatgtatatgtaggatcctggatggtctacatatatgttaatacatgaagatcaaaggagggcctagactatatgtaggtgtatatgggcatcctacgaagcccatgtgtatatgttaaccacgggagacttgtatatgtagggatcattgaaatccatgtatatttagggtatttatgaacggcacagatgtgcctgtggggtttgcttcaactttcctacggttcagattggtacagacctgacttgagactcttgaatgaccctagtacctatagaactgcaggttgctcataaaacccccatgcagtaaaattagcctaaatgccatggacctcctggcttctgggcctcagatcctgctctgtggcctcctgctttgtgggaagccatggacctcctggcttctgggcctcagatcctgctctgtggcctcctgctttgtgggaagcctagagagtaacttctggatcccctccctcccagttaacctggatccgtacagcggcaaaactttttacaagcaaaataaacctgtgtgtattga

SEQ ID NO: 446 - protein, 756 aa, Mus musculus
SIQSPTLTEGPATSMQDDESSQIFMGPEGDQLPLVEMGSCKPEASDQWDCVLVADLQTLKIQKHAQKQLQFLENLESNGFHFKMLKDQKKVFFGIRADSDVIDKYRTLLMNPEDSGSRDEQSFNIATTRFLGFRIRIVSFVVNNKLKPGDTFEDLVKDGVFETMFLLHKVLRPMGRVMGKLSHREYFGEKVYFTWLGWYTYMLVPAAVVGLIVFLSGFALFDSSQISKEICSANDIFMCPLGDHSHRYLRLSEMCTFAKLTHLFDNEGTVLFAIFMALWATVFLEIWKRKRAHEVQSWKLYEWDEEEEEMALELINSPHYKLKDHRHSYLSSTIILILSLFMVLPGAVICLMIGMAHVLVVYRVLAGALFSSLVKQQVTTAVVVTGAVVHYIIIVIMTKTRWPCLIPEESGTFSEQERKFTVKFFILQFFAHFSSLIYIAFILGRINGHPGKSTRLAGLWKLEECHLSGCMMDLFIQMAIIMGLKQTLSNCVEYLCPLLAHKWRLMWASKHGHMSKDPELKEWQRNYYMNPINTFSLFDEFMEMMIQYGFTTIFVAAFPLAPLLALFSNLVEIRLDAIKMVRLQRRLVPRKAKDIGTWLQVLETIGVLAVIANGMVIAFTSEFIPRVVYKYHYGPCRTNRTFTDDCLTNYVNHSLSVFYTKHFNDHSRMEGQENVTVCRYRDYRNEHDYNLSEQFWFILAIRLTFVILFEHFALCIKLIAAWFVPDVPQKVKNEVLQEKYDRIRHRMRFSSRSTDV

SEQ ID NO: 447 - DNA, 28448 bp, Homo sapiens
  misc_feature (1)...(28448): n = A, C, G or T/U
atgcttctgcaaagctgaagtaccaaggactgagtccctggactcagtttccgtaggtgccgagtgctgagtcaccaggagtagtagctaccaagtcctccttggaggtgctgagtgctgagtccctgggaggtgctgactgctgagtcccagacaccaactgcaccctgattctcagggcgtgcccacacatgttctttctcccgggaatgctgcccccattttctcaccttttgccaacctcttgccctacaatgccaagctccatgcctcctcacctgccaagtaggcccccgcccctgcgtccacgaacgccacgcactgcctgggagggctgcacgcaggtcgctccgtcagtgtctggggatggacgggcacacggatgggtgaactgacagatgacagactggacagctggaggggccggggggtgggcagaagactggcttcaggagcgcagagccagctggggagggtttgctcagaggatgcgtgggctgggcagaggcgagacgctgtggctcacaaggtgggcctctccatgcttgggactgcggtggggcagaaggggaccctctgtggatgacgaaactgtaaagttctcaagggccagatcccagagggctcagggcaccggccaagaggcttgacgtgacctcaggaggagatgaggcccaaacaccttcccatgcacagctggggggatgtgcgtcgtgggaccccctggccaggcctgctccttctcatgcacagctggggggatgtgcgtcatgggaccccctggccaggcctctcaggagtagggtggggtcatatctgcacaaccatctcctctgcctgcccccaacctggaggctggactgggaagaggatggatgggcaggacccccagctctgtcctcacactccagcccttgggagggagggtctcctgcaggctacagtgtctccagaagcttcctcactgggaaccaggggcttgcccactggacgctggcctatgcccacaatgggggtgccaagagccccccacaaactccctggggccctggagtactgggtgtgtcacctgtgagggctgtgggacaggaaggatgggggagaacagtgtgtggttctgtccaccttcttcctgtgtctgcacgtcgctgaggtgacctgggggctggggtgaggacaccctgttgtacagacgaggaaactgaggcctggggtgtttcggtggcgtcagagctagggcctggccggctgtccacccagagccggcctccctctctgggtttgcagatggcaaggctggctgaagcttcagaggccctcagactgagtgtgtagggacagcccctgtccctaccctgggagctggaagcctgtgggcccatacatagtttcccggaggtggggcccatggactggggacatgggggtcccagacatctcactgtggataaaccgaacagtctgcatggctggaagtggaggtgacttcaggtggtccagccctcacctgtgaagaccccgagggtggtgtggagaagccaggctcccgtggtccgtaaacactggccctggagacggatggacagatggatggcctggtcctgtaggctggtggctgtggcccgggggatgggccggtgggtgtggctccgtaaacactggccctggagacggatggacagatggacggcccggtcctggaggctggtgggcccagtgttctgcagcagagtctcggagcctgaggcctgtctggctgtgtgtgttgggggggctacacctgcctggctgtgtgtgtcggggggtggctacacctgtctggctgtgtgtgtcaggggggctacacctatctggctgtgtgagtcgggggggggctacacctgtctggctgtgtgtgttggggggactccacctgtctggctgtgtgtgtcggcgggggctacacctggcagccctagtgcttctgccttgtccgagggagcagctaagggcagccaggggctggcacgccccaggtgtgcgtgtagctctgccctggggggagggctcccctgtcagcccacgtcagtgatgggggctttgcaccccattccccaggggaggctgatcctgctgtttgcagaggcgtggggtcatcaccccagtgctgcacggtgtctttggtggggagggggtttctgtgcctcatttctggggtgaacgatggcttcccacccccacctttgagaatgttccccagggacagtcccctctcccaggcttctccgaaagtcctgcctggtcctggggtcccctgcctcgtcccttccttctcaggggtctgggcttatcctgccggctttcaactttcggcccaggctgatgtgagggggtctctaatttcagcctctgccagaggagctggggttctgggcagaggagggaccctcatcctgggtctgaagccaggcatgtgaggggccattctcccatgaatccctccaacacaacacttcccgggcccctacggaggcaagctgcagagctggagccgtgatgcccacgtcccccagaccaccagtcccccccagggaggctgccctctgcgctgagacagaggtgcctctcctgcctgggcaggtgccacgccccttcctgcatatctgtcggaggatgaaggtttctcctctaacccaggacgggggagaagtttcagtgtggcaggccacgcctgagtgcaggtatctgtccgtgggctgtcgggaaggccaaggagggagtcagaggaagggttgattgaggcaggaagaactactggtctaggataggacagaagggccaggtgagccccgtgggccaactagggcaagaacttccccccgcagggaggctgcagtgtggcactgggtgctcagatggtgtctacctgagcccatctccctgtgaccggggcgtcggatgccttagtgcagtgctccccaaccttttcagcaccagggaccagtttcgcagaagacaattttcccacagctgtgggtgtggtgggatggttttgggatgaaatcgtctcacctcagatcatcaggcattagattctcataaggagcagccgagatccctgcatgcgcagtgcacaatggggttcttcctcctcctcctgtgaggatctaatgccgccgctgatctgatgggacgtggagcccaggtgggaacattcacccccggctcaccctccgctcaccccccgctcaccccccgctcatctccagctcactccccgctcacctcccgctcacccactgctcaccccctgctcacccccagctcactccctgctcaccccctgcttactgcnnnnnnnnnnnnnnnnnnnnnnnnnnnnnnnnnnnnnnnnnnnnnnnnnnnnnnnnnnnnnnnnnnnnnnnnnnnnnnnnnnnnnnnnnnnnnnnnnnnnnnnnnnnnnnnnnnnnnnnnnnnnnnnnnnnnnnnnnnnnnnnnnnnnnnnnnnnnnnnnnnnnnnnnnnnnnnnnnnnnnnnnnnnnnnnnnnnnnnnnnnnnnnnnnnnnnnnnnnnnnnnnnnnnnnnnnnnnnnnnnnnnnnnnnnnnnnnnnnnnnnnnnnnnnnnnnnnnnnnnnnnnnnnnnnnnnnnnnnnnnnnnnnnnnnnnnnnnnnnnnnnnnnnnnnnnnnnnnnnnnnnnnnnnnnnnnnnnnnnnnnnnnnnnnnnnnnnnnnnnnnnnnnnnnnnnnnnnnnnnnnnnnnnnnnnnnnnnnnnnnnnnnnnnnnnnnnnnnnnnnnnnnnnnnnnnnnnnnnnnnnnnnnnnnnnnnnnnnnnnnnnnnnnnnnnnnnnnnnnnnnnnnnnnnnnnnnnnnnnnnnnnnnnnnnnnnnnnnnnnnnnnnnnnnnnnnnnnnnnnnnnnnnnnnnnnnnnnnnnnnnnnnnnnnnnnnnnnnnnnnnnnnnnnnnnnnnnnnnnnnnnnnnnnnnnnnnnnnnnnnnnnnnnnnnnnnnnnnnnnnnnnnnnnnnnnnnnnnnnnnnnnnnnnnnnnnnnnnnnnnnnnnnnnnnnnnnnnnnnnnnnnnnnnnnnnnnnnnnnnnnnnnnnnnnnnnnnnnnnnnnnnnnnnnnnnnnnnnnnnnnnnnnnnnnnnnnnnnnnnnnnnnnnnnnnnnnnnnnnnnnnnnnnnnnnnnnnnnnnnnnnnnnnnnnnnnnnnnnnnnnnnnnnnnnnnnnnnnnnnnnnnnnnnnnnnnnnnnnnnnnnnnnnnnnnnnnnnnnnnnnnnnnnnnnnnnnnnnnnnnnnnnnnnnnnnnnnnnnnnnnnnnnnnnnnnnnnnnnnnnnnnnnnnnnnnnnnnnnnnnnnnnnnnnnnnnnnnnnnnnnnnnnnnnnnnnnnnnnnnnnnnnnnnnnnnnnnnnnnnnnnnnnnnnnnnnnnnnnnnnnnnnnnnnnnnnnnnnnnnnnnnnnnnnnnnnnnnnnnnnnnnnnnnnnnnnnnnnnnnnnnnnnnnnnnnnnnnnnnnnnnnnnnnnnnnnnnnnnnnnnnnnnnnnnnnnnnnnnnnnnnnnnnnnnnnnnnnnnnnnnnnnnnnnnnnnnnnnnnnnnnnnnnnnnnnnnnnnnnnnnnnnnnnnnnnnnnnnnnnnnnnnnnnnnnnnnnnnnnnnnnnnnnnnnnnnnnnnnnnnnnnnnnnnnnnnnnnnnnnnnnnnnnnnnnnnnnnnnnnnnnnnnnnnnnnnnnnnnnnnnnnnnnnnnnnnnnnnnnnnnnnnnnnnnnnnnnnnnnnnnnnnnnnnnnnnnnnnnnnnnnnnnnnnnnnnnnnnnnnnnnnnnnnnnnnnnnnnnnnnnnnnnnnnnnnnnnnnnnnnnnnnnnnnnnnnnnnnnnnnnnnnnnnnnnnnnnnnnnnnnnnnnnnnnnnnnnnnnnnnnnnnnnnnnnnnnnnnnnnnnnnnnnnnnnnnnnnnnnnnnnnnnnnnnnnnnnnnnnnnnnnnnnnnnnnnnnnnnnnnnnnnnnnnnnnnnnnnnnnnnnnnnnnnnnnnnnnnnnnnnnnnnnnnnnnnnnnnnnnnnnnnnnnnnnnnnnnnnnnnnnnnnnnnnnnnnnnnnnnnnnnnnnnnnnnnnnnnnnnnnnnnnnnnnnnnnnnnnnnnnnnnnnnnnnnnnnnnnnnnnnnnnnnnnnnnnnnnnnnnnnnnnnnnnnnnnnnnnnnnnnnnnnnnnnnnnnnnnnnnnnnnnnnnnnnnnnnnnnnnnnnnnnnnnnnnnnnnnnnnnnnnnnnnnnnnnnnnnnnnnnnnnnnnnnnnnnnnnnnnnnnnnnnnnnnnnnnnnnnnnnnnnnnnnnnnnnnnnnnnnnnnnnnnnnnnnnnnnnnnnnnnnnnnnnnnnnnnnnnnnnnnnnnnnnnnnnnnnnnnnnnnnnnnnnnnnnnnnnnnnnnnnnnnnnnnnnnnnnnnnnnnnnnnnnnnnnnnnnnnnnnnnnnnnnnnnnnnnnnnnnnnnnnnnnnnnnnnnnnnnnnnnnnnnnnnnnnnnnnnnnnnnnnnnnnnnnnnnnnnnnnnnnnnnnnnnnnnnnnnnnnnnnnnnnnnnnnnnnnnnnnnnnnnnnnnnnnnnnnnnnnnnnnnnnnnnnnnnnnnnnnnnnnnnnnnnnnnnnnnnnnnnnnnnnnnnnnnnnnnnnnnnnnnnnnnnnnnnnnnnnnnnnnnnnnnnnnnnnnnnnnnnnnnnnnnnnnnnnnnnnnnnnnnnnnnnnnnnnnnnnnnnnnnnnnnnnnnnnnnnnnnnnnnnnnnnnnnnnnnnnnnnnnnnnnnnnnnnnnnnnnnnnnnnnnnnnnnnnnnnnnnnnnnnnnnnnnnnnnnnnnnnnnnnnnnnnnnnnnnnnnnnnnnnnnnnnnnnnnnnnnnnnnnnnnnnnnnnnnnnnnnnnnnnnnnnnnnnnnnnnnnnnnnnnnnnnnnnnnnnnnnnnnnnnnnnnnnnnnnnnnnnnnnnnnnnnnnnnnnnnnnnnnnnnnnnnnnnnnnnnnnnnnnnnnnnnnnnnnnnnnnnnnnnnnnnnnnnnnnnnnnnnnnnnnnnnnnnnnnnnnnnnnnnnnnnnnnnnnnnnnnnnnnnnnnnnnnnnnnnnnnnnnnnnnnnnnnnnnnnnnnnnnnnnnnnnnnnnnnnnnnnnnnnnnnnnnnnnnnnnnnnnnnnnnnnnnnnnnnnnnnnnnnnnnnnnnnnnnnnnnnnnnnnnnnnnnnnnnnnnnnnnnnnnnnnnnnnnnnnnnnnnnnnnnnnnnnnnnnnnnnnnnnnnnnnnnnnnnnnnnnnnnnnnnnnnnnnnnnnnnnnnnnnnnnnnnnnnnnnnnnnnnnnnnnnnnnnnnnnnnnnnnnnnnnnnnnnnnnnnnnnnnnnnnnnnnnnnnnnnnnnnnnnnnnnnnnnnnnnnnnnnnnnnnnnnnnnnnnnnnnnnnnnnnnnnnnnnnnnnnnnnnnnnnnnnnnnnnnnnnnnnnnnnnnnnnnnnnnnnnnnnnnnnnnnnnnnnnnnnnnnnnnnnnnnnnnnnnnnnnnnnnnnnnnnnnnnnnnnnnnnnnnnnnnnnnnnnnnnnnnnnnnnnnnnnnnnnnnnnnnnnnnnnnnnnnnnnnnnnnnnnnnnnnnnnnnnnnnnnnnnnnnnnnnnnnnnnnnnnnnnnnnnnnnnnnnnnnnnnnnnnnnnnnnnnnnnnnnnnnnnnnnnnnnnnnnnnnnnnnnnnnnnnnnnnnnnnnnnnnnnnnnnnnnnnnnnnnnnnnnnnnnnnnnnnnnnnnnnnnnnnnnnnnnnnnnnnnnnnnnnnnnnnnnnnnnnnnnnnnnnnnnnnnnnnnnnnnnnnnnnnnnnnnnnnnnnnnnnnnnnnnnnnnnnnnnnnnnnnnnnnnnnnnnnnnnnnnnnnnnnnnnnnnnnnnnnnnnnnnnnnnnnnnnnnnnnnnnnnnnnnnnnnnnnnnnnnnnnnnnnnnnnnnnnnnnnnnnnnnnnnnnnnnnnnnnnnnnnnnnnnnnnnnnnnnnnnnnnnnnnnnnnnnnnnnnnnnnnnnnnnnnnnnnnnnnnnnnnnnnnnnnnnnnnnnnnnnnnnnnnnnnnnnnnnnnnnnnnnnnnnnnnnnnnnnnnnnnnnnnnnnnnnnnnnnnnnnnnnnnnnnnnnnnnnnnnnnnnnnnnnnnnnnnnnnnnnnnnnnnnnnnnnnnnnnnnnnnnnnnnnnnnnnnnnnnnnnnnnnnnnnnnnnnnnnnnnnnnnnnnnnnnnnnnnnnnnnnnnnnnnnnnnnnnnnnnnnnnnnnnnnnnnnnnnnnnnnnnnnnnnnnnnnnnnnnnnnnnnnnnnnnnnnnnnnnnnnnnnnnnnnnnnnnnnnnnnnnnnnnnnnnnnnnnnnnnnnnnnnnnnnnnnnnnnnnnnnnnnnnnnnnnnnnnnnnnnnnnnnnnnnnnnnnnnnnnnnnnnnnnnnnnnnnnnnnnnnnnnnnnnnnnnnnnnnnnnnnnnnnnnnnnnnnnnnnnnnnnnnnnnnnnnnnnnnnnnnnnnnnnnnnnnnnnnnnnnnnnnnnnnnnnnnnnnnnnnnnnnnnnnnnnnnnnnnnnnnnnnnnnnnnnnnnnnnnnnnnnnnnnnnnnnnnnnnnnnnnnnnnnnnnnnnnnnnnnnnnnnnnnnnnnnnnnnnnnnnnnnnnnnnnnnnnnnnnnnnnnnnnnnnnnnnnnnnnnnnnnnnnnnnnnnnnnnnnnnnnnnnnnnnnnnnnnnnnnnnnnnnnnnnnnnnnnnnnnnnnnnnnnnnnnnnnnnnnnnnnnnnnnnnnnnnnnnnnnnnnnnnnnnnnnnnnnnnnnnnnnnnnnnnnnnnnnnnnnnnnnnnnnnnnnnnnnnnnnnnnnnnnnnnnnnnnnnnnnnnnnnnnnnnnnnnnnnnnnnnnnnnnnnnnnnnnnnnnnnnnnnnnnnnnnnnnnnnnnnnnnnnnnnnnnnnnnnnnnnnnnnnnnnnnnnnnnnnnnnnnnnnnnnnnnnnnnnnnnnnnnnnnnnnnnnnnnnnnnnnnnnnnnnnnnnnnnnnnnnnnnnnnnnnnnnnnnnnnnnnnnnnnnnnnnnnnnnnnnnnnnnnnnnnnnnnnnnnnnnnnnnnnnnnnnnnnnnnnnnnnnnnnnnnnnnnnnnnnnnnnnnnnnnnnnnnnnnnnnnnnnnnnnnnnnnnnnnnnnnnnnnnnnnnnnnnnnnnnnnnnnnnnnnnnnnnnnnnnnnnnnnnnnnnnnnnnnnnnnnnnnnnnnnnnnnnnnnnnnnnnnnnnnnnnnnnnnnnnnnnnnnnnnnnnnnnnnnnnnnnnnnnnnnnnnnnnnnnnnnnnnnnnnnnnnnnnnnnnnnnnnnnnnnnnnnnnnnnnnnnnnnnnnnnnnnnnnnnnnnnnnnnnnnnnnnnnnnnnnnnnnnnnnnnnnnnnnnnnnnnnnnnnnnnnnnnnnnnnnnnnnnnnnnnnnnnnnnnnnnnnnnnnnnnnnnnnnnnnnnnnnnnnnnnnnnnnnnnnnnnnnnnnnnnnnnnnnnnnnnnnnnnnnnnnnnnnnnnnnnnnnnnnnnnnnnnnnnnnnnnnnnnnnnnnnnnnnnnnnnnnnnnnnnnnnnnnnnnnnnnnnnnnnnnnnnnnnnnnnnnnnnnnnnnnnnnnnnnnnnnnnnnnnnnnnnnnnnnnnnnnnnnnnnnnnnnnnnnnnnnnnnnnnnnnnnnnnnnnnnnnnnnnnnnnnnnnnnnnnnnnnnnnnnnnnnnnnnnnnnnnnnnnnnnnnnnnnnnnnnnnnnnnnnnnnnnnnnnnnnnnnnnnnnnnnnnnnnnnnnnnnnnnnnnnnnnnnnnnnnnnnnnnnnnnnnnnnnnnnnnnnnnnnnnnnnnnnnnnnnnnnnnnnnnnnnnnnnnnnnnnnnnnnnnnnnnnnnnnnnnnnnnnnnnnnnnnnnnnnnnnnnnnnnnnnnnnnnnnnnnnnnnnnnnnnnnnnnnnnnnnnnnnnnnnnnnnnnnnnnnnnnnnnnnnnnnnnnnnnnnnnnnnnnnnnnnnnnnnnnnnnnnnnnnnnnnnnnnnnnnnnnnnnnnnnnnnnnnnnnnnnnnnnnnnnnnnnnnnnnnnnnnnnnnnnnnnnnnnnnnnnnnnnnnnnnnnnnnnnnnnnnnnnnnnnnnnnnnnnnnnnnnnnnnnnnnnnnnnnnnnnnnnnnnnnnnnnnnnnnnnnnnnnnnnnnnnnnnnnnnnnnnnnnnnnnnnnnnnnnnnnnnnnnnnnnnnnnnnnnnnnnnnnnnnnnnnnnnnnnnnnnnnnnnnnnnnnnnnnnnnnnnnnnnnnnnnnnnnnnnnnnnnnnnnnnnnnnnnnnnnnnnnnnnnnnnnnnnnnnnnnnnnnnnnnnnnnnnnnnnnnnnnnnnnnnnnnnnnnnnnnnnnnnnnnnnnnnnnnnnnnnnnnnnnnnnnnnnnnnnnnnnnnnnnnnnnnnnnnnnnnnnnnnnnnnnnnnnnnnnnnnnnnnnnnnnnnnnnnnnnnnnnnnnnnnnnnnnnnnnnnnnnnnnnnnnnnnnnnnnnnnnnnnnnnnnnnnnnnnnnnnnnnnnnnnnnnnnnnnnnnnnnnnnnnnnnnnnnnnnnnnnnnnnnnnnnnnnnnnnnnnnnnnnnnnnnnnnnnnnnnnnnnnnnnnnnnnnnnnnnnnnnnnnnnnnnnnnnnnnnnnnnnnnnnnnnnnnnnnnnnnnnnnnnnnnnnnnnnnnnnnnnnnnnnnnnnnnnnnnnnnnnnnnnnnnnnnnnnnnnnnnnnnnnnnnnnnnnnnnnnnnnnnnnnnnnnnnnnnnnnnnnnnnnnnnnnnnnnnnnnnnnnnnnnnnnnnnnnnnnnnnnnnnnnnnnnnnnnnnnnnnnnnnnnnnnnnnnnnnnnnnnnnnnnnnnnnnnnnnnnnnnnnnnnnnnnnnnnnnnnnnnnnnnnnnnnnnnnnnnnnnnnnnnnnnnnnnnnnnnnnnnnntccctcccccatccctcccctgctgccccctcccacccccatccctttcctgtccctcccccaccgccccctgacagctggccttgacccctgctgcctgcaggaactactttggggaaaaggtggccctgtacttcgtctggctgggctggtacacctacatgctggtgccggccgccctgacgggcctcttagtctttctgagcggattctcgctgtttgaggccagccagatcaggtgggccgcagcaggggccgggcatggggggccggggtgggccctgctgcctggaggagccgaccccagcctcatccctgccccttcagcaaggagatctgtgaggcccacgacatcctcatgtgtcccctcggcgaccacagccgcaggtaccagcggctctcggaaacctgcacttttgccaaggtttgtcgcctccgggtccaccccagggcctgcggaagatgggaacggtgcatccacccgaagcgggggagatcaaggcctggagccctgcagagctgctcagctttccccacagggctgacggggaggcccagccccagcccacccgcccatttcctcagcccacctgcccccttccccggctttcctgcctccctccctggctcacctgcccccctccccagctcacccacctcctctccggcccacctatcacccccccagctcacccacctctttgacaatgatggcacggtggtgttcgccatcttcatggctctctggggtgagttgctgcgggacgcctctgcggggccaggggaagtgccagcccaagctccgaggtccacctggcgtagtgcagtgatgcccctccttgcccccgccgcagccacggtgttcctggagatctggaagcggcagcgcgcccgcgtggtcctgcactgggacctgtacgtgtgggacgaggaacaggtgaggtggagctggcagcgcagctgaggccgacccgagcaggggctgttggcgcccgatgccctgcacggcccacatatgcctgccgtgtctgaggtgtgtgtcccgagtctgtctccccacatgtggggcgtgtgtcctggtctgtccacctgtgaggcgtgtccctgtgtctgtctccccacgtgtggggtgagtgtcccgtgtctgtccacccgtgaggcgtgtcgctgtgtctgtctccccacgtgtggggtgcgtgtcccatgtctgtctccccatgtgtggggtgagtgtcccgtgtctgtccacccgtgaggtgtgtccctgtgtctgtctccccacgtgtggggtgagtgtcccgtgtctgtccacccgtgaggcgtgtccctgtgtctgtctccccacgtgtggggtgagtgtcccgtgtctgtccacccatgaggcatgtccctgtgtctgtctccccacgtgtgggatgagtgtcccgtgtctgtccacccgtgaggcgtgtccctgtgtctgtctccccacgtgtggtgtgagtgtcccgtgtctgtccacccgtgaggcgtgtccctgtgtctgtctccccacgtgtggggtgcgtgtcccgtgtctgtctccccatgtgtggggtgagtgtcccgtgtctgtccacccgtgaggtgtgtctctgtgtctgtctccccacatgtggggtgagtgtcccttgtctgaggcttgcccggtgctctccccaggaggaaatggcacttcagctcattaactgccccgactacaagctccggccataccagcactcctacctacgcagcaccgtcatcctcgtcctgaccctgctcatggtacgcaggggacaccgcggtggggctggagacccgggctgcatgccctccccggcccccgcccaccacagctgtcccgcagatctgcctcatgatcggcatggcccacgtcctggtggtctaccgcgtcctggcctccgcgctcttcagcagctcggccgtgcccttcctggaggagcaggtgaccacggccgtggtggtgaccggggctctggtgcactatgtgaccatcatcatcatgaccaaggtggggccgggagcagggcaggcccgagctggggggtccaccggagccccagtgagcccattcggtgccctcctccgcagatcaacaggtgcgtggccctgaagctttgtgacttcggtgagaggactaccccagaccctcttgggggacccggcgggaggactcagggctggggccttggggctgtggtcagagagcaggggaggggacccttcctgctgccccagggcctctcctatgagcagggagagaggtgagggccggtcccattccagagatgcccaggaccttctcggagcgagagagcaggttcaccatccgcttcttcacactgcagttcttcacccatttctcgtctctcatctacatcgccttcatcctgggcaggtagggccggcgccaggctccctccaacccaactcacgagggcttgttccactgcctttaaagtggcaatgtccattcttttaattttaaaagtaatttctgctgagagcaagtggaaatccaatctagagacatgtgagcaaagcctgcagtgagcccagctcctgaatcccgggccccgaggtagcatcaagacagtctggtggcctcccaggctttttcatgcatttgcaggcgcataacagcactggcagaaatggctttgtcctgggaataactgcacctgctctttatgctgaaaatgcacttggtgtcttcctgggtctgcctgcccacacatcctcgtatacatgtatatatgagagagagagagagagagacagagacagggtcttgctgtcgccaggctggtgtccagtggcacaatgttggctcactgcagtcttgacctcctgggtctcctgagtagctgggattacaggcgtgcaccaccacacccagctaattttaatattttttgtagaaatggggtctcaccgtgttacccaggctggtttcgaattcctgggctcgagcgatcctcctgcctcagtttcccaaagtgttaggatttcaggcgtgagccactgcacctggccaaaaaaaggtgcatatggattgatggagccagaaagactcatttcactaattaggaaggcgaggtgagagggatgctggctgcagctttactttttttttgagatggagtctcgctctgtcgcccaggctggagtgcagtagcatgatcttggctcgctacaacctctgcttcctgggttcaagcaattctcctgcctcagcctcctgagtggctgggaccacaggtgcgcaccaccacacccagctaatttttgtattttttgtagagaaagggtttcaccatgttggccaggctggtctcgagctcctgacctcaggtgagccaccacgtctggccctgtagatgctggttcttgacccccatccgtcttgggaaaggcgtgcaccatggcttgctgtgggccacgtctctcctggtgggacctctcactctggaagctcctgcgggtgaaccctggtctcctgtctggaggcagaaggacgctgtctatgtgctgggaggccagctggggttggggaggacagtgtggggcctcagtgtcaattggtccaaccctgtgtgctgagtccctggttgttcaaacccctagtgagcttctagtcctcctgagggggttttgtggtcaggtaggaagcccagggaccttccagctgggcctgcattcccctaatcagtgcccccaagccaccaggggtacccaagtcccgaggcttcctggggatcctggcagggctgggttgcttcctgagtgtctcccccgaaagcctgatgtcttgagtggacttcaggcctctccaattcccttacacctctaaggtgatgcctggtagtgggtgtcagcagcctgtcattttatttttatttatttacttttagagacagtatcttgatccattgccccaggctggagtacagtggtaccattacagctcactacagcctcaaactcctggttccagcaatcctcctgcctcagcctcccgaatagctgggactacaggcatgtgccaccatgcctggctaattttttctattttttgtagagatggggttttgccatgttgcccaggcttgtctcgaactcctgggctcaagcaatcctcctgcctcggcctcccaacgtgctacgggataacaggtgtgagctaccgcacctgcagtctcaagcaatcctcctgccttggtgtccccacgtgctgggatgacaggtgtgacccactgcacctgcagtcgccattttaattgtgacttgggagtttgcatttacattaacatagatcctgctaaagagacctccagaaaggctgtgtcagtgacaaagctacccacagtgtgtgaaactatatgttccatcttgagctgatgggcaaagtcttttcattttttaaaagtgcctttaaaaaactactggtgaggggctgggcgaggtggctcacgcctgtcatctcagcactttgggaggccgaggcacgaggatcatgaggtcaagagattgagagtatcctggctaacacggtgaaaccccatctctactaaaaaaaaatacaaaaaattagccgggcgtggtggcgggcacctgtagtcccagctactggggaggctgaggcagaatggtgtgaacccgggaggcagagcctgcagtgagctgagatcgcgccactgcactccagcctgggcgacagagtgagactccgtctcaaaaaaaacaaaacaaacaaacaaacaaaaaacaaaaaacaaaaaactattggtgaagtctagcatctttccagatatttactgatcattgtattttttttcctatgaattgactgttcatattatcggagcatttttgttaggttatcgtagcatgaaggccaggcttctttcttgcttgcttttttttttttttaactgtcagtttcttataatcatggtatgttttactttgcatcatatttgtaacatttattgtacagctctttgtttttcctggagtttctttatcttttgttgtttttgattttgtctgccttccaatccatctcctggggtttctacttgcctctttttcttgaatgtctttatcaattgtatccagcctctctgtggtacatcgtgtattgcacggagtcccttttcttccagagatcttccttgggagccttttcctcccgcgcgtcccgtctctccacgccgccttttgctcccgcgcgtcccgtctctccacgccgccttttcctcccgcgcgtcccgtcgctccacgccgccttttcctcccgcgcgtcccgtctctccacgccgccttttcctcccgcgcgtcccgtctctccacgccgccttttcctcccgcgcgtcccgtctctccacgccgccttttcctcccgcgcgtcccgtctctccacgccgccttttcctcccgcgcgtcccgtctctccacgccgccttttcctcccgcgcgtcccgtctccccgccgccttttcctcccgcgcgtcccgtctccgcgccgccttttcctcccgcgcgtcccgtgtccatgtctcctccttgtaacatctggagagatttccttcactttgtgcctttttctccatcgattgatttctttgttttacgtttaacaattaaagtcttaatttctaagagtgttttgtttcctctttattttttattcacagcatcccttccgtgtttttatgttcttgaggatttcaattaggttttccttctccctgagttctcatctgttccctaattatctcttgtttcctaaagggtccatttttgttttttaatcgttattctcctcttactcctctgtgagtaaatctctgtggttattcattcgtattaaagaccaaggaactgaattgatttttcttgatggatgagatgggtctgtataatagtagctacatccattgcccactcacacattctatcattaactcatttaatctgcacagtagccctatagggcagagcttctctcattgccattttacagaatagatgactgaggaccagagaggttaagaaattatctccaggacacacagccagtgggtggcggaacagataaaaaccacaaagtctggctctagagcttagttctgtgcctctttgcatggggaggtctctcggaaaacagcgtgaaaaatctacctggtttctcatgttacactagagcaaattttctttttgacagtattcctttatggttctattttttcatgccactcctcaagattaataaatatgttcaactgtgggccaggtgcagtggcttatgcctgaaatcccagcactttgggaggctgaggcaggcagatcacctgaggtcaggagttcaagaccagactggccaacatgaagaaaccccgtctctactagccaggcgtggtggtgtgagcctgtagtcccagctactcgggaggctgaggcacaagaatcacttgaacccaggaggcagaggttgcagtgaactgaaatcgcaccattgcgctccagcctgggtgacagagtgaggctccatctcaaatgtgtgtgtgtgtgtgtgtgtgtgtgtgtgtgtgtgtgagtattcaactgtgatttcctttagatgtttatgatttcaaaatattaaacatttggctgagtgcagtggctcatgcttgtaatcccagcattttgggaggccaaggtaggaggattacttgaggctgggagttcaagaccagcctgggcaatgtagtgagacccactgcccccaaaccccccaccgcacgtctctacaaaaaatagaaaattagttgggcgtggtggtttgggcctgtagtcctagctacttgggaggctgaggtaggaggatcgctggagcctgggaggtggaggctatagtgagccataatctcaccattgcactccagcccgagtgacagagatcctgtcacaaaaacccttaaaccttcaaatccctgacttgtaaggaatttgttttgctgcaaggggcagaggaaggaaggctgtttgtttgttttccaaatggcacccagttgtccccaaaccattgattgactaaccatccccatcaccattcttaacttgaaatgccttcttcgtcatacaccaaattccattctttgcttatatattgtcttctcatggattctgacaattccagtaccagccccttgctgtgctgggtattattgctttatgccttgctgtagggtggggctagctgctgtccatcactcttcttttctacttttttaatggttatttacatatgtttattctttcagatgaatgtcagaatcattttgtcaaattgccaaaaattctgtgagactagctgggtgtggtggctcacgcctgtaatcccagcactttgggaggccgaggtgggcggatcatgaggtcaggagttcgagaccagcctggccagcatggtgaaaccccgtctttactaaatatacaaaaattagccaggcgtggtggcgcgcacctgtaatcccagctactcaggaggctgaggcaggagaatcacttaaacccggaaggtggaggttgtagtgagccaagatcatgccattgcactccagcctgggtgacagagcaagactctgtctgaaaaaaaaaaaaaaaattctgtgggacttggcttaagattgtataagtaaaatgatacattatttccaagaaaatcaccataacaaacgaccacagcttagtggcttcaaacaatcaaattattacctcccagttctgcaggccacaagtcctagatgagtcccactgggtgaaaactaaggggttagcagggctgggctccttctggaggctccaggggataattcactttcagcttctccttggtgcacggctgctcctccccctgcagagcttgcagcgtggggctgagtccttctgagtgagtcctgagtccttctgattccttctgagtcaggccagctcccagctgctccctgtccccacagagggacccttgtgattacaccagaaaaacccagataacccaagataatctccccgtcttaaagtcagctgattagcagccttaataccatctgccttgtgagataaaattcctttgccaggtaagaacgtggtcacaggctccaagaatgagcacgtggacgtctttgcggcccatcgctctgactacaaatacatcctccgttttcttatgggagaacgaggttctccctgcaagtctttcatgctccttggtagttttatagttttcttcatttaggccccacagatgccttgtgagtttcagtctcgttatggtataacttgtgctggtgtctgcgggtgaccgatactttctcatgccatgtttccccgcagctttgccgcacacggaaaagccagttctgctggatgctcgttttgtatccacttgagcactcgattgatttatccacccaggctttcagttgttttattttgattttccaggtacataatcatgttttctaaaagagtcatttttttctttgcaaatgtatactatttatacttcatatttctcttgcttatttgcaaggaattccagaaccgtgttaaataccagttgtcgtgagctacaataggaatgcttttgggatttcaccactgaccatgagcctgacttttggtttaagatagttcatgtatttctcatattatggaaagcaggtgattttaaacacaaaataacccatcgtgccgtttccacggggagaaaccgaggccactcgtaacagacactgtctggagcgtgtgttggagcctgtggccttgcctgtgtgtgtgtgtgtgcgcccacgatgcaggtgcggttcgtctgggagcctgtggcctcccctgtgtgggggtgtgtgtgtgtgtgcgcgcgcccacgtgtgggtgcggttcatctgggagcctgtggcctcccctgtgtgtgtgtgtgtgtgtgtgcgtgcccacgtgcgggtgcggatcatctgggtgtgaacacctgtgccccgctcacctgcagggcctgnnnnnnnnnnnnnnnnnnnnnnnnnnnnnnnnnnnnnnnnnnnnnnnnnnnnnnnnnnnnnnnnnnnnnnnnnnnnnnnnnnnnnnnnnnnnnnnnnnnnnnnnnnnnnnnnnnnnnnnnnnnnnnnnnnnnnnnnnnnnnnnnnnnnnnnnnnnnnnnnnnnnnnnnnnnnnnnnnnnnnnnnnnnnnnnnnnnnnnnnnnnnnnnnnnnnnnnnnnnnnnnnnnnnnnnnnnnnnnnnnnnnnnnnnnnnnnnnnnnnnnnnnnnnnnnnnnnnnnnnnnnnnnnnnnnnnnnnnnnnnnnnnnnnnnnnnnnnnnnnnnnnnnnnnnnnnnnnnnnnnnnnnnnnnnnnnnnnnnnnnnnnnnnnnnnnnnnnnnnnnnnnnnnnnnnnnnncttcatgccctgtccctgagccactgctcccctgaccgtcccccaggacccctccctgatctcctcctgtctggccccgcagtgccacgccagcggctgcatgatggacctcttcgtgcagatggccatcatcatgggcctgaagcagacgctcagcaactgcgtcgagtacctggtcccgtgagtgccgacccccgcccagccccgggagccccaggcccctccgccccctgcgccctccctgccacgcagctctccccgcaggtgggtgacccacaagtgccgctctctgcgggcctccgagtccgggcacctgccccgggaccccgagctcagggactggcggcgcaactaccttctgaacccggtcaacaccttcagcctgttcgacgagttcatggagatgagtgcgtgggcgctgcggggcgggggttcgcggagacgaatgcggggcgggggtccgcggacatgagtgcggggcgccggtgagcctgacccccaccgcgcagtgatccagtacggcttcaccaccatcttcgtggccgccttcccgctggcgccgctgctcgcgctcttcagcaacctcgtggagatccgcctggacgccatcaagatggtctggttgcagcggcgcctggtgccgcgcaaggccaaggacatcggtcagaccgggcgggcgcaggatgggcgggaactgggcggcctcaggcctgtgggcttcccgctggccaggccggctcacctggaaaaaataatctctcggatctcaggccgcagacagcccccagcccttctccgacggcctcggatgcgggttgagcctgggtgggagggtaccaggagtgggcggggccgagcgctttgtaggctcctcccacaaaccgtcaggatctcagaggggcttgacgcccccaagggggacccaggttctgccagtggctggggctggaacagagcagccggcctctgtcccaagactggccacgctgagacggacaggcagcaggggagcgacgggagctggggcgctggatgtggggaaagggagagaggtgttagggaggcccccagtctcgggcccaggttacaaggtcttaccctggggtgggaacccaggaggtggagtggctggggggcacagctgagaagttcaggaagatggaggatgaggattcccaggttcctccctgtccatgtcagggtgaggggtgcaggagcacagaggccatgctctgccatggctggggacttccttgtgaatactgcagccctagggctgcaaggggacaccacgcacagagacacggcaggccccgtgttggccgggggtgggggtgagggcagaaccagccgagggacgctgagtcagaccgcttgcccactgctctggtgcagggacctggctgcaggtgctggagaccatcggtgtgctggcggtcattgccaatgggatggtcattgccttcacatctgagttcatcccccgagtggtctacaagtaccgctatagcccatgcctgaaagaaggcaactctactgtcgagtaaggcctcagggtgtctggagacccctgggagaaactggccctaccacagccaagccctgggggatccagaccctttctcctgggaatggctggacctgttggtacccctggggctttagtgaggctggggcctgggggtggcccctgccctgcgcccactgacggcaggccctgggctggaggtcagggataactggccaggaccgcagttgggggtgaagttcccagacctggctgcctcctgagtaggccctgccagaacggctccctcccgatgtgaggttccgcatgtcctcttctgatttatccagctctctgacctcgaggagccaccaaactgcagactgggtccccagggccagtctctggcagggaaagtggctggtgatgcccagagtccccacagtccccccaaggcccccggatgtgaagatgtgcttggcccgggagccccgtcccactggacgcagtctgtggcgtggcccccacctcactgtttgctccacaacgcaggctagaagcactctggggcctgaaggggccgccctggaagcccaccccaccccacactcctctcccctctccccagctgcctcaagggctacgtcaaccacagcctgtccgtcttccacaccaaggacttccaggaccctgatgggattgagggctcagaaaacgtgactctgtgcaggtttggaactccccatcccccaagaatgccctctgaactcctgacccctgacctcaggtacttccttaccccagatacagggactaccgcaatccccccgattacaacttctccgagcagttctggttcctcctggccatccgcctggcctttgtcatcctctttgaggtgagccagaaccgggagaggcctcggagtgggtctgggcagtgctctccccagtccttctccccggccctgaacccccaaatgccagctggcacctgaccgtgctgggcctctcctgtgctgccgctagcacgtggccttgtgcatcaagctcatcgccgcctggttcgtgcccgacatccctcagtcggtgaagaacaaggttctggaggtgaagtaccagaggctgcgtgagaagatgtggcatggaaggcagaggnnnnnnnnnnnnnnnnnnnnnnnnnnnnnnnnnnnnnnnnnnnnnnnnnnnnnnnnnnnnnnnnnnnnnnnnnnnnnnnnnnnnnnnnnnnnnnnnnnnnnnnnnnnnnnnnnnnnnnnnnnnnnnnnnnnnnnnaccccagcatccatcttcagtgccaggagcacagacgtgtagggccagagcccgtccagaggccaccaggagctgagacagtgccaccaccagcacctcccacaagcccaccgctgtgcgtgttgaggggtgctgtgagaaggctgtgcccatgtggggccgcaggaatcccctgtatgttcagggctgtgagctgccaccctattccgcctgctccgtctttgtgggggctctcaggcttggcacagccctgacttgaactctgggtgaccctgggcacccacagaactgggagtgagggctcctcaggcagccacaaggcaggaaaactggcgcaaatttcctgggcctccctctgacttctgggcgccagatcctgccgtgcccccatcctggctgttgggggtgtcctgagcccacctcgctggcctgttcccttcagccaacccgtttctgcagtaaaattaagcctgtctgtcttgctttcctggcctcgctgggtcccgggtggattatatctgccctcagggctagatgggaaacagacccggagtgtggaacgtctggaaccaggtgaggccgcctcaggccgcctgtcccttctccagttttccatgggcttccaagggaggggcgcctatggggtcctctccccgtccctgcacctggggtgttgagggaggcaagagaagacatcggggccacttgagggtggggtgggggtcaaggcaggcttcctggaggaaagggaagagataggggcggacgcgcaaaaccttgagggcggtggacgctccgaagagtccccaaggctctggggctccggggctctgcgcgctggttgggctggtttggccactggccccaggcccgtgcggcagcggctcccgggcagcagcgcagcctccagcgccagccttgggcgcagagcgggacgctggggtccgcccccgccctgactgcggggcggggccgcacctgctgccgctgccggggctacgccgccgccggggctgttgccgctgcgcacctggctcaggtgagctgccccgcccccgcccggcgcgagccccaggtcctggcagcaggtgagtggcggtcgccatcagacccgcgaaggtgagtggaggtcgcagtcctcccagagccgctgcaggcctggagtcggggcccggggcgctgcttgtccctgggcgcggtctctcaggaaatggctcggggccggggaggttcccgcgtcgcccggaagcccgagctcgcccgcgtcctggccctttccagggctgggggaagggaggaaagtgggcgaagggggcgggggccaccctttcctctgcccgacgtggtcagcggctttttggtgaccctcgcgcagaacagagcggggctaggagcgccgaggcgcgcagggatcccacctcggtcgcccaagcctggatcccagctcgaggcttcctgaggcgccgagggcggaccaagagtcaggctggggcccgagctcgcccggcgccgggtggagcttccgccatccgcgcgcctctgccccggccgagcgccccgagccgcacccccgtgcccgcctcccgcgcgcgtcctcgttctccgccctcctcacttggagggcgcccagggcgcaggtgggcgcggggtaggggagcgaaccagagcccctcggcctgcggggccgcagccttttacccacgttcctgcttcaggacaggcgctgggggcccagcgcgcacggggagcggaggggcggcgcgtccgagctgagcgggagtcgcccgcagggtgctgggtgctgagcgtcgaacccaccgggcaggggcggccgcggaccgaggacgctggctgggtctgagggcgggaggagctggcgctttctaagaacctcaaggtgcccagcagagtgcggtgggcagtgcgaggcgaccagggccaggcttggactgagattctgggcgcctcggaagagctgtgcgggcgagggtcggagactttgtgggtgttcatgctcaccctggacggtggacctgggggctcgggggtgcaggacgttagcagagagagggaaggagagggtgccaagccagccctgagagatggtgacgctgagaccgggtgcacagagcagccgccgagccggggcttcacagttggcggctgaccccagggcctgtgctggaggccctgctcctgcttcctgcgggggtgccctgggccctgctgtgcctgcttcctgacctgcagtgtggggagaaccttcttgaggggcttccaaggacccacttcaaggaggggctggtaccaggctctgtgggggaaggggtgctgtctttgggaccctgagcccaaggcccaccatcacccaaggctgagtaccgggacaaaggaaggtcctagcagggctgggactcagtcagacaagtacctgtagaaagcctgctgctgagagggtgctcagccagggccgggaggctggatggcagccctccacaatgaagccctgcccccatgtggctgagggcagggccagggtccaaaggagacccttgtctgattctgtgggcaataccagccaccggtcactgggtccccagtcccaggtcaacctggggagtgtcagtttggtgacaacaggagatgccatctgcccctcatctgctctgagccaggagcctcggccacctgtgtttgctccttatttggaaaagggggcgctgccctcccaccccagcctgaagggaaggtccacaagatgccatagtcccttgtaactgctcacccatcgggggagctatgtctgggagagggacggggagagggcggaagagttctgctggagccccattgttgaccgggagtttctgaaggccctgttccccggggtcagaggtcaaagacacatgggggagcaaaccggccccttggctcctgagtgtgagctctagtagcgtctggaaggcatgccgcgcggtccccggtcctccttgtatgtgtgcagggtggccctggcgggggtctcctggctggaggaccccccatgcattacccctggaacctgcccctttgagcaccccccaccccacaacacacacgcacacacacaaacgcacgcacacgcacatactgcacacacattgcacacacgcagacacactgcacacacacacacacacacacacacacacacacacacacacacacgctgcacagaggaaagtgccgtgcctgggtgggttggggcgggctccagaggaaggagccgcttgactcagagctacaggaagagccggggcaggcggggtgagaaccaccaactgcccgtcctcccgcccgcctagggaaggggtgggtgcctgggtggggtttagggttaggagaggatgtgactgcaaggccaggaagctacagggaaagttctgatcaaaatacacaaagacacaagccaggtccccaccgcgcttggcgatgcatccatagcagccttggtgctgtggacactccctggggcccagcgaaggggagagtttgctcccaaaggcgcaccaatgaccaacatttgccccccggaggaaagaactggaaccaggtgactgccttccccgctgctctgagtgagcctgtgtcagggcctggctgagaggaggcccacggcgcccaagacccatatgcatgtgtgtgcatgtgtgtgtgagacagagcgaggggcagcaggaggctgtgtcgcatcagcggccaagggtgggtgtcaggtgcagtgtgtgtgctgtggggtgcctgtggtnnnnnnnnnnnnnnnnnnnnnnnnnnnnnnnnnnnnnnnnnnnnnnnnnnnnnnnnnnnnnnnnnnnnnnnnnnnnnnnnnnnnnnnnnnnnnnnnnnnnnnnnnnnnnnnnnnnnnnnnnnnnnnnnnnnnnnnnnnnnnnnnnnnnggagggggtacaaggaaaggtgtgcaggggagagggtgcagggaaaggtggggaggggagagggtgcaggggaaggtaggcagaggagagggtgcaggggagagggtgcaggggaaggtgtgcagggaaaggtggggaggggagagggtgcaggggaaggtaggcagaggagagggtgcaggggaaggtgtgcaggggagagggtgcagggaaaggtggggaggggagagggtgcaggggaaggtaggcagaggagagggtgcaggggaaggtgtgcagggaaaggtggggagggagagggtgcacgggaaggtaggcagaggagagagtgcaggggaaggtgtgcaggggagagggtgcagggaaaggtggggaggggagagggtgcaggggaaggtaggcagacgagagtacagggaaaggtagggaggagagaaggtgcaggaggaggcaggcagaagagagggtgcaggggaaggtggggaggggagagggtgcagggggaggcaggcagaggagagggttcaggggagagggtgcaggggaaggtgggcaggggaaggtggggagtggagagcgtgcagggggaggcaggcagaggagagggtgcaggggaaggtgtgtaggggagagggagcaggggagagggtgcgggaagagggtgcaggggagggtttgcagggagagggtgcaggggagagggtgcaaggagaggcaggcagcggagagggtgcagaggagggtttgcaggggagggcacctgctttcttgctgtgctcgtatcctggcagtctgcccttgacttccagaaggctctgaggctgcttttggagggaggactttgaggtctgagcttggggcggtcacggaagcactgcaggagatgccaggggttctgctgggctggcggtgtgacctcccgggcttgctgtgaggggttggtttcctgggaagtgtgtgctttaaggaccctcagtgggtggttcccctgggtcaaggactttccttggagtgtcctccaccgcaaaggacttcttcaaggatccccttgccatcccccatgggtgtgtgcctcatgctgtatcggttcccgaggaaactgccaaacagtcaaacctggggcctctggctgtgcttcacccatggagagggaataggtggcaggctaagaggactgtccctgccactgcctctggggccttagcggggaggaatcctgagggagctggggtgcagaaacttaggcttgatccccacatccccacttccactgtgtccctgcagcagggaggggagtagacagtcagtgcctgttggataaacagggtgaccctgtggcatccagtgaggagaggcccctggggccctgggctgccaaggaagaggctctgggcttctccctgcagccacctcactgaggagctttgggagacttgaggtgtgtgtggctgctgctacgggctgggaaaggacatgggacccgagacctccatccccaccgggcgctgttcaccctccggcctcacaaccgcagggcgaggctaagctgagggttcccgaggtgtttcccgaggtgtttcgaggtgtctgtgctcacgtgcactcctgactgtaaccagacgtgggccagagctgggcaccccccctcgactgcatccagacatggttagagctgggcaccccccccccccgactgtatccagacatggtcagagctgggcacccctccccgactgtatccagacatgttcagagctgggcacccccccccgactgtatccagacatggtcagagctgggcaccccccgactgcatccagacatggtcagagctgggcaaccccctccctgactgcatccagacatggtcagagctgggcaccccccccggctgtatccagacatggtcagagctgggcaccccccccccccgactgcatccagacatggtcagagctaagcaaagccccccgccgactgtatccagacatggtcagagctgggcacccccaccccaactgcatccagacatggtcagagctgagcaccccccaccgactgtatccagacatggtcagagctgggcatcccccatggtgtaggttacatcactcacacccctgccccaaggccaggctgtgtctctggcactgcagcaccccctgcagtggcagctctgttgaaggggacagccaggagtgaggccaactgccatgtcgggagacagggtcccacctagtgttcgtccactgcaccctggggccgtcatggtggccccagggccggtggaggtgatcctggacttgatggcccctccccgtggtcctgggctgcgtgaagtggtgcccattctgg

SEQ ID NO: 448 - DNA, 1506 bp, Homo sapiens
caggaactactttggggaaaaggtggccctgtacttcgtctggctgggctggtacacctacatgctggtgccggccgccctgacgggcctcttagtctttctgagcggattctcgctgtttgaggccagccagatcagcaaggagatctgtgaggcccacgacatcctcatgtgtcccctcggcgaccacagccgcaggtaccagcggctctcggaaacctgcacttttgccaaggtttgtcgcctccgggtccaccccagggcctgcggaagatgggaacggtgcatccacccgaagcgggggagatcaaggcctggagccctgcagagctgctcagctttccccacagggctgacggggaggcccagccccagcccacccgcccatttcctcagcccacctgcccccttccccggctttcctgcctccctccctggctcacctgcccccctccccagctcacccacctcctctccggcccacctatcacccccccagctcacccacctctttgacaatgatggcacggtggtgttcgccatcttcatggctctctggggtgagttgctgcgggacgcctctgcggggccaggggaagtgccagcccaagctccgaggtccacctggcgtagtgcagtgatgcccctccttgcccccgccgcagccacggtgttcctggagatctggaagcggcagcgcgcccgcgtggtcctgcactgggacctgtacgtgtgggacgaggaacaggaggaaatggcacttcagctcattaactgccccgactacaagctccggccataccagcactcctacctacgcagcaccgtcatcctcgtcctgaccctgctcatgatctgcctcatgatcggcatggcccacgtcctggtggtctaccgcgtcctggcctccgcgctcttcagcagctcggccgtgcccttcctggaggagcaggtgaccacggccgtggtggtgaccggggctctggtgcactatgtgaccatcatcatcatgaccaagatcaacaggtgcgtggccctgaagctttgtgacttcgagatgcccaggaccttctcggagcgagagagcaggttcaccatccgcttcttcacactgcagttcttcacccatttctcgtctctcatctacatcgccttcatcctgggcaggacccctccctgatctcctcctgtctggccccgcagtgccacgccagcggctgcatgatggacctcttcgtgcagatggccatcatcatgggcctgaagcagacgctcagcaactgcgtcgagtacctggtcccgtgggtgacccacaagtgccgctctctgcgggcctccgagtccgggcacctgccccgggaccccgagctcagggactggcggcgcaactaccttctgaacccggtcaacaccttcagcctgttcgacgagttcatggagatgagtgcgtgggcgctgcggggcgggggttcgcggagacgaatgcggggcgggggtccgcggaca

SEQ ID NO: 449 - protein, 368 aa, Homo sapiens
MLVPAALTGLLVFLSGFSLFEASQISKEICEAHDILMCPLGDHSRRYQRLSETCTFAKVCRLRVHPRACGRWERCIHPKRGRSRPGALQSCSAFPTGLTGRPSPSPPAHFLSPPAPFPGFPASLPGSPAPLPSSPTSSPAHLSPPQLTHLFDNDGTVVFAIFMALWGELLRDASAGPGEVPAQAPRSTWRSAVMPLLAPAAATVFLEIWKRQRARVVLHWDLYVWDEEQEEMALQLINCPDYKLRPYQHSYLRSTVILVLTLLMICLMIGMAHVLVVYRVLASALFSSSAVPFLEEQVTTAVVVTGALVHYVTIIIMTKINRCVKLCDFEMPRTFSESRFTIRFFTLQFFTHFSSLIYIAFILGRTPP

SEQ ID NO: 450 - DNA, 4097 bp, Mus musculus
ccgagatgttgaccaagttggccctgccttctggaagtctctggctccaccggaacgagctgtttcattgggataagacctcaaaggggaatgtgtgagtgagccaggaaatgagtcgaaccaggtccccccagaacatttgattgtagtcctgggcatccatccaaatcccaggggcctttgccccagaagagatcatggcttactggtgacgctgaatagaggtcatgagcacagtgtgacgaagaagccaggtgggagtccttgcttcgatgcccctctataggttttgttacctttgttaagacgtaaatcattcgatgtggtgggacccggcatgactgttttcagactgttcacagagctgtgtagttgacaccgcaattcagtttcagaacgttttccttttatcaggccaggaggaaaccctgcattcatgaagtcacccacagttccatctactccagccaacaccaggatgcttcacacccatggacgtgaaggtacgtggattcgatcccttatgggtgattcatgcttgcctcctgtgccagtgtgtttgtgactgcgtaatatttttgtaccttcatttttaaaatcagaagtacaaacaacaaacgatcaaacggaagatggtggccttgatcatgccagccctgacgtaacaatgcctaactatagatcacaatcccttttgtggctttgttgagtaccccttattcgtttatgctgcacctggagttcactctcctgctgcttgagtgtgcttggctagcactctggactgtgtgtctgccacaggtctgctttgtcaggttatgtctttggctcatgagtttctgagctcactgttgagggtttgggagcatctgggtcttgggcagttccagtgagaggctgattatgcgtgtggctgtgagttcttggactcagtgtgagaagactccatctttagcttcaactatttgttgagagaacacatctatgttctccctctatagagctgcagtcctgtcacccaaggaactgaactgagtagccaatggctccatgccactgacaatttatggcggaggcaaggattctacttggacatagcaggagcaatactaagccagtgccacctcccagtgaggcctcccatgggctcagtcaaagcacagtatcatggagccaagtggaggacaggcagagtcagcctgtcctgtgagtcccagtggattccctgggtggcaaaggtactaccacacgttgcagttagacccttgggagtctcagaggaactaacacgacctcactttcccccagatgtagggcttcaggagcctgcatagaatacaggaggggagggtggagccctcagcacaggatacccagcctttatgtctcacggggtcaggagagcagggtgcacaggatccttgctgcagtagccttacatttccccatgaagcttgcaggaaatttgcagactccctagtgttgtgttccctgctctcagacctgttgttgcctttcttgctacagaaccaggaacaatcaccgagcttgcctctgggaaatctgaaccaagacatccaggaacctggacatggattgaactatctcttcattgtcagttaccacttgctaagcacatcacccccagatctgtgtgagggggtcaggtgtgctggggtggagaagacaacacagagcagcctgggatgggaagtcagtctcctggtggtgggagtggtagatgcttgtggttgtgctgtctcctttgagtaaaaactccagctgccaagtgctgcctagcctctgatagttggcagaggctcctcctggcaccatgtgggatgtgaacttccccctcaattcctggatttattttgggataatgggctgtggaaaggttacagaaggctgagtctggcctgaaaatgaagctccagccatggccagaggaacatggggctgaggctgacttagagtctgcctcctctgaagaacaatgctatttgaggatccatgcagtggccactgtcaaagtggtgggggatatgatgtcctccttgctcccacttcatccctgtggcaggagtacctgtttaggggggcaccctctctctctctctctctcctctgtagtgggtgctttggaacaagttgcagactatcgaggagtcggagtcgtcggagtcgacctggggctgtgttctcagggctgctcagttagcacaagaggtcctgcggaggaagcactagcatcccccaggctcccagaagcagagtctgggagcagtgcgtcacttcaaagggctccccctccctcagtctgctttctctgtagcagaggagccttccaggctcccaggcagctaagctggaggggccatggcagagtcagtagttaatagctccttgtcctttctgcacaggatattgtggaactcatgcttgattgacagcaagctatttgtttcattgtagctgtagctgcagtctactaggatatcaggagagctcccccgcctcccgccaaaagccctaccagttacctttctgtggtgatcaaataccgggccagagttagctcaaggcaggaaaggttgattttggggcagtgcggggtacagatggctgtgacggaaaggatacagctgtaagggctcttggggtcgcaggagtgtgagcttgcttgcttgcttgctcacatgcccgagaggattagtctgcagagagcagacaggaagtgggactggtcccctcctgagaagcaacaattcaacccccactttctctgtcccacctgtgccgggagcaatcacaggagcttgccagcagggaccagatggggtagcgggtcctgggggagtgactcaccacagtcttctacatcgttagactttaaatcagagcctttcaggccagagggccagagaaccggatctaaacaccccatccgtttccagtggggagttagttttccctggcaacttgaagccggtttgaaaaagaaaaaaaaattcaaaagaatagaagaagaaaggttaagttttcaaccaggcaaagaggctcaggtgacctcctccagtgtcaaacaagcctcctgtgcagcccacctaggggctccctttccttgaaggccagttatcaaaggagcctttgcttttgtttttaaaccccgttctcggtgaagaaagtgactgtgcaaggcgtcccccttcccctgcctctgggtgggaaacaattttattttgactggctgaatttcgcccccccccccaccctttagaagctgctcctttatccccaaatgtaaaatccaagcttcaaagcaaatcctgctccagtcagtgccaaataaggcaagaaccctcacaaagccggggtttgtcaggccctctggtcaggtttcagccaggcttcggaggggcattcctgaaatagtgcaggccgcccatacctccaggcacttagcaacacgacgccttttgaatttgcttaaaactattaagaagtaattaagcagttaaagggtctttttcagcccgagcagaggttggggagggagtcgggttcagtgagaggaagcgaggccattcgctttcctctgagctgaccttgcagcgtaacacgttcatcctgtatttttctgccactgccaatttatggcctacaggaaactaatcttgtacaataactaccttcctgtacttagttcctaagtagagccaaatggatttggtggcggatgggctccgcagcggttcccgggaaacagtgctgagcccagcaagatctgataggggctgccgctcttaactgactctctgtataattaggttcctgttttggctgccctgcacttaagaagagaaaataaaaagcagtccccccagccccgcctaccacagcggtttcaattccaagcctgagagggaggcgggcttagaaacgtgctggagagacacagtcaccctgagtttagggagggagataggggccacccaccaacatcatgtcaccaaagtctttgatgagaaacgggaacctgctttgtgattaagtaaaaaaaaatattcacataggactaaatttctgtgatgagc

SEQ ID NO: 451 - DNA, 2913 bp, Mus musculus
ccgagatgttgaccaagttggccctgccttctggaagtctctggctccaccggaacgagctgtttcattgggataagacctcaaaggggaatgtgtgagtgagccaggaaatgagtcgaaccaggtccccccagaacatttgattgtagtcctgggcatccatccaaatcccaggggcctttgccccagaagagatcatggcttactggtgacgctgaatagaggtcatgagcacagtgtgacgaagaagccaggccaggaggaaaccctgcattcatgaagtcacccacagttccatctactccagccaacaccaggatgcttcacacccatggacgtgaagaaccaggaacaatcaccgagcttgcctctgggaaatctgaaccaagacatccaggaacctggacatggattgaactatctcttcattgtcagttaccacttgctaagcacatcacccccagatctgtgtgagggggtcaggtgtgctggggtggagaagacaacacagagcagcctgggatgggaagtcagtctcctggtggtgggagtggtagatgcttgtggttgtgctgtctcctttgagtaaaaactccagctgccaagtgctgcctagcctctgatagttggcagaggctcctcctggcaccatgtgggatgtgaacttccccctcaattcctggatttattttgggataatgggctgtggaaaggttacagaaggctgagtctggcctgaaaatgaagctccagccatggccagaggaacatggggctgaggctgacttagagtctgcctcctctgaagaacaatgctatttgaggatccatgcagtggccactgtcaaagtggtgggggatatgatgtcctccttgctcccacttcatccctgtggcaggagtacctgtttaggggggcaccctctctctctctctctctcctctgtagtgggtgctttggaacaagttgcagactatcgaggagtcggagtcgtcggagtcgacctggggctgtgttctcagggctgctcagttagcacaagaggtcctgcggaggaagcactagcatcccccaggctcccagaagcagagtctgggagcagtgcgtcacttcaaagggctccccctccctcagtctgctttctctgtagcagaggagccttccaggctcccaggcagctaagctggaggggccatggcagagtcagtagttaatagctccttgtcctttctgcacaggatattgtggaactcatgcttgattgacagcaagctatttgtttcattgtagctgtagctgcagtctactaggatatcaggagagctcccccgcctcccgccaaaagccctaccagttacctttctgtggtgatcaaataccgggccagagttagctcaaggcaggaaaggttgattttggggcagtgcggggtacagatggctgtgacggaaaggatacagctgtaagggctcttggggtcgcaggagtgtgagcttgcttgcttgcttgctcacatgcccgagaggattagtctgcagagagcagacaggaagtgggactggtcccctcctgagaagcaacaattcaacccccactttctctgtcccacctgtgccgggagcaatcacaggagcttgccagcagggaccagatggggtagcgggtcctgggggagtgactcaccacagtcttctacatcgttagactttaaatcagagcctttcaggccagagggccagagaaccggatctaaacaccccatccgtttccagtggggagttagttttccctggcaacttgaagccggtttgaaaaagaaaaaaaaattcaaaagaatagaagaagaaaggttaagttttcaaccaggcaaagaggctcaggtgacctcctccagtgtcaaacaagcctcctgtgcagcccacctaggggctccctttccttgaaggccagttatcaaaggagcctttgcttttgtttttaaaccccgttctcggtgaagaaagtgactgtgcaaggcgtcccccttcccctgcctctgggtgggaaacaattttattttgactggctgaatttcgcccccccccccaccctttagaagctgctcctttatccccaaatgtaaaatccaagcttcaaagcaaatcctgctccagtcagtgccaaataaggcaagaaccctcacaaagccggggtttgtcaggccctctggtcaggtttcagccaggcttcggaggggcattcctgaaatagtgcaggccgcccatacctccaggcacttagcaacacgacgccttttgaatttgcttaaaactattaagaagtaattaagcagttaaagggtctttttcagcccgagcagaggttggggagggagtcgggttcagtgagaggaagcgaggccattcgctttcctctgagctgaccttgcagcgtaacacgttcatcctgtatttttctgccactgccaatttatggcctacaggaaactaatcttgtacaataactaccttcctgtacttagttcctaagtagagccaaatggatttggtggcggatgggctccgcagcggttcccgggaaacagtgctgagcccagcaagatctgataggggctgccgctcttaactgactctctgtataattaggttcctgttttggctgccctgcacttaagaagagaaaataaaaagcagtccccccagccccgcctaccacagcggtttcaattccaagcctgagagggaggcgggcttagaaacgtgctggagagacacagtcaccctgagtttagggagggagataggggccacccaccaacatcatgtcaccaaagtctttgatgagaaacgggaacctgctttgtgattaagtaaaaaaaaatattcacataggactaaatttctgtgatgagc

SEQ ID NO: 452 - protein, 155 aa, Mus musculus
MKLQPWPEEHGAEADLESASSEEQCYLRIHAVATVKVVGDMMSSLLPLHPCGRSTCLGGHPLSLSLSSVVGALEQVADYRGVGVVGVDLGLCSQGCSVSTRGPAEEASPRLPEAESGSSASLQRAPPPSVCFLCSRGAFQAPRQLSWRGHGRVSS

SEQ ID NO: 453 - DNA, 49533 bp, Mus musculus
  misc_feature (1)...(49533): n = A, C, G or T/U
agggaaatgaccttcattggttagcatgtgccttatatgtggcttgcagaaaatctgttccaactgtgagcaaagggaccgctgaaggaaactatgtatctttaaccagaatccttcgctgttcggagcagaggtaagtagaatgcagctaaattcttaaaaaccttagacatcacactgataatgcaaattctctctgtttaccgttttgtgagcatctaacatgtacacagccaaatttagaatctgagtcgtggttttcctttaccatttcagagtccatacgaacttgagtgtatttgcattgtaatgcactaaaggttataacttattgtataatgttgctgtaagtttaaataaagatattgagaagcttttgaagttagtctagattgaaaaggtaaataaatatgaattatgaggcagtacgcttagatacatatgcacaggacttgtgttttaatgtacatggaatacgtagtaaaattgaagctgcgtattctctgatcttaaagaaactcctgcacacatacaaagatgtttattgcaacattcaaaaattcatggtttttatatgtatatgagtgcttgcatgtatatatgtgtaccacatgggttctggtgtctgtgggggccagaagaaggcattggatcccctggaactggagttacagatggttgtaagctgctatgtggctgctggaacagaacctgggtcctctgccaagagcaacaaatgctcttagcctccgagccacctctccagtcctattccattttattaatggaaaattagaagtaacctgtctctggtcgttgagtgaatcagaaagttattgtatgttcataggaggggatggttttagtaatttagtaatcacttatttagtgatttagatatttccatgtattgacattaatgaatctcagaaacattaaatgaaaattaagttgcagaatgttacttatagtgtgatacattttacataaaatgtaaaagccaacaaaagatactacttatttttttatgactatatgtaaggaaaaataatcaaactaacttcagaattggggttgcatttggaggggtggagcactagattaggaagatatataaattaaaatttggactgtttctatccttactttagtacctttttaaaaactttaaggttcatttcattattttatgtgtacaagcattttgcctgtctgcatgtatatatgcatgtatgcatgtatgtggtaccatgtgcatgtttgctgtccaaggaggttggaagaggacatcagatcccctgggactgtagtaaaagatggtcatgtgtgaccttgtggttgctaggcactgtcctctgcgagaacagcaaatactctctccagccctatagttctagtatttaaaagatcagagctggggccatgggtaaaactcctgacacacccagcagaaaaatccaaatgataaagtcattgaggaaggcactgaacatcaattcctgtcttccatgtgcattcccatgtgtcagctacatgaacacacacacacatacacacaaagaaaccaaacctgagcagagtaggtcgggaggcctggagtgagaaggcgaagggtaggagattaagctaaccaaaggcatctgctggattttatgtcgttgtccaaatataattcaatgaaatgatcttggtttcctgtattggcattcacttgttctggcataatatcacttttacgttattaaagtgcctctcctttatttttaaatatcagcctaattgaattttttaacaagatgaagaagtgggaagacatggcaaatctgcccccacatttccgagaacgtactgaaagattagaaagaaacttcactgtttctgctgtgatttttaagaaatatgaacccatttttcaagacatttttaaatatccccaagaagaacagcctcgccagcaaagaggaagaaaacagaggtatgtgtctcttctctccgggaaaatgctttcagaaataacccccgagaagccgggacttctctgcttgtttgatttgagacagggcctcgctatgtaaccttggaggtatgggattcactatgtagaccaggctagccttcagctcaaagatctgcctgcctctgcatctaagtcctgggattaaagacatatactaccatgcctggcttaaaaagtattttttttttaaataataatttgttgttgctctctgccgtatgttagaaattccctggcttctttcacaattcaaaatgtttgggctttatactgatataatttacattgatataatttgcattgatataatttgaactttacattgatataattttctctttttatttaagcaaccaaaagtgcaggttgcacaagtcaggccccaccactttttccagttgactttcttggcattgatcagatactgatattttctattatttaacctttatgtcaaactgaataatagtccctgaaatgagtttgatgttcataaccagtcaacaccaaagaaactaggttaggtgagaatagggggaattcacctactgtaaacttgttttctggtcaggtttacaaaagcagcttcctccagctagttttccctgtctttacgagtacagacacaatctggcctcctttaatagccaaggttatttaaacagaaagggaagcgttgcttttaaagtatgtgaggaacttttttcttaagtagaactataacagtattcataaatgtacaagaggctggctatagttacacaggactaaaatcccagcattaaggaggctgaggcagaaggatcacctggactgtataaaagagattctgttttagccaaaaagagagaaataaaataaaacaaactcaaaacctgctaaaatnnnnnnnnnnnnnnnnnnnnnnnnnnnnnnnnnnnnnnnnnnnnnnnnnnnnnnnnnnnnnnnnnnnnnnnnnnnnnnnnnnnnnnnnnnnnnnnnnnnnnnnnnnnnnnnnnnnnnnnnnnnnnnnnnnnnnnnnnnnnnnnnnnnnnnnnnnnnnnnnnnnnnnnnnnnnnnnnnnnnnnnnnnnnnnnnnnnnnnnnnnnnnnnnnnnnnnnnnnnnnnnnnnnnnnnnnnnnnnnnnnnnnnnnnnnnnnnnnnnnnnnnnnnnnnnnnnnnnnnnnnnnnnnnnnnnnnnnnnnnnnnnnnnnnnnnnnnnnnnnnnnnnnnnnnnnnnnnnnnnnnnnnnnnnnnnnnnnnnnnnnnnnnnnnnnnnnnnnnnnnnnnnnnnnnnnnnnnnnnnnnnnnnnnnnnnnnnnnnnnnnnnnnnnnnnnnnnnnnnnnnnnnnnnnnnnnnnnnnnnnnnnnnnnnnnnnnnnnnnnnnnnnnnnnnnnnnnnnnnnnnnnnnnnnnnnnnnnnnnnnnnnnnnnnnnnnnnnnnnnnnnnnnnnnnnnnnnnnnnnnnnnnnnnnnnnnnnnnnnnnnnnnnnnnnnnnnnnnnnnnnnnnnnnnnnnnnnnnnnnnnnnnnnnnnnnnnnnnnnnnnnnnnnnnnnnnnnnnnnnnnnnnnnnnnnnnnnnnnnnnnnnnnnnnnnnnnnnnnnnnnnnnnnnnnnnnnnnnnnnnnnnnnnnnnnnnnnnnnnnnnnnnnnnnnnnnnnnnnnnnnnnnnnnnnnnnnnnnnnnnnnnnnnnnnnnnnnnnnnnnnnnnnnnnnnnnnnnnnnnnnnnnnnnnnnnnnnnnnnnnnnnnnnnnnnnnnnnnnnnnnnnnnnnnnnnnnnnnnnnnnnnnnnnnnnnnnnnnnnnnnnnnnnnnnnnnnnnnnnnnnnnnnnnnnnnnnnnnnnnnnnnnnnnnnnnnnnnnnnnnnnnnnnnnnnnnnnnnnnnnnnnnnnnnnnnnnnnnnnnnnnnnnnnnnnnnnnnnnnnnnnnnnnnnnnnnnnnnnnnnnnnnnnnnnnnnnnnnnnnnnnnnnnnnnnnnnnnnnnnnnnnnnnnnnnnnnnnnnnnnnnnnnnnnnnnnnnnnnnnnnnnnnnnnnnnnnnnnnnnnnnnnnnnnnnnnnnnnnnnnnnnnnnnnnnnnnnnnnnnnnnnnnnnnnnnnnnnnnnnnnnnnnnnnnnnnnnnnnnnnnnnnnnnnnnnnnnnnnnnnnnnnnnnnnnnnnnnnnnnnnnnnnnnnnnnnnnnnnnnnnnnnnnnnnnnnnnnnnnnnnnnnnnnnnnnnnnnnnnnnnnnnnnnnnnnnnnnnnnnnnnnnnnnnnnnnnnnnnnnnnnnnnnnnnnnnnnnnnnnnnnnnnnnnnnnnnnnnnnnnnnnnnnnnnnnnnnnnnnnnnnnnnnnnnnnnnnnnnnnnnnnnnnnnnnnnnnnnnnnnnnnnnnnnnnnnnnnnnnnnnnnnnnnnnnnnnnnnnnnnnnnnnnnnnnnnnnnnnnnnnnnnnnnnnnnnnnnnnnnnnnnnnnnnnnnnnnnnnnnnnnnnnnnnnnnnnnnnnnnnnnnnnnnnnnnnnnnnnnnnnnnnnnnnnnnnnnnnnnnnnnnnnnnnnnnnnnnnnnnnnnnnnnnnnnnnnnnnnnnnnnnnnnnnnnnnnnnnnnnnnnnnnnnnnnnnnnnnnnnnnnnnnnnnnnnnnnnnnnnnnnnnnnnnnnnnnnnnnnnnnnnnnnnnnnnnnnnnnnnnnnnnnnnnnnnnnnnnnnnnnnnnnnnnnnnnnnnnnnnnnnnnnnnnnnnnnnnnnnnnnnnnnnnnnnnnnnnnnnnnnnnnnnnnnnnnnnnnnnnnnnnnnnnnnnnnnnnnnnnnnnnnnnnnnnnnnnnnnnnnnnnnnnnnnnnnnnnnnnnnnnnnnnnnnnnnnnnnnnnnnnnnnnnnnnnnnnnnnnnnnnnnnnnnnnnnnnnnnnnnnnnnnnnnnnnnnnnnnnnnnnnnnnnnnnnnnnnnnnnnnnnnnnnnnnnnnnnnnnnnnnnnnnnnnnnnnnnnnnnnnnnnnnnnnnnnnnnnnnnnnnnnnnnnnnnnnnnnnnnnnnnnnnnnnnnnnnnnnnnnnnnnnnnnnnnnnnnnnnnnnnnnnnnnnnnnnnnnnnnnnnnnnnnnnnnnnnnnnnnnnnnnnnnnnnnnnnnnnnnnnnnnnnnnnnnnnnnnnnnnnnnnnnnnnnnnnnnnnnnnnnnnnnnnnnnnnnnnnnnnnnnnnnnnnnnnnnnnnnnnnnnnnnnnnnnnnnnnnnnnnnnnnnnnnnnnnnnnnnnnnnnnnnnnnnnnnnnnnnnnnnnnnnnnnnnnnnnnnnnnnnnnnnnnnnnnnnnnnnnnnnnnnnnnnnnnnnnnnnnnnnnnnnnnnnnnnnnnnnnnnnnnnnnnnnnnnnnnnnnnnnnnnnnnnnnnnnnnnnnnnnnnnnnnnnnnnnnnnnnnnnnnnnnnnnnnnnnnnnnnnnnnnnnnnnnnnnnnnnnnnnnnnnnnnnnnnnnnnnnnnnnnnnnnnnnnnnnnnnnnnnnnnnnnnnnnnnnnnnnnnnnnnnnnnnnnnnnnnnnnnnnnnnnnnnnnnnnnnnnnnnnnnnnnnnnnnnnnnnnnnnnnnnnnnnnnnnnnnnnnnnnnnnnnnnnnnnnnnnnnnnnnnnnnnnnnnnnnnnnnnnnnnnnnnnnnnnnnnnnnnnnnnnnnnnnnnnnnnnnnnnnnnnnnnnnnnnnnnnnnnnnnnnnnnnnnnnnnnnnnnnnnnnnnnnnnnnnnnnnnnnnnnnnnnnnnnnnnnnnnnnnnnnnnnnnnnnnnnnnnnnnnnnnnnnnnnnnnnnnnnnnnnnnnnnnnnnnnnnnnnnnnnnnnnnnnnnnnnnnnnnnnnnnnnnnnnnnnnnnnnnnnnnnnnnnnnnnnnnnnnnnnnnnnnnnnnnnnnnnnnnnnnnnnnnnnnnnnnnnnnnnnnnnnnnnnnnnnnnnnnnnnnnnnnnnnnnnnnnnnnnnnnnnnnnnnnnnnnnnnnnnnnnnnnnnnnnnnnnnnnnnnnnnnnnnnnnnnnnnnnnnnnnnnnnnnnnnnnnnnnnnnnnnnnnnnnnnnnnnnnnnnnnnnnnnnnnnnnnnnnnnnnnnnnnnnnnnnnnnnnnnnnnnnnnnnnnnnnnnnnnnnnnnnnnnnnnnnnnnnnnnnnnnnnnnnnnnnnnnnnnnnnnnnnnnnnnnnnnnnnnnnnnnnnnnnnnnnnnnnnnnnnnnnnnnnnnnnnnnnnnnnnnnnnnnnnnnnnnnnnnnnnnnnnnnnnnnnnnnnnnnnnnnnnnnnnnnnnnnnnnnnnnnnnnnnnnnnnnnnnnnnnnnnnnnnnnnnnnnnnnnnnnnnnnnnnnnnnnnnnnnnnnnnnnnnnnnnnnnnnnnnnnnnnnnnnnnnnnnnnnnnnnnnnnnnnnnnnnnnnnnnnnnnnnnnnnnnnnnnnnnnnnnnnnnnnnnnnnnnnnnnnnnnnnnnnnnnnnnnnnnnnnnnnnnnnnnnnnnnnnnnnnnnnnnnnnnnnnnnnnnnnnnnnnnnnnnnnnnnnnnnnnnnnnnnnnnnnnnnnnnnnnnnnnnnnnnnnnnnnnnnnnnnnnnnnnnnnnnnnnnnnnnnnnnnnnnnnnnnnnnnnnnnnnnnnnnnnnnnnnnnnnnnnnnnnnnnnnnnnnnnnnnnnnnnnnnnnnnnnnnnnnnnnnnnnnnnnnnnnnnnnnnnnnnnnnnnnnnnnnnnnnnnnnnnnnnnnnnnnnnnnnnnnnnnnnnnnnnnnnnnnnnnnnnnnnnnnnnnnnnnnnnnnnnnnnnnnnnnnnnnnnnnnnnnnnnnnnnnnnnnnnnnnnnnnnnnnnnnnnnnnnnnnnnnnnnnnnnnnnnnnnnnnnnnnnnnnnnnnnnnnnnnnnnnnnnnnnnnnnnnnnnnnnnnnnnnnnnnnnnnnnnnnnnnnnnnnnnnnnnnnnnnnnnnnnnnnnnnnnnnnnnnnnnnnnnnnnnnnnnnnnnnnnnnnnnnnnnnnnnnnnnnnnnnnnnnnnnnnnnnnnnnnnnnnnnnnnnnnnnnnnnnnnnnnnnnnnnnnnnnnnnnnnnnnnnnnnnnnnnnnnnnnnnnnnnnnnnnnnnnnnnnnnnnnnnnnnnnnnnnnnnnnnnnnnnnnnnnnnnnnnnnnnnnnnnnnnnnnnnnnnnnnnnnnnnnnnnnnnnnnnnnnnnnnnnnnnnnnnnnnnnnnnnnnnnnnnnnnnnnnnnnnnnnnnnnnnnnnnnnnnnnnnnnnnnnnnnnnnnnnnnnnnnnnnnnnnnnnnnnnnnnnnnnnnnnncacaagaccctgtattcaatcctaagcaccacaaatacaaaataaaataaaagtgatacaaatcaatgacaaaataaaagcttgggcttttctgtgaaggctgcccatgttagcttgtgtgactggtagtacatatgagagcaaccttacgattgtattggataactatgtggctactaggattttaatctagttcgtgtgtgcttaggagtgaatgtattttctagtgtataaactattaaaataatggcagagtctcaggcagaatccattgcacttagctttgttgtacttagctttgttttggggttgttttgttgttgctgttttgagatgggactctgtctttgttccctgggctggattgaagcttccagcattgggctcaggggcacagcacagctcagtgtggcttacgtgctgtatgcttagattggtagcttagctgctttagctcagcgcttgttttctttctgggggaagatctactttgcctgtagcctatggtcatcgtagatcatctcattcccagtatttagcatggcaagtgacaagtttgagctgtcacatgaagggatttttgagctgaggaccattttctgttgtcatgacaccggaaatgttttgcctagacaagtaagccaaatctagaggttaagtcccttgattaaatggtaaaatggcttgtacataaccgtccatttgtaaggtcagggtttgagatggccaatatgtcctcttgggactgtcctgaaatttcacttagaacccgacctttaggggcctttcagcctgcggttaggggttcccgcgctgctgcaactgctctgcagtgagtagacacggggcaagtccaggcttgccagtgaccgcttactctcttagaaacaggaagtgtggcttcctgctctatgtacaataggggtagacttttaatattttatagcagaggcaagcaagttagcttggtcataccaatgcagaattggatctcttaataattatttggcctttcgggcagcagcaggatttgattgattgattgattgattgattgattcagcctatcccccaaaggaagagctgacgtaggtggtaactttctttggaccgaagcaaatggtctgatacagagccgactgagctgaagagaagcacgggtgctgggtgcattcgggtaggactgtgtgtggaagtgtggttcgtgctttgtgtctgcactatgtgacaatgcagaggtgtgaccgcggctcttcagacagatgctcgctagcagagcggttcagcatccttcataaacagcactgtaggatagtgtgtctgcagacctgcgcttgtttcatttcctccctccctccctcctcccttctctctctctctctctctctcactacaagcatggtggttatccttgggacctctctctctcttactacaagcatggcagttatccttgggacagtagtagcttttgaagtcaaatgtctacatctgtgttccattggattaatgtgaatgtcctttattgctatataggaaagcattttaaattgttactattagtgctttacctctaaatatatctagttattttaactgcagaaaaacttttttatggaaaataacttgttagagcttaaaagagttggtaaattttttgtgtgtgcgttcagcattctaaggactggaccaatagtagtagttcattactagctacttaatgcctattgaatatatattgaatttaattgaaattttagtttccattaaattcttagacatacattaaaatgtcagtgtcctaaaatgtaaatttgccaaaacatagtatcactcttgaaccaacttggtataatggtgtctggtgtcattataactagaggaagcaattatttttaaaatactgtgcagtggatgctgattgaactgtgacttttctaaccctgtagggaacttccccatgattagcgatgatctggtcaattcctaccatcttctgctgtgcgcattagatttagtctatggaaatgcccttcagtgttctaaccgtaaagaacttgtgaaccctaattttaaaggtaagtttattgaaagcccgtgtttctgcatggtttttactcgtggaaactgtatccccagatgcaggcttgctagcctcagaggacatgagtattggagaaattctgccacctgagtcgtatgagtgcttatactgaagtcagcatctccagacattttttaatgtttcactttattttatgtgtatgggtgttttgtctgcatgtatgtttgtgtaccacatgtgtgcctgctgttcccacaggccagaaggagagtgttaaatcctgtgtaaccgggcttatagatggccgtgagccatgggtgctgggaattgagcctaggtcctctgaaagagtaagctgtgctcttaactagtgagtcatctctccagtgcccaccctacccccacctctaaaaacgaaaagcaaatataaccgaatttagttttaaatgataactttggcggtttttgaaaaatatatagcaaaagccatggtagtatttcttgctgttggcacatttggtgcttaacgcaccccaagtagcagcaaagagttggctaaaagaacggcatctcacttcttttgctacagaaaaataaaatgttgaaacaagaacctagctctctgggtgactggtatgagagtcatactcatcttggtggtacgtgtaatgtgctttagactatgtaatttctataagccatatacataaatactgaggatgtatagactagtctatattgctgattctgcatgaaaaacaccgtggaagaattctggccgtcagcttgggcatggtttcagttagaacttcaacgtgcccatccgggttggttttaaaattagtggagctagttactcccagttccctgtgactcgagaggtgtgagacgtaggcctgagatggagtttgtgacagacttcttggctggccctgagtttgattctcagtactgacgagaacaaacaagacagcagaaaatcaaagcagaaaaagaaagttgtagatgtcaccgaagagtttttggctatgcatgttcatctaattaagatggtgcaaatggtccaagattccaaagactaaactctaaatcttggtccaagcattttcaacaaggagcacttgacctttgccccttgctgtgtgccccgttgtcttcactttattctctcacattttgttctggggactggacacagggtgccctggtcctgtgctgcctctgctgcttctgtctgatattgttatttgttctgtttttacctcctttaattttctttgattgttttatgttcttatgaaagagaacactataaattgactcttagagagtaaacaggttgtcgggcttggaagcaggtgtcttcacctgatgagccatctcagcattcagaaatgggtaatgtctgtctgtctgtttgctgttgtttgtttgtttgtttgtttgtttgagacagggtttctatagctctggctgtcctggaactcaatgtgtagacaaggctggccttgaactcacagagatccaccttcccctgttcctgagtgctaggattaatggtgtgagccacctcacctggcagaactgtataattttttaagtgttgttttttttgttttgttttgttttttaatttgaacgtaaggctcatttgcagaacagagttctgatgtttttcagatattcccccaagcttttatttttccaacagcctttagtcacattactaattcaattgataatttatatagttctttctctatgtgaggcaggatgttacagctcagtcggtcctcctgagcatgggttacaggttgaggaagcgtgtccctttctgtttgtcctggggatgttgcatatccatctctgacttcatctctcttcatcttttgaggcatatgtaaattagttacacatgcccaccatgtgctgagcagactaacatttctgtttccgtgtactgtatgttggcgagttggtgctgaccattgtctccatcttgtgattttatacaccacaggcctgtccgaggactgtcaccccaaggactctaaagcgtcctccgacccgccgtgtgtcattgagaagctgtgctccttacacgacggtctagtgttggaggccaaggggataaaggaacacttctggaaaccctatattaggaaactgtttgagaaaaaggttcgtaagtaatgacatacggacgttttctgggtaaagactcggtcgcacgtaacccaagaacctttcttttcatcgtagcttctcaaggggaaggaagaaaatcttactggcttcctggagcccggaaactttggagagagtttgtgagtacttacgctgcacacctgctaggatggtttggttgcttgcttgctttctggggttttttttttgtttttgtttgtttggttttggttttggtttttggttttttggttttttggttttgttttgttttttggtttttgtttttgttttgaggcagggtttctatttgtagccttggctattctggaatttgttctgtagaccaggctggcctccaactcagagattccccctgcctctgcctccccatgcccggcttgctctgatactttaacttagctgtgaggagacctcgcgctcagtgtttgtactgtttgtacgttggatggttttaatgctttatggtagaactcatagaagccatcacagttctggaaacttctactataaccatatgccatatgtctttattctcagtgaaacttgtttttgttctgttcaaagttttattactcaagattttagactctaaattttgaaattaagaaatgcttttgtgggctagagggatggctcagtggttaagagcactgactgctcttccaggggtcctgagttcaattcccagcaaccacatggtggctcacaaccatctgtaatgggatctgatgccctcttctggggtctctgaagacagcaacagtgtactcatatacataaagtaaataaataaatattttttaatataaaaaaagagaagaaagaaatgcttttgtgcctggccatcagagcatggggctgacatctcagcacttaggacctgaggcaaggtgattgtaagttgggggctactttgtctcaaaaaaaaaaatgaagttaaggaaaaaaggactggtatttggatctttagaggtgacagtgtggcaataccaggtctttagaggtgccaagaacagctgaggaaatgttcctgcatggtcatatgccagttgtatgtcacccagcatcacaactttagtttagcgtaatttagtataatttagtttatcattatttattattattattagcttattgaaggcaggtttgttcagagttcctaccttgacacactgttaaaaaagtatattcagtgtgtactggacacttagatcaaagcgagttgcaacttctcttgggtttttgaaatgagcaattattctacagaaataaatgaccttgagaaatttgcgagatgctgtagtgagtaaaaccctggtgtggaacatgagctgaaatggcggtcctgtttccccatagtaaggccgttaataaggcatatgaagaatacgtgttagccgctgggaatctggatgagcgcgtattccttggtgaggatgctgaggaggaagttgggactctgtctcggtgtctaagtgctgcctcaggtacagagagtgctgaacggacgcagatgagagacatcttgcagcagcatcttgacaaggtgagttaagcccagagggaaacaggagcctcttgtgatgcactgaccacgtttcaaagccccgagggagatgcggctgcggcaagaggaaactggcttctgttgtctcctcataatcctgtgtgtgtgtgtgtgtgtgtgtgtgtgtgtgtgtgtgtgtgtttgtgtgttttaaatgtttagannnnnnnnnnnnnnnnnnnnnnnnnnnnnnnnnnnnnnnnnnnnnnnnnnnnnnnnnnnnnnnnnnnnnnnnnnnnnnnnnnnnnnnnnnnnnnnnnnnnnnnnnnnnnnnnnnnnnnnnnnnnnnnnnnnnnnnnnnnnnnnnnnnnnnnnnnnnnnnnnnnnnnnnnnnnnnnnnnnnnnnnnnnnnnnnnnnnnnnnnnnnnnnnnnnnnnnnnnnnnnnnnnnnnnnnnnnnnnnnnnnnnnnnnnnnnnnnnnnnnnnnnnnnnnnnnnnnnnnnnnnnnnnnnnnnnnnnnnnnnnnnnnnnnnctccctctccccttcttttcccttctcctttccctccctctcttctccctacttcctttttcttttcttctcttttctcctcttctcttctcctttttctttttctttttcttttttttttctttttcttttctaacacaggggtctcatgatgcattccaggttaacttcaagtttatagcagtcctgcctggatggttaaaattatgaagtaaagatttccaacagtgaaaatgaatagctaaagcagtggttctcaacctgtgggtcgtgatccccccttgacaaacttctgtctcagaaaatatttacattataatcaaaacagtagcaaatttaagttctgaagtagcaacaaaataattttaagatgcaggtcaccacaacttgaggaaccgtattaaagggtcacacgcagcattaggaaggctgggaaccactcatctgaaggcagagttctagagctcggacccgctcgctccggacctgcttgctccggtccaaagatttatttatttattatatgtaagtacactgtagctgtcttcagacacaccagaagagggtgtcagatctcgttaccggtggttgtgagccaccatgtggttgctggaatttgaacttagtaccttcggaagagcagtcattgctcttaaccactgaaccgtctctccagccctatcctgtttgttgttgttgttgttgctgttgctgttgctgttttggttttttgagacaggatctctttatatgtaccccagtgtgtcctggaactaaatctctaaatggactaggctggccttgaactcacagagatccacctgcctctgcctttgagtgttgagattaaaggtgtgtgctaccgcacctggcctggtattttatatctgagttaaaggaaagtaccccacctacgtgacagtcgcaggggactgtgaagtgcagccctttaccaccatggaaagccccatgctgactggagggctggagctgtggttgtcacactttgtttctgtgaacgcagtgctgcttgcgggtgagatggttttatgtgttcctgactgccaggagctcctcatatgcaccaggacatttttgtttcacagtccaggcaggtagcgcttcactcacaggggaagtgcgtgccatagaagccagggtagcatcagcacactgatagtgcctgatccacccaggccagttatggccattaaacagcagcatgcttcccctcaaacaaatggaggtctcagctctgctgttgtttaagacacacaggacacatacttacttccacttagtggacatcttgtgtttttctgtgtcctgagattgaatagtttgttctgttactgagtaaactccttactgggcatttttgaaagtctaagttgagtacattcagcgctcagggatggttgctggattttattaaaaatgctccaagctagcttaaccttctagcggttttttttttttttaattgtgagaaaagctgatttgctagtgaatgtactcatgcttaaattctttgacacaaggtcacatattgtgcatctgtgtattcaagaatcttggctaacttgctcctctgaaggcctgtctacttgagataaactgtcgtggattctgggagtagaagccaggggatgggctggagaggtggagtgctcagcagttaagagcactgactgctcttctaaggagtcctgagttcaattcccagcaaccacatggtgtctcacaaccatctgtaatgggatgcagtgtcctcttctggtgtgtctgaaggaagaaacagtgcactcacatacgtgaaataaataactcttaaaaaaaaataagtcggggaagaatgatgcggatttgccctgaatcacattgtctttttttttttattattgtgaaatggttaccttctgaagtaaattgatccacccattcttgtgtaggccagatctaagccattgctttcatgtgtccatccttgagtgtcagtctgcagcagcgggctgaagctgtggagtgtgtcagctcagggagtgatgttcttcatgctttcaagtgtgagctctctgaaggagagctagtagagcgagcttgtgtgagagagagtgtgtacacagcctctgtgctctgccctgccctggcacacacctattctctacggtttacttaacagagaacttctggctgcctggagtatgtattgttctttcacacatctttggataagggaacctttgaatggaattatgtttaaattcgtagagtggtgatgtttgagatgctaacatgtatggatagaaagtctaattgtcttgaattcctatttgtggtgtaatttaaagaaactcactccgtttccctcctccagtctaaagcacttagagtctgcacaccactgactggcgtgaggtatgttcaggagaacagcccgtgtgtgactccagtctccacagctgcacacagcctgagccgtcttcacagcatgctgaccggcctcaggaatgcacccagtgagaagctggagcagatactcaggtgggctttagtttcatctgtcttccgagagttagttgtcgacctgttcaatttcttaccttaatttttcagggttagtgccttatgttacccgtcaacactttctcagtaattgtgattacttctttgctcagatgtacttaatgtggtggaggagacggtaactacagtagaccgagtttatctgccttaaagactagttgtgtttgaccagtcacacatgggcaggaacgatgctggagccggcgccttcccgcatcctagtacttgggaagtggacgctgggagagctgcagtctaaggtcatcctcaactacacaagtctaaggccagcctgggctaaataagatcttttcttaaaaagcccccttgcctacaccccacaaaaaaaaacccaaaacccaaacaaccaagcaaaagaacatgtgcttacatgtaagataatttaatataaataaataaataaataaagttaatggatagtacttactatataacaaaaacactagctagttactatcaggaaatttacatattttaaaaaatcgaaatgctggcattatctagaaaaaaaatataacaattattctaattgttataaatctgtttttaaattttgttttataagcttcggggagattgtttctttgtcttggtttttgtttgtttttctgagacaggtacttgctaggcagccctggctggcctggaattcactatgtagaccaaacaggctttgaacttatgattttcttgcctctgtctcttgagagctctgattatgaacatatatgacaccaagccagcctaactatttttcctagcaagaaatcctttttgtaattgttatgaggttgagctcctggaacctgatcacaataaagcttgacttgtatgactgcttcacatctccacagttatattgaaaatctacaaactaggcagtggtagcgcacacctttaatcccagcacttgggaggcagaggcaggtggatttctgagttcgaggccagcctggtctacagagtaagtattaggacagccagggctcaacaaaacaaaacaaaaaaagaaagaaagaacaaaagaaacaaaaatgtcacacattcaggaaagtgaaaaaaaaaaaaaaaaacagccaatactttgtttctttccccttttcttctactcctgaccatattcttatatacttttgactccattcaagactactgataaaaggaagactaggaaaaactgtatgtcagggtctcatgtagcccaaaccaacctcaaccttccatgtagccacagatgacactgaactcctgatgtgtgtactcttatctctgtctctggtggagtccaaagcacatggcccacatgtggtctgtgttagctaggtattttggggcagcattgttgtatgttagacatggatagcacacatagggttgttaacttcaaatagaccagccagatacgttcacttgcctcctgcaaaacactaatagctctgctctgaaggcttgagcaaattctcagactcgggaagaggggcgtcaggggttcagtgatctattgatagttcaccagtagaggccactcgctgtgagtggccagttttatagccagttgctgcccacggtttcccactggtggatctgtggactgatagtttctgtgaactgtgacagagagacatcttatttactcttgctggacaactcggcaaactagaggtggcattgctgtaagagagtgtggtggtacagcagggactaaagacaaccttacactgtcttatattaataaatgttttaaaagtttaaggaagcggaggatccatggtgatgggcagattggtctggaacacgattctgaagtgtgactcggtttgaaaagactcagggtgctcagtgggtcagtcacctaatttctgcaagctctgtagaggttcctaacttggaaagggcttgagttagttccttcgctctccagagtctgataggaatatcagtgacttttcaagaacataattgttgtttgttttgagacaagggcttctgtagctcaggctagcctttaactacagatgcagtggaggataggccttgagacctctgagcctcctgctgtcacctcccacgtgctggtgttacctgcctgtaccagcagtcttatgccatgttgtagggactcacagcttcatgcgtgtccacagctgagatgcattccagctcagggtatactttggggcgtggctttggcagggagatctgagaaagctgattctaaagttcctaagactttatggtttgacggcatagatccctacaataccagctttttctggtggtgtataataaaggagacgttaataactcactggagttcaagagtgatcacctttcctctgtatttgcagtcttctttagtcttcagctttattgtgattaacacggagcagtccacgccttggtggcttcttcctaagtcgtatttttttcagatggccttgatttgccttgaatttcgaagcattttatttttgtttttccagttaacttggaagtgagccattgacacaatgttctaggagtgtgagtgtatgtatagtcctgagaacccgtacacaatctaagggcgttcacgttttcatctgcttcctcatgtggaaaaaataagaaagttggcctctggaatctaatacctagatatgactgtgaattacatattatatagtagttaatttcttgtatcagtttggttagtttacagtacccagttttactaaacaccaatctggatgttggtttgaagtaataatcatttatttacttcttttgaatcagggtcttggccaggcacatggcctaagcactgaggcaggaggatctgaagttcaagactagcctgagttacggaatgaggccgtgttatcagcatataaaaacaggaacggagtctgtgttgctgaggctggacttaactcaccatgtagcctgggacagccttaaactcatcattctcctgcctcagcctctgcagtactgagagaagcattttatgtatatgttgtgaaagactatattgtagctatatctttcagatctttttataatctctagtcatgacagctttagctatagatattattagtggaattgcatattaccagtagattgcatatcaccttttttatctggtaagctttaaggtatatgtgtatgcttataaataaagctctggtgctatatcacatagctatctctggctatgtctcacaaggatgaaacttattttctttataattttataaactggctaaggttttgcaatgcatatatatatttggtcatatatacttaattaaatacatgtatatgatcaagttaagccacagtggttgaaatatatagttattataatttggtcatatatatgtgttgacttttagctgacctgtgcagatcttgtcagccgacctgggatctaaggacctgaaggagtagggcggactacagtctgctgctgcagacaatctcacttcatagggtggactacagtctgctgctgcagacaatctcacttcatagggcggactacagtctgctgctgcagacaatctcacttcatagggcggactacagtctgctgctgcagacaatctcacttcatagggtggactacagtctgctgctgcagacaatctcacttcatagggcggactacagtctgctgctgcagacaatctcacttcatagggtggactacagtctgctgctgcagacaatctcacttcatagggtggactacagtctgctgctgcagacaatctcacttcatagggcggactacagtctgctgctgcagacaatcatctcacttcagtgtcagcccacttttatacaggaatgannnnnnnnnnnnnnnnnnnnnnnnnnnnnnnnnnnnnnnnnnnnnnnnnnnnnnnnnnnnnnnnnnnnnnnnnnnnnnnnnnnnnnnnnnnnnnnnnnnnnnnnnnnnnnnnnnnnnnnnnnnnnnnnnnnnnnnnnnnnnnnnnnnnnnnnnnnnnnnnnnnnnnnnnnnnnnnnnnnnnnnnnnnnnnnnnnnnnnnnnnnnnnnnnnnnnnnnnnnnnnnnnnnnnnnnnnnnnnnnnnnnnnnnnnncttagtgtaaatgtttgccacaggaggcatgaagtcacatgtaagagcaatgcagggaacagtgtgaggtaaaagaccctctctctgccttttcccctggtgcctctctcacaggttcccaaggcattgctcaccacgggtcatttttctgaccaagttctgacatatatatgtatggtcaaattaaaacagttgttataaaagcctcaaatattgctaataagaaaaatcaatgagaaagagggcgagggaggtggttcagctggtaaagtgcttgctttctataagaacctgaccccccccccccagctcccatgtaaacggcagagtgtgctagaataggcttgtaccctcagtgaccctgcggcctgctggccagccatcccggattaatcaccagtcaccaggtacccgctgagaaactccattttaccaacacggacatctgctgaagaataaccgcaaggttgatccctgccgtccacgcacacattgccacacacttccacagaaccctcaatgtgtacccatgaatatttgaacacataccagtactccacacacaaaagatttaaagtcagtgaaataaacctcacttgggagaatttaaaaaagccagcattggcttatatgtttatatgtttctagtgtaggttctgtaccccttcattccatttttttccaggaggtcttcctggaggttttgctgcccactagacagtcctgagggcagtttggttggtgttgatgacaggatatttaaggttgtagggttaaccacagcatcaaatgagtcccagagcaagtcggctaagcagagtgcagtaaagtgtttccacacaggcaataccactgccactccaaatagtaacgttgccatctttgaaaaggaagtatgggatttcctctatttatttgtaaagtatatagtatctattcgaagcattttacgccaatgaaattgatagttttagacaccgtgtctctgtgtccagatgaaacactcatgttggataattcatactactttttaggtcatgttcccgagatccaactcaggctatcgctgacagattgaaagaaatgtacgaaatatattctcagcatttccagccagatgagaattttagtaattgtgctaaaggtaagatttactattgtccagactgctcctgactttgacatctgactaatggagtcagaaagacaaggaaggatgtagaactgtaagctgaaggctacggaggatctgtcctttatttatttatttatttctgtcactgatttctgggccctttttagaaacagaaagtttagtctaacatctttattatgttagacttttagcacatttttggttttctgacacagggtttctctgtgtatccctggctgtatactggaactcactcagtagacagagagagagagagagagagagagagagagagagagagagaagagaaagaaagatgaataacctctcttgaggccccgcctcctaaaggccactccccaaacgggaccactgttaaatacataggtccttgaagaacttccaacatcaagccatagcagcacagagctgtagtattcacagtgacggagtgtgtgcatttaatgtgatcctgagttccttgtgtgctgctttcacgtcagttttaacaagtaagaagaatgttaacatgaaagacctggagcgcacacttaaaatcccagtacctgggacactgtgctgggactagtgatgagcagtcaaggccagtctgggccagggtgagcctctggctcaaggaaaagggggaaaagggaatactgagaaattgtagggataatgaaacatcaactatagaaagtatggctttgggctggagagatggcttagcagttaagagaaatggcttttcttccagaggacccaggcttaatccctggcactcacatgctcaccaccatctgtaagtccagtcccagggaacctgatacccttttctggtctcctgggcacccacattcacatagtacatggacacacatgcaagcaaaacccatatacatttaaaaaataaaattaattagaaaaagaaaatatagatttgggttttagactttattttgtgggtagagaagtgagaaatgagtctattccatgatactaacttaatttgtatttaactttgtgctttgttttaatttcaacagaaattgccaacaaacattttcgttttgcagaaatgctctactataaagtattagagtctgttattgagcaagaacaaaaaagattgggagacatggatttatctgtgagtacaataattatgtagtgatgaacacagtgagacatagctccattcctccccacccaccagcaaaaggccattacaaagaaaaggtgtgcaccttaggaatgagattagcatctcacgaactgtgtagtggagccctccgaccttaccctaccatcgtaaggtgtatggaatgggacagaggtgtgagtctccttgtagcagccatgcattttaacacggattttaaagaataggaggattctgtagatgtgttaattactcctttactgttgtgataaaatacaacgactaaagcaacttccagcagaaagagtctacttgggcttaaaggtgcagaggactagagtccatgttggcaggatgaaggcacagtgacaggagcgggaagctgaaggctcacagcaagcacaaggcagagagcaaactggaaacagtgtgatgctttgaaactgtaaggcccaccccatggacatgcatggctcaacaaaaccacatgtccacacagcacctaaaacagttctactaagtagggaccatgtgttcaagcaccagatcttattcacgcattcttgttcaaacggccccagtggtcaagccctaacatcctcaggtttaactttaacggagttgtttaataccatggagcttttatacaaacccagtggaagaaaacactggatgttgacttgttagggcttcaacatgaggactcagtcattcttcagctaagatgatgctttttcttagtctctaagcaagaaatatcaacagcgaggcatcctgccctacccctttaattctacctgctttggaggctgaagaaggagaatcactatttcaggacctgcctgggctttgtaacacgtctgaggccatctagtgaaacttttttttttttttaaagatttatttatttattatatgtaagtacactgtagctatcctcagatactccagaagagggcatcagatttcattacggatggttgtgagccaccatgtggttgctgggatttgaacttgggacctttggaagagcagtcggagctcttaaccactgagccatctcgccagccctagtgaaactttttgagaccctctctaaaactaaaataagacaacaaaatccctgagaagggccgggcatggattgcatttcatttgactacttagcaattcaagctcttggggagtatcattaaaaaaaaacaattatttttccaaaatgaagattaataaaccaataaaatgtctcataaatgctaatgtcttaacaattgtatataatcttaggtgtcaattaaaatagtctcataatgatgaagctagaaaagcttggaaatgttctatgtgtgaagttaggcttagggaccagaaccgtgagactcagccactcagtcatgtgtgaaagtaccagagtgtacctcctggtcagccagcctgttgcacatttatctaagagagagctcttaagaatgctaattttagagctgaggaagtgactccgcagttcacagcactggctgcttctgcagaggacctgggttcaattcccagcccctgtacggtagcctgtgactcttacaaccccaggtccaggatccctgacgccttccttgggctcaacaggtgccgtggtggcagagagtgatgcacagaagccacataggtggaacactcatacatgcagaagaaataattttaaaaagatagtgctaatttttaaaattgacattttaaaagttatacagttggccagtaattgacttgaatttcttgtaactgtttatactcaactctttttttttcttttattaaaatttgaggcaaggtcttacaatgtagtgcacatacgccttgtacttggtataacccacattggccctgaatgtataatcctcctgcctcagcctcccaaatgctgtgattacgaggacagactaccatgcctgacttacatttcccttttggtttggttttatttatcttacttttaggttttatctgtggttttcctgtatgttcatatatatgcaccatgagtgtgcctttctgtatgtgcactatgtgtctggaccttcaaaggtcagaaaagggggttagatcctctgagagcagagttctagatggctgtggcccaccatgggagtgctgggaactgaacccaggtcctctgcagcagtactgagtgctcttaatcactgagccatctctgcacccacatacatatgtatacattatacacacacacataggtacatatacacatatatacgtatgtggttgcattgggctgtatgcactaatgggctgctttatgacttgactttgtgtgtgtgaaacacatattgaatagcaatgtaaacctcagctacagtttagagactaatattaaataggtacctgtctactcatctaaataatttattttaattttattcttatggtaaaatgtgcttaaaacattttaatcatctggaaagttacatttcaaggtgcattagcacggttgtatccattatccccaccttacacccgttgaagactgatttcccactcgccttctctccgtccctctgtgtactgccttccagccttttgactctaccggatccttaggtagatagaatcgtatcgtatttgtccttttgtggttgagttggttttcttttcactgtttatccatgttctggaaagttttacagcttctttcctggtgtctaacccttttatttgtgactcgtcggttgatagacgtctggatcattatgccttcggctgttgtgaacagtgttgctgtgaacaccggtgtgccaggcacgggtttcttcctagaagtagcattggtgtgtcacacagtggttctggagattggccccagatcctcacgtaggtgaagcgagcgttctaccacagagctccatccccagccccatacagtagtagtcctatggttaatttcctgagcagcagcaacacatgggtttacagttctctcacatcctcaaaacacttgttgcttgctattttaaaacaccttttaaaaagtatttcataacataagtttttatttaatctttaataaaaggatgagtgcaattaaactgactggctatgcagtgtgttttcagagtgggcttcagttctaaatgtgactttgtcttctagggtgttctggagcatgacgcattccacaggtcactcttggcctgctgccttgaggtggtcgctttttcccataagcctcctgggaattttccatttattgctgaaatatttgatgtaccacattatcatttttataaggtatttaaaaattataccggtgattatgagactaacctcttgttatctaccttgctcacattaaacatataaatctattaaaaatttaataatctctgcatagagaacaaaggagagtctttgacctgtgtagattcttgtactatatagtagtatggcacatctctttggcctggttttttccatcatctgcctaaggactccagcatactgtgattgaagagctaagtggggggtggggggcaaatgtggtggattacacctagaacccagcacttggaaagcttaggcaggaggattgcagacttcaagagggctacatagcacaggctctcggaaaggaaagaaagaagagaagcatgtagagaggggtaggaagaggggatgctgggactggaaggatggctcagcagttaagagcacttcctgctcttgcaaaggacctgagttcatttcccagctcccacgtcaactccaggtccagacgatctgaaacccacttctgatctccttcccatccatacacaggacacacacacacggataaaaataaattttcattaaaaagcagcattcatgtcatactaatgttgtatagcttgtatatgtctttctcatttatgaaagtttaatattggagatatctttcaggaaaaaaatccattttctatcatcctacttatttatttttgataaatctagaccaggatgacatcaaactcaaggataacttgaaacttttgattctcctgcctctacctcctaagagctaggattacaggcatgagcccccatactctgcttatggtcagagactattaatattatttttgtgatattgatactggaaagtgagcccatagccttaagcatttaatcacatactgtatttctgaactatacatccacctcttatataaaaacttaagagtactgttttcaggctcaatgtataaggaatattttgtacaaaatattttgttattcatatgtgtagattacttacaaaactataaaaggataagcagcgtgctacacatggctttattaaacttctgataaattatgtcaatatttaaaaaatatttagatgtttcattttgcttttatacttttgcatgcacaagcgtagttatcacgactcaataagtggcgttttctttattgcaggtaattgaagtatttattagagcagaagacggtctttgcagagaagtggtcaaacacctcaatcagattgaagaacaaattttagaccatttggcatggaaaaccaagtccccactgtgggacagaattagagataatgaaaacagagtccctacttgtgaagaggtttgtgacaatattttagcatctttctgtaagggaagcgcatcaatattgtttatagccctcttctacagagagtagttggagctggggtctgccctttggggtgtagggctttgcagtgtggtaagtggtttattcctgtatcaaagagaagcctgtaactacctcaaggtctccatgacggtaaagattgaggctgctgttctgaccatctgaatcataaggtacactggctcggacatagtcttcatattggttttgaatcttttaagactgagaatttttgctttagtaattttattaagaaataattaattggacaaaaattgttgccttttggtttaagattattactgtctctttctttttctttttattcttttcccttcacttccctttccttcccttttcccacccctccccttttccctcccctccccttttccctcccctccccttcccttttctttcctctccgagacagggtttctctgggtaaccctgactatcctaaaactcgctctgtagaccaggcttgcccttgaactcacagagacccgcttgcctctgccttccaagtgctgggattacaggtgtgcactgccttactgcctttctagtgaaatgctttttgattgttaagattttgtgcaaacgattctttataggtcatgccacctcaaaacctagagagaacagatgaaatttacatcgctggctctcccttaaccccgagaagggtgggtgaagttcgtgctgatgctggaggacttggaagaagtaagtttaaaatacaaagacgaatattttggagtcttgaatctatatacttaaattccatctaaactgtaagtaaaattaataggctatgcagagcaaagagtattctgtgtcctttagtgacatagtgatcacttaaaaaaatttttttttgtttttttgtatgcaggagggttgggacaggatcttgtgtagcccaggctgtggccttgaatttgctatgttaccagtggacttctgagagtccatttcccagtgctggattcgaggtgtataccaccacacctgacttaaaaatgcttttaaggaatggtaaaaacattaaaaattattctgagaggtttggctatatggcccaggctcctcttgaattctacattgtcttgctccccacccccaacaaggattgcgggagtgccaagcttatctttttagaacacttttcattaacttgacctttatttgtaagtgactatccatttataaacatacaaaagggcagaaatgggaaaagcaaactgctaactatacttccattgctggccataggattctcagtgaattctctcattctctgaagtgtgtcttcctttttatggttctattttgttatgtttattggagaaaggagtctcactgtgttgcccaggctaatccatccctggtcctcctgactaatctcttgcatagctgggaatcaggtgtggagcgccacagctggatgttgttaagggtggagctctgagacccaggtagatagagataagccagtgaggctggatggctccaagagtggaacatgttcatcactggagctgtgctgagctacttagtaatgtgactttgctgctggcccaaggaacacagaaaacccggcttatgttttatagctccttagatgactgcctaggtgcgaagttcatattcatgtgtggggtctgtcttccttgagattcttttcgtcccccccccccccgttgttggagattgacaccagggcctcccaaatgtaaagtacacatcttttaaactattttcaaagaatagtttatatacacatacatgcatacacacatacacacacacacatatatacacacacatacatatatacaatatatacataaaatacatataaacacatacacacacacacacacagacacatatctccaaatctattagaacattgctaacactaggtccgtttcataatgtacttgaaaggccttagctataaatggatcagttttaaaatcagtttactctaagtcagtgtctactcagtaaatatggatacaggccgtggtggcagacttctgtaatcccaacacttgaaggctaaggtaggaggatcttaactttaaggccagtctgattttgcttcatgagaccctatctcaaaacaataacagaaaaccaaactaactcaccagttaaatgctttttgaaatcttcctcatttaaaaattgattttagatttatgtgtatgattgtttaacctgcatgtatatgtgtgtaccctgtgtgtgcctggtgcctgcagaggtcagaaggtgctggaccctctgtaaggtgttggaccctctgtaaggtgttggaccctctgtaaggtgctgaaccccctgtaaggtgctggaccctctgtaaggtattggaccccctgtaaggtgttgaaccccctgtaaggtattggaccctctgtaaggtgttggaccctctgtaaggtgctggaccctctgtaaggtgttggaccctctgtaaggtgctggaccccctgtaaggtgttggaccccctgtaaggtgttggaccccctgtaaggtgttggaccccctgtaaggtgttggaccctctgtaaggtattggaccccctgtaaggtgttgggccccctgtaaggtgttggaccctctgtaaggtgctggaccccctgtaaggtgttggaccctctgtaaggtgctggaccctctgtaaggtgttggaccctctgtaaggtgctggaccccctgtaaggtgttggaccctctgtaaggtgttggaccccctggaaggtgttggaccccctggaaggtgttggaccccctggaaggtgttggaccccctggaaggtgttggactctctgtaaggtgttggaccctctgtaaggtgttggaccctctgtaaggtgctggaccctctgtaaggtgctggactctctgtaaggtgttggaccccctggaaggttgctggactctctgtaaggccctggaccccctctaaagcgctggatcctctgtaaggtactggaccccctgtaaggtgttggaccctctgtaaggcgttggactctctgtaaggcgttggaccctctgtaaggtgctggactctctgtaaggcgttggactctctgtaaggcgttggaccctctgtaagtggagttgtggatggttgtgagccaccacgtgggtgctgagacccaaacctgagtcttctgcaagagcagtgctctgacctgctcagccatctccagcctttcctccgttttgaaagaacaacaggaatggtttaactacttttcaagcagacctgtctcagctctgataagctggccttttccagtctgtttttttgtagtttttcttcccgagtctatgaattaaagtttgacattcaacttccctttctttgtccttgctacatctccctttagttaggaaaatctgcctgacgctggctccacaagcctgtcccaggcttcctgtcttcttgtaacacagggaatgcttaagcacagctttcagggttcactcttgttaaagtcttgctcatctccctacttttatttttaaattttaaagctactgttacacaggtcttacaggtgaacatgggaaaaggaatagttacaattcaaacatgcacacattagtaagaatacttaaactaagccgtaacatttggtttttatttagagggactaaggaaaaagcgattgttttgggcatggtggtgcatgcccttaatgcctgcacttgggaggcagggcaagtgtatctttgggagtctgaggccagcttttgctaaatagtgagttctgggatacccagacctacatagagaaaccttgcctcaaacaaacaaacaaacagacattcaagaaagaatgttcatagttagacaaagctatatatatgtatttaaaagtggctaatgctgataatgtttttatattttgcaacaattcaaaacctattttataaagccattgaattatataactgaagtgaatgaaatgtatggcacatgagtcatatctcaataaaactgctcaaaactaagtttattaaatctataccatacatgtctacctactgaaggatatgggatgttagtaatcttccctttgtggaaaaaggctgatgaatattcatagaaagctgaaggagaaaaccagaggaaggcaggcatatcaccctgtctcctggccaggtaatgtctttgttcaaatttgaatatggggaaaaagtaaatgattcctgaaatgacctcttcatcagagtcggaacagaggacacggtggccgaggacaaagccttgcttcatttacgggggaaggaaaaccagaaagagagcgctgtgagacagagtatttcctctgtgaaatgctttcagttgaatttccactagaataaatatgggtggaccacgacttctgtacattttatttgcttttgaaattatgaagtatttgaaacacactgactttccttttgaacaagagctgagatcgaggtcagagctgtctctttgttaagtagtctgatttcttttgatcgtaggtataacgtctccaaccacattgtatgacaggtacagctccccaacagtcagcactactagaaggcggctattcgagaatgatagtccctctgaaggaagcacatctgggcgcatccccccacaacccctagtcaacgctgtccccgtgcagaatgtacctggggagactgtttctgtcacaccagttcctggacagaccttggtcaccatggcaacagccactgtcacggccaacaatggacaaacagtgaccattccagtccaaggtaaggaaggcagagttagggattgcgttctctgacacttgtcagaaagtcacctaagatttggaaagtgccagtctaaggtaacgatggaagacgaggaggaaagaaatgaaagcttcgtgtcaaccctctactcctctttgtaacaaactgcaggtattgccaacgaaaatggagggataaccttcttcccagtccaagtcaacgttgggggccaggcccaggctgtcgctggctctatccagcccctcagtgctcaagcactggctggaagtctgagttcccaacaggtgacaggaaccactttgcaagtccctggtccggtggccattcaacagatttcccctggtggacaacagcagaacccaggccagccactaaccagcagcagtatccggccgcggaagactagctccttagcgctcttctttagaaaggtaacttttcacgcaccctactgcagcacaggctcaactttgaacagggtttgaaatattcttatctctgttaggtttactacttagccggtgtccgccttcgagatctttgtataaaactagatatttcagatgaactgaggaaaaaaatttggacctgctttgaattctctataatccagtgcaccgaacttatgatggacagacatctggaccagctgttgatgtgtgccatttatgtgatggcaaaggtaaggactgtttttagtactggaacgtcaaccatgcgcattccttacctgaatgtttttaaatagctactcactgagtcttacatcccaaatatgtgctctcgacagagctttagaatcctatagacattttatagacattggacagtattttttatccatctgtttatagatatgtggattgttcctggcaattatgaacaacactgctgtatgcattgtgggtgatattttgtgtagacacaggcttccatttctctcagagtaaatgtctagaaatggatctgtggatcacacaggaactgtatgtttaaacactaaggaactgccaggctacttttcaaagtgtggttccatacttctatattcctgcatgcaatatataacattcttaattcctctagtttctcatcaatacttaacaaagatttattatatgtttggagggggagggagtttctgccctgagaattcattacccagtttgaggtccagtatcatgaagtgtttccatgtcttctgcatttcatagctgcagactaactgtgagtcctctttacatgtggtatgagattcaagtccagcttcacgctttgtgttgttttctggctgccacaccgttacttaagccatgtttccccactgaataaacgttgcatgtttgtggagtcagttcttgtggacctgtgggttctatcgagaccatctctttgattatgttcatctgtgtctctcatagttagtgctttatactctcaatgactcttgctttttttgtaaactttgaaattgggaaatatgagtcctaattttattttactttagattattttagctattctgagtcccttggaagtccataaaaattttagagtcaagttgtcactgtcataaaagagtcacatgaaaatctacagatcactttggggaactcggtcatcttcagttccgtcttcattccacatggcatgttttcacatttgtttaggttcagttttaacaatgattcatgctttcagaatgtagctctcacccttgttattttcctgtaggttttgatggtattgtaaatgcagctgtttggttttgatggtctcattgcaagagtacagaaaacagttgggttctgtgccttgttagtatccagcaaccttgctaagttggttggttttctgtggtgtagggattggacctaaagccattaaaacgctagaaaagcaagcactctacactcaactcagtctcctgtcctgaacctcttactgagttttaagcatattttgtgtcaactatttttatgtgcagattatgcagccttaataattgtactattgtccaaattccatttctcaattagcatggctagaacatccagtgcaatgttaaaagcagaaatccttgtatactttctggtcttaacagagaaaataattaactagtctgttgctattggaatgtggcattaaatctctcctctatccacctcacctgtaacctcagatagactgctttcacccagtgaagttttagcttattgagtgttgtttcataaaatggtgttggatgttattaaaggccttttactgtattcattgtggttttgatatgctaacaatgtatactgtcttagtcagggtttctattcctgcacaaacatcatgatcaagaagcaagttggggaggaaagggtttattcggcttacacttccatactgctgttcatcaccaaggaactcaggactggaactcaagcaggtcaggaagcaggagctgatgcagaggccatggagggatgttctttactggcttgcttcccctggcttgctcagcttgctttcttatagaacccaagactacaagcccagagatggtcccacccacaaggggcctttcccccttgatcactaattgagaaaatgccccacagctggatctcatggaggcatttccccagctaaagctcctttctcagtgataaccccagcctgtgtcaagttgacacacaaaaccagccagtacatatactacatttgggtttcatgtgagatcatctgccttccctttgcaagtctcttttacttatggtggcaatttttgatttcatgtttggtttgttgagggattttgtgcttattcacaagctgttgcctgggattttattgcatagctttgtctgattttgttcctggagtaaacctggccttttagagagagaaatgtttcctcttattctctctgaagtttgatattagccaagaagtccctggagcctggtccttcctttgtggggtaatgtattgataaactcacttcactgttcttataggtctgttcggttcacaaatcctcacttctagaggatttggcagtgtgttttgtttaagatactgtctgtcttccctgagttaaggacatgtgatctttttttgtttttgtttttgtcctttaaggtctatagtaaagtcctctttcatttctaattgtagtaatttgagttattttttcttggtcagtctaaataaaggttggtaaattctgataatttctaagactgatttcatttattatctctattaagacataccctattattattttcttctttcagcttacttgggccttttaatttttttcatttatttggtgtgtgtgtgtgtgtgtgtgtgtgtgtgtgtgtgtgtgtgtgcacagggccgaagaacagtttctaggagttggttctgtcttcctttaggtcattagctttgcatctaacatttttactcactttgtttcaggatcttggattttttttcctagtgcactggacaattttacatatatatatatatatatacatatgtatgtatatatatgtatatacacacatatacatatatataattattatagtatattttctcagtgtcttaaaaatagtatcccagtatcctttgtaaatttgacactagctacaaaggcaggcattatattagctacaactcagagcttggcatcatgtatgtttatctcaaattacacttgatttcgtatgacttctatttagcttgcatgttctgcaggaccatgtgacttccagttttgtgagtttcccaaacttctctctgttgctgattactagtttcatttcatagtctgagaaacacttttatgcattccagtctttttaaatgtatgcagggtttctgtgtgcttgacgacagggtctcatatatcccaaaccagccttggacttcctccattcctaagtgctagagttacagatatatacagccatgccaaattttacccagtgctggtgattgaactcaaggctttggccatgacagtcaaacaccataccaactgaaaaatgtctctagccttctgacatttgtttaggtaaatattctattgccatcatgagaatagagtgctttctacatgtttgttaggtcaagttatttaatagacttgtttactgttttctctttaatcttctgcctagatctgctattgttgaaagttctgtattctgaaatctctaaatatttttaggttgtctagaaatcagcaacagagagaagtttgggagactcacaaaactggaagtcacatggttctgcagaacatgcaagctaaatagaaatacaagaatcaaatgtaacttgagataaacattttacccttttctgcagtggggttcatgttttcataccctattagtaggttcacttatgtttattcctatagctttttgatgggctgatcttttaattgtgaagtgaactaattcttcagtaatatttgtgttggtttttaaaacctattttacagctttcttttgacttcagattaagtgaacatatctgtttactgtcaaataatctgtctcccaagacaagctatttgatgtttgccagtattacaactttctaacatattgtgtttactccatggtttttgttactgcctccactcacttcgtctgctatttccttgtcttctatgtatcttatatacacacacactccattttctgtatacctctattccttcagatttgctttcttttgaattgggtattttctattggagacttttagtaatgtgtttgggttttgctatatattcattctctcgcttacttgctcgttcgctcactcgcttgcatgcacacgcgcgcacacacatactttaacatctcagaacctagctccaaatttacatcagtgagatatatatactctctttccccctttatcatttgaatttgtgctggtactgtgtgtgtgtgtgtatgtatgtatgtatgtatgtgtgtatgtgtgtgtgtataatttttcattccactggaagtactgtaagtccaccattaccttgactcaatggtataacttttaaaggagtcaggaaaaggcatgtgtgtatttatagctgctgttatgtttaagtggcatctgcagtcacttgtctagtaccctacccacctcctttgtacacacttggtaaatgtatgtttctgttgcagctgtaacaataggtcatgcagtttgatacaaccgctctttttaattaagaagaatatgcgtttgccatccttgttctacctgtttagtttctgatgagaaataagctcttaccttattggactttccctgtaaaaggaaaattgttttgatacatctttactgtaataaatctgatatggatctcttaatcccatctactgtttcttgctctttctaatgaatacataaatgttttaaagtaaacttgggtgctatcacacaccccccacttttaccccagcatcctgctatgtagcccacgtggcctaaaactcttgatcttcctgttcttgcctaccatgctgctcagcttggtctatttctttgaacatcttttcttgcttctctgcctctatcctcttctgacgctctggttccatgaataatgctatgctaactgttgtccaacacctttctgaggctgtttctctttttttctgttcttcagataatacacttcctccttagatacgtgtttttgttttctccttggccgttcagatctaacaacttccacttgtagtcagcatttcaagttcctgagcttctcttctgcaggctgtggtttacaggccggcctccttactacagttcaggttttcatgaatagacagttgttcatttactatccagtctttgaatatagtggcaacaggtccactgagctgctcactgtcatgcctgaggaggatctctctaagtagtctcactgtttgtaggtcacaaaagaagacaggtccttccagaacatcatgcgttgttacaggactcagccacaggcccggagccaggtaaccatgttttttctcggggctgaaagtaaagcttatgtctgtgatgaattgaacaaacaaacaaaaaaattagctataattagctctgtgcctcttccccacaggagtcacaagtagaaatctaaggggattggctattttcattatttacattgttggcatacaatttcatgcaagctatttcaagttctcttccttcaaaggcaaggttgtgaaatatttatttttatgtatatggtgtatgatctgcatgtgtatctgtaccacatgggtgcctggtgccctcagaggctagaagagggcattggagcctaaggaactgaagttatagactgttgagtcatcacgtgggtgctgggaatcaaacctgggtcctctagaagagcagccagcactcttaaccactcagccgtctctccgtctctccgtcccatggcatatttctttttcttttttttttttcttttatttatatgtctatactgtaactgtcttcagacacatcagaagaggacatcagatcctattacagatggttgcgagccaccatgtggttgctgggaattgaactcaggacctctggaagagcagtcagtgctcttaaccgctgagccaactctctagcccccaccccatgacatatttcttaattcagagaatcgtgaactcgatacaaatttagaagttagttgatttttatgtcaccttttagtctggtttaataaagcacagtaataaactaagacaatgaagtgataaagtagatttttaattttcatttaacgtcttagtttattactgtgtttcattaaagcagactaaaggtgacataagaatcagtcactaaaaaccaagaatgttgtcaaacctttgttttaggaagcacttggaatttgaagtgagacaggctctaagtcccagttattagtgaatactttccgacctagatcacaaggctattgctattgttgagacagcatatgtagttctggttagcctagtagtcactgtctggatcagactggccttgaactcacagcctcagcctcctaagtagaggtactaaagaatgtgtacatacaccaaatcctagagaatcagagtacctatttattgctgttaacaagtagtgcaagcagacatataaaagtttttgtttttttttctttttttgagatagcagcccaaattggccttgaactcgcaacacttagccctctgagtcctgggatcacagacatgcccaatgcttaacttggttgtagctcctaacattccctgaagacaactatcactatgtagatttttgtgagaaccaagtaccacgtgttaaggtcctaccacctagtatatattcaataagtgctagttagcatctccttctcattgtctctttaaaggtgtacagaagtgtcttgataaaagggaaaagaagaaactctggcagcagtgagagcagaagccatcagaattctccaaccgaactaaatacagacagaggtaaagaggaggagtctttatcaacatctattgttaggccaagaagactaagaatgtaaaatatagtaatttattctcaacaatttgttggaataaactaaatttagaggcctgttctttattctagtgctttgagacacatagagaacaccatgtttcagataggaatttccagcctgaattccagaaagagcatgcctgtcaattagacctgtgctatataaatgttgttcctagttgttgacctaaacctgttagtacagggttcaggttcaagaaccctctatggagcttacgaatatgaactactcagttaacctaggtacggttaggataatggaatggagtaattagtattttgcgctttgctccttggtatgaagaacatagcttaaggtccaggagtggtggcccgagcctgtaatctcagtcctaccacgtctaaggcaggaggagtgtgagctccagacctgcctggactataaagtgagactgcctctcattggataataatcaccaccgccaccaagggctgaggagataggccagtcagtacagaatgtactacacaagggtgtgggcctgattgatccctagcctctacagaaaaggcgaggcaagcacctgcagtcctagttctggggaggcagagggggggtcactgaggtgtgctagctggcctcctagtcagttggtgtgcctccaactgagagaccctgtcttaaaaaacaaggtagatagctcccaaagaatggtacccaggattggcctgtggtgtccatacagatgtgtgtcttcatagacgtgagtgacaggcaccaaaccctgaagaatcaaagtgcctgcttactgcccctgatgacgagtgctttatagagctgttctccccctttcccagtgagctgtcttgttttcaaacaatccagaccggcaccctttgttctcttggctgcagccagtagagattccagcccagtgatgaggtcaaacagcaccctaccagttccacagcccagcagtgcccctcctacaccaactcgactcacgggtgccagcagtgacgttgaagaggaggaacgaggagacctcattcagttctacaacaacatctataggaagcaaatccaagcgtttgccatgaagtactcgcaggcaaacgcgcaggtcagtagggcagggtcactgagttcagcctctcacgagggggaggaatcacttgaggttttccatcataaactaggcttacaagtaattctttaaacagtctccaacacgagtatcaaggcacaagtcaactgagctctctgtacagttgtcagtcacctcatatatgaaatgaggacagtagttgtctgactgctgggaggctcaaatgatataatgtataaaaatgcttcacatgggggctgaactaaacacctgcatgtgttagctgttggtgtgagtctctagtttctttggttgttgctgatccaccactgttcatctttcaaaagccttccactcaactgttgacttttaatgcaacctggctaggacggcttattctcagaattccttgttttgttttccacagacggacactcctcccctctctccctatccatttgtaagaacaggctcccctcgccgagtacagttatctcaaagtcatcctatctacatttccccacataacaacgaagcaatgccttctcctcgagagaagattttttactacttcagcaacagcccatcaaaggtaagactacataaatggcattaaccaactctaactgcttagcaggctaggactagctctagtgagcgtaagcactccctggggcactgtaactgtcggacatcagaaggcttaagtcacaatgggcagaacccaggatccaatgggttttgaggacatcagggttggaaataaagttgaggaactatgtttttcttacctcctttccaatctgtacattttgaaaactgagttttctttcattagtaaagttttatttttctgcttctgttcagaatagaaactttggacttttttttccgttttgtttgtttgtttgtttgtttgttttgttttgttttccagacagggtttctgtgtatagctttggatgtcctggaactcactctgtagaccaggctggccttgaactcagaaatccacctgcctctgcctcccaagtgctggaatcaaaggcatgcgccaccactgcccagtgaaactttggactctttaaactggttaccaagttctgtttctacagcagttactttctctctctccatggagagctcagagttagacatatgtggtagcacctgtttcagagcagggaaatttgagccttgatagtgaagagttacatagttcctgagatgtggaagtatgcccaagaatcagagaagagggaaaaaggctgtctcactggaagtaacgtaggctcagtggggacagaagacgctgtgacaagccaaatgcagcatgtgccctttttgactgggttgtgcttagggaaccatgtgacacggggtagggttgggacttagtgtggtgccgacattgatggtactggtggcttattaccactgtatttggcttattgctgctcactgctgactgagccctctccccaaccctcttacctctttgattcctgtaccatcttaccaccacaatccattttggaatgtatttggttaaaattgcaagttttataagaaatactgtcccaattttaggaaatctcatccctctgcaattgctttttggatcagttgctgacaatctgttggtaggttttacaaacaaccccattaagatcatctagtattagatgtaaaaaacgtatgcagtttcttcaaatgtgaagatacactttaaaggagacaatcctgctggatggtggaggcacacacctttaatcccagcacttgtggggcagaagcaggcagatctcttgagtttaaggccatcctgatctacagagtgagttccaaaatggcaatccaaatacctagtagttgatgaataaaataagtatgtatatgaccaaaaagtgaagtactagctagcacatacttctgtgtgggtaacccctatagacacaacagtgagtggggttagttatagaagactgaacatgatctacgcaggttagatgtacgcaatgagtagatatatagaggcagaaaacagatcagtggttgcctgggagaaaaggaagcatttctgctggtgggaaagattcctttgagagcaataaggttgactgtagcaagcagctatcactgggtcacactgtaaatgctgagctatgtggcatgccaattttatctcaacaaggctgttgtaaagaacgtgttcaaaacaccatgctagcaccaagtacaaagagactcgcggtagctatctaacacaagaactagacttcagagcaaggagacccagacattcacttcctacagctcagtggtgaagcattagcagagcatggaggagccccctgctcagttatgagagatgtgagctgtgacgagagaaaatgcattcatggtggagaagtcgacataactgatagaacgggcagagaaaatgaataaagatataaaagatgggacaacaatccacagcgccacctgcctgtgggacactaatacaaaggtagaccctattctggactacacacacatcttagtacagtgcggagcaccagtctcatccatgcgaagcaggtgcttgtccactgaattacatccccacatgtgtagtgaattaaaggattcaaataatgcaatttttttctggccatactggcaatcaatgctctctgcaaacctctaaagttttggaagcttaatatcagatttctgtgggtgaaagaagagatcacagagaagatgaaagcattttatattaatgagaatctacaatgtttacattgtaggtgtcttagtcactgttctattgctgtggagaaacaccatgaccagacaaaatcccagcagaattaattgtaaaaagtagtcccatgattaaaaaatgtgtataaacaggcaaaggaacccaataatacaacttttaaagagttgggggttcacagcatctgagttcttaggcttaaggtagtgtagctcaaatgcaaattcagaggtcagtacaacacaccgaagcaagcatactgtgtgtgcagggtgagctgagtctttctcaaaggtgccgtggcagttgtcaagccaactgttagcaccaacagatggcgctaaactgagtggcaatctatgtgctgtaacaatcatagatcatatgcatgcctgtgtcacatgtaatacttaatgccaagtaatcacagatacaaatataaaaccaacaactgaaaacttacagaagaaaatgaagtcttgatgagcatgtgctgtggacagatttctcagatacaacataaaaatcacaatccatgaaataagctatatttcattacaattaaacatttatgctctttaaaacaacgttagaggggctggagagatggctcaggcatcaagagcacagacagactgctctcgcaaaggacctggggttgaattcccagcacccacatggcagctcacaactgtctgtaactcccaagatgtgacacagacatacatgcaagcaaacactaatatacataaagataaaaatataacaaaaaaaccaatattagaatgaacaaagaaggcatgggctggggaaaaaaaaaaaaaacccaagacattccatttctggtaaaggatttgcaaaatcagggggaacaaacaccaggtacagaagtcctggcaatgctgtggaggacccacactgctgacccacaatgccttagccacgctgaaacacactttggccggttagtattacatatttagtgaagtagaaatgtatgttcattcaaaaccatgaatgtttacagtaacttcattccaacttatcaaaaagttcaaatcaaccaaaatgtcctcgatctcattaatggataaacaaaactcaaattttagtgacttactctaataaaacaaacaaaaaccaaaaccacagcactcaggaagttgaggtagaatgttaagtttgagaccaggccagtctggtctttgtggcaatgccctgcatcaaaccccaccaattaacaaatcaagccagaagtactgataaactcaatagcatccctgaactcagtgcattcatgcatatgtgaaatgctctcgggttagctgtctacttaacacagcattccagagaaaactagggacgggaaacccagtgaacacttgggcttcacagaagtgggaaatttggggaaaaggaaattcattatatttttgttaaggttatgcaacacccaagattgtcctctgtccacataacacttgcatgtagaaacacacactattaagatttgatggaaaaagagtctcaatagatgacaactgaaaccaaggggaactctcacaaagcaagcagtacggatctatagccagcctaataagcagtccagaaccaggagaaaaggaacttatcaaaggtcacagacagtcctcaccgtgctcctgtaagagcacattcagtggagagaacaactgctatacagctgtttataatattaagcaactaggaagaaataataaccagtgtgggatcagccatgacagatgtattctgaaataccatatagacattaaagagatgaggcagagccacatatgctgatgcagcaactttaagcaaagtcccaactcctagacatagtcccataatatattgtcttaaaaaaaacaaaaacaaaaacaaaaaaaaacctcactaatgcatagttctaagaataagaaaagccctagaaaaaaggcagaggacacacacaaaccagccagatacttacagtggagcaatagcacgaggtatccctggtaagcagcagcaagtgtggggtgggctggtgtcgtggcttaggaccagcatggtaggaggaggaagacacaataaataataaagaggctaggtataatatattcctaagggaattccaggctgagcccatgagggtcaagagggttaaggtacctgcctcacacactggtgccctcagttaactatctggagcctatgtaaagaggagagaactccatctgccctcaacatgtacaacttggcatacccgccccagcccccacaaagtgaagattagaatatctgaactgtgagaacatatccatatcatgtaaatgaatcgtgtaggaaatatatgcaccatatgtacataatagttagctacaaaatgtactttataagtgtgctgtgtgttatgatatttatatgtacactgaagagaaacaatttataatttatgcagcatttaatcaactactgtggttagtgagccagttaaggaaaactcagatagcaatgtgggctagatttctttcaggaaggcacgagtgagaagagaaaggatgaaggaagcctcttttaagattgttacatttttgaaaatacatacgtgggggctggcaagatggctcagcaggttaagagcactgactgctcttcagaagatcctgagttcaaatcccagcaactgcatggtggctcacaaccacctgtgatgagatctgacgccctcttctgatgcatctgaagacagctacagtggacttacgtatactaagaagtaaatcttcatacgtacactggcaaagccactgatgattgaactggaaacttcagaagtttatgtcagagtaaagaacttaactgatgggctagagtgggttggtagtgtctacccagcatgccggaggccctggtttaatccccagaaccacaaaaagacaaaaataagaaatatgtctaggatatactattctgtcgactctaggtttcatgtagcccaggctagcctcaattttgttgtgtagttgaggatggccttaaacttgtgatccttctgcctccacctctggagtgctggtattccaggtgtgtgccaccatgcccgctgtgcagtgctgggaactgaatctatggctttttgcataccatagattccaccaatttacagtctcatccttaggatatgcattttaaaatctgtgggatgagaagtgagcagaattgtggaagcagggaaatgtgaggattcactatgcctgtttactcactactctgaaattccttaaactatgagtattttaatagtctcaatatccttttttttttttttcaannnnnnnnnnnnnnnnnnnnnnnnnnnnnnnnnnnnnnnnnnnnnnnnnnnnnnnnnnnnnnnnnnnnnnnnnnnnnnnnnnnnnnnnnnnnnnnnnnnnnnnnnnnnnnnnnnnnnnnnnnnnnnnnnnnnnnnnnnnnnnnnnnnnnnnnnnnnnnnnnnnnnnnnnnnnnnnnnnnnctgtgcaccaccactgccccctcagtatctttttaaagtaagaaaaacgaataaagagctgggcggtggtggcgcatgcctttaatcccagcgcttgggaggcagaggcaggcggatttcagagttccaggccagcctggtctacagcgtgagttccaggacagccaaggctacacagagaaaccctgtcttgaaaaaaaaaaaagacaaggccttgctatataactccagctgagcggggcctcaatctgtagcgtggctgactttgaacctaccgcaatcctcttgcttctgcctcccaagtagtgaacccacaggagcagtgagccactgaccttccaagtcatgctgtttgttagcttgtgtgtggaactgtggagatggctcaatgggtgagggcacttgtcacaaaatcccatagagaagtaaacactgactccagggttgtcctctgatttcctcacgtgtgtgtacacatactgacctccatacatgcacacacaaaccctgacccacacacacactgacctccattcttgttcacgtctcaaagtgggtgtatgactagacatgcacaattgtgataccatagaactattctttacaacatgctgaacatgtgtattatagatatgtatcacaagcgccaagaaagtttgttaaaaacaaaagtgctctgcccggcccagagtcacctgtcacctgtcagaacctgctccgggttttctctttacaaaggtgttcaaatgcttacatcttaaatttatgactctgtaacttcctactgagcatttccaggtttttctaactctgttgttctccccacagagactgagggaaatcaacagtatgatacggacaggagagactccaactaaaaagagagggattctcttggacgacggaagtgaatcacctgcaaaaagaatctgcccagagaatcactctgctctgttacgtcgtctccaggatgtggcgaatgaccgaggttcacagtgaggttagtgtccaggaggaaactgtcttcacatgaactggttagcaggacttaatgcatgcaggactacggaaccttgctcctgaatccagcaactgattaaaggaggggataaaagggaagcgcttctgactcagtgtggcagcaaatgcctggtatcccatcacccaaggggtaggggacaagaggaccaggagtttaaggccaacctgagcaatacagcatgtctgagggcaacttggactacatgtaacccttactcaaaaacaaagaaccggaagggatgttttggtaagaaatcagacttatctcactgtccttagactatttttcatcccagttgcctcttcctctacttagtgcttaccttcaacacggctcagaatccaaacttggggttttgaactctggcaaacttttacaagtactgcaggaagcaaatctttagaggcttttgtaggtaggccccaggagaggaactgtatttaaattcatttccacttgcatatggttaggtccaaccatgtgttttaggatgaaaacccagagacatttacaaacagaacaagaggggctggccccgacctggaagtgtccaggccttggcctaaagctcctgatcccttgagcactcactctcccttccccagtaggtactgtacagtgtgaaagcgtgcaatgtctgaaggaacctgtgtaattggtggcactttatggctgtaagatgcatagcattgtgacccagggtttgctgtatatttatgatggcactttctatggtgtgaactttggtaggtacaagccttaggctaaacagctaataatttcttttaatgcttttcttaaaagactgctgatatagctacatgttctggccacatgtaaaaaacttccatttgtggtagtggcattacatagggatcttttagctaagtaaagatttttaagtcaagttgaattgagagtatttgaaaagttttgaccccttccttttggaagtagttatcccaaagaaactatctttgagggtattcctggaagttaaaaaaataggttggagaagtgaggtttttattagtacatagtaccatttatacaaattagaaaattatttaacagctattgattatctacgcatatctttattaatcattattgtcgtttttttaagttggattaataatcctaaggaaaaaattcaattgtaaattggatcatgataaaccaagttactaggtaacttcatgctgctctacagcacccagctgaggacctacaagcctggcactcccccccccaccacagagtagtgctgtgcagagtacttagaaaaccttagtaccgctactgtaattttatatgaaaatatgtgtatttttcaataaagcacttataaattagtctctgtttagttatattgaaaaggagcattactttcctgcataaatgacaatcaatcatttattggtttatttcatctccactaacacatcagtc

SEQ ID NO: 454 - DNA, 4423 bp, Mus musculus
agggaaatgaccttcattggttagcatgtgccttatatgtggcttgcagaaaatctgttccaactgtgagcaaagggaccgctgaaggaaactatgtatctttaaccagaatccttcgctgttcggagcagagcctaattgaattttttaacaagatgaagaagtgggaagacatggcaaatctgcccccacatttccgagaacgtactgaaagattagaaagaaacttcactgtttctgctgtgatttttaagaaatatgaacccatttttcaagacatttttaaatatccccaagaagaacagcctcgccagcaaagaggaagaaaacagaggaggcctgtccgaggactgtcaccccaaggactctaaagcgtcctccgacccgccgtgtgtcattgagaagctgtgctccttacacgacggtctagtgttggaggccaaggggataaaggaacacttctggaaaccctatattaggaaactgtttgagaaaaagcttctcaaggggaaggaagaaaatcttactggcttcctggagcccggaaactttggagagagttttaaggccgttaataaggcatatgaagaatacgtgttagccgctgggaatctggatgagcgcgtattccttggtgaggatgctgaggaggaagttgggactctgtctcggtgtctaagtgctgcctcaggtacagagagtgctgaacggacgcagatgagagacatcttgcagcagcatcttgacaagtctaaagcacttagagtctgcacaccactgactggcgtgaggtatgttcaggagaacagcccgtgtgtgactccagtctccacagctgcacacagcctgagccgtcttcacagcatgctgaccggcctcaggaatgcacccagtgagaagctggagcagatactcaggtcatgttcccgagatccaactcaggctatcgctgacagattgaaagaaatgtacgaaatatattctcagcatttccagccagatgagaattttagtaattgtgctaaagaaattgccaacaaacattttcgttttgcagaaatgctctactataaagtattagagtctgttattgagcaagaacaaaaaagattgggagacatggatttatctggtgttctggagcatgacgcattccacaggtcactcttggcctgctgccttgaggtggtcgctttttcccataagcctcctgggaattttccatttattgctgaaatatttgatgtaccacattatcatttttataaggtaattgaagtatttattagagcagaagacggtctttgcagagaagtggtcaaacacctcaatcagattgaagaacaaattttagaccatttggcatggaaaaccaagtccccactgtgggacagaattagagataatgaaaacagagtccctacttgtgaagaggtcatgccacctcaaaacctagagagaacagatgaaatttacatcgctggctctcccttaaccccgagaagggtgggtgaagttcgtgctgatgctggaggacttggaagaagtataacgtctccaaccacattgtatgacaggtacagctccccaacagtcagcactactagaaggcggctattcgagaatgatagtccctctgaaggaagcacatctgggcgcatccccccacaacccctagtcaacgctgtccccgtgcagaatgtacctggggagactgtttctgtcacaccagttcctggacagaccttggtcaccatggcaacagccactgtcacggccaacaatggacaaacagtgaccattccagtccaaggtattgccaacgaaaatggagggataaccttcttcccagtccaagtcaacgttgggggccaggcccaggctgtcgctggctctatccagcccctcagtgctcaagcactggctggaagtctgagttcccaacaggtgacaggaaccactttgcaagtccctggtccggtggccattcaacagatttcccctggtggacaacagcagaacccaggccagccactaaccagcagcagtatccggccgcggaagactagctccttagcgctcttctttagaaaggtttactacttagccggtgtccgccttcgagatctttgtataaaactagatatttcagatgaactgaggaaaaaaatttggacctgctttgaattctctataatccagtgcaccgaacttatgatggacagacatctggaccagctgttgatgtgtgccatttatgtgatggcaaaggtcacaaaagaagacaggtccttccagaacatcatgcgttgttacaggactcagccacaggcccggagccaggtgtacagaagtgtcttgataaaagggaaaagaagaaactctggcagcagtgagagcagaagccatcagaattctccaaccgaactaaatacagacagagccagtagagattccagcccagtgatgaggtcaaacagcaccctaccagttccacagcccagcagtgcccctcctacaccaactcgactcacgggtgccagcagtgacgttgaagaggaggaacgaggagacctcattcagttctacaacaacatctataggaagcaaatccaagcgtttgccatgaagtactcgcaggcaaacgcgcagacggacactcctcccctctctccctatccatttgtaagaacaggctcccctcgccgagtacagttatctcaaagtcatcctatctacatttccccacataacaacgaagcaatgccttctcctcgagagaagattttttactacttcagcaacagcccatcaaagagactgagggaaatcaacagtatgatacggacaggagagactccaactaaaaagagagggattctcttggacgacggaagtgaatcacctgcaaaaagaatctgcccagagaatcactctgctctgttacgtcgtctccaggatgtggcgaatgaccgaggttcacagtgaggttagtgtccaggaggaaactgtcttcacatgaactggttagcaggacttaatgcatgcaggactacggaaccttgctcctgaatccagcaactgattaaaggaggggataaaagggaagcgcttctgactcagtgtggcagcaaatgcctggtatcccatcacccaaggggtaggggacaagaggaccaggagtttaaggccaacctgagcaatacagcatgtctgagggcaacttggactacatgtaacccttactcaaaaacaaagaaccggaagggatgttttggtaagaaatcagacttatctcactgtccttagactatttttcatcccagttgcctcttcctctacttagtgcttaccttcaacacggctcagaatccaaacttggggttttgaactctggcaaacttttacaagtactgcaggaagcaaatctttagaggcttttgtaggtaggccccaggagaggaactgtatttaaattcatttccacttgcatatggttaggtccaaccatgtgttttaggatgaaaacccagagacatttacaaacagaacaagaggggctggccccgacctggaagtgtccaggccttggcctaaagctcctgatcccttgagcactcactctcccttccccagtaggtactgtacagtgtgaaagcgtgcaatgtctgaaggaacctgtgtaattggtggcactttatggctgtaagatgcatagcattgtgacccagggtttgctgtatatttatgatggcactttctatggtgtgaactttggtaggtacaagccttaggctaaacagctaataatttcttttaatgcttttcttaaaagactgctgatatagctacatgttctggccacatgtaaaaaacttccatttgtggtagtggcattacatagggatcttttagctaagtaaagatttttaagtcaagttgaattgagagtatttgaaaagttttgaccccttccttttggaagtagttatcccaaagaaactatctttgagggtattcctggaagttaaaaaaataggttggagaagtgaggtttttattagtacatagtaccatttatacaaattagaaaattatttaacagctattgattatctacgcatatctttattaatcattattgtcgtttttttaagttggattaataatcctaaggaaaaaattcaattgtaaattggatcatgataaaccaagttactaggtaacttcatgctgctctacagcacccagctgaggacctacaagcctggcactcccccccccaccacagagtagtgctgtgcagagtacttagaaaaccttagtaccgctactgtaattttatatgaaaatatgtgtatttttcaataaagcacttataaattagtctctgtttagttatattgaaaaggagcattacttt

SEQ ID NO: 455 - protein, 911 aa, Mus musculus
FLRNMNPFFKTFLNIPKKNSLASKEEENRGGLSEDCHPKDSKASSDPPCVIEKLCSLHDGLVLEAKGIKEHFWKPYIRKLFEKKLLKGKEENLTGFLEPGNFGESFKAVNKAYEEYVLAAGNLDERVFLGEDAEEEVGTLSRCLSAASGTESAERTQMRDILQQHLDKSKALRVCTPLTGVRYVQENSPCVTPVSTAAHSLSRLHSMLTGLRNAPSEKLEQILRSCSRDPTQAIADRLKEMYEIYSQHFQPDENFSNCAKEIANKHFRFAEMLYYKVLESVIEQEQKRLGDMDLSGVLEHDAFHRSLLACCLEVVAFSHKPPGNFPFIAEIFDVPHYHFYKVIEVFIRAEDGLCREVVKHLNQIEEQILDHLAWKTKSPLWDRIRDNENRVPTCEEVMPPQNLERTDEIYIAGSPLTPRRVGEVRADAGGLGRSITSPTTLYDRYSSPTVSTTRRRLFENDSPSEGSTSGRIPPQPLVNAVPVQNVPGETVSVTPVPGQTLVTMATATVTANNGQTVTIPVQGIANENGGITFFPVQVNVGGQAQAVAGSIQPLSAQAGSLSSQQVTGTTLQVPGPVAIQQISPGGQQQNPGQPLTSSSIRPRKTSSLALFFRKVYYLAGVRLRDLCIKLDISDELRKKIWTCFEFSIIQCTELMMDRHLDQLLMCAIYVMAKVTKEDRSFQNIMRCYRTQPQARSQVYRSVLIKGKRRNSGSSESRSHQNSPTELNTDRASRDSSPVMRSNSTLPVPQPSSAPPTPTRLTGASSDVEEEERGDLIQFYNNIYRKQIQAFAMKYSQANAQTDTPPLSPYPFVRTGSPRRVQLSQSHPIYISPHNNEAMPSPREKIFYYFSNSPSKRLREINSMIRTGETPTKKRGILLDDGSESPAKRICPENHSALLRRLQDVANDRGSQ

SEQ ID NO: 456 - DNA, 4612 bp, Mus musculus
agggaaatgaccttcattggttagcatgtgccttatatgtggcttgcagaaaatctgttccaactgtgagcaaagggaccgctgaaggaaactatgtatctttaaccagaatccttcgctgttcggagcagagcctaattgaattttttaacaagatgaagaagtgggaagacatggcaaatctgcccccacatttccgagaacgtactgaaagattagaaagaaacttcactgtttctgctgtgatttttaagaaatatgaacccatttttcaagacatttttaaatatccccaagaagaacagcctcgccagcaaagaggaagaaaacagaggagggaacttccccatgattagcgatgatctggtcaattcctaccatcttctgctgtgcgcattagatttagtctatggaaatgcccttcagtgttctaaccgtaaagaacttgtgaaccctaattttaaaggcctgtccgaggactgtcaccccaaggactctaaagcgtcctccgacccgccgtgtgtcattgagaagctgtgctccttacacgacggtctagtgttggaggccaaggggataaaggaacacttctggaaaccctatattaggaaactgtttgagaaaaagcttctcaaggggaaggaagaaaatcttactggcttcctggagcccggaaactttggagagagttttaaggccgttaataaggcatatgaagaatacgtgttagccgctgggaatctggatgagcgcgtattccttggtgaggatgctgaggaggaagttgggactctgtctcggtgtctaagtgctgcctcaggtacagagagtgctgaacggacgcagatgagagacatcttgcagcagcatcttgacaagtctaaagcacttagagtctgcacaccactgactggcgtgaggtatgttcaggagaacagcccgtgtgtgactccagtctccacagctgcacacagcctgagccgtcttcacagcatgctgaccggcctcaggaatgcacccagtgagaagctggagcagatactcaggtcatgttcccgagatccaactcaggctatcgctgacagattgaaagaaatgtacgaaatatattctcagcatttccagccagatgagaattttagtaattgtgctaaagaaattgccaacaaacattttcgttttgcagaaatgctctactataaagtattagagtctgttattgagcaagaacaaaaaagattgggagacatggatttatctggtgttctggagcatgacgcattccacaggtcactcttggcctgctgccttgaggtggtcgctttttcccataagcctcctgggaattttccatttattgctgaaatatttgatgtaccacattatcatttttataaggtaattgaagtatttattagagcagaagacggtctttgcagagaagtggtcaaacacctcaatcagattgaagaacaaattttagaccatttggcatggaaaaccaagtccccactgtgggacagaattagagataatgaaaacagagtccctacttgtgaagaggtcatgccacctcaaaacctagagagaacagatgaaatttacatcgctggctctcccttaaccccgagaagggtgggtgaagttcgtgctgatgctggaggacttggaagaagtataacgtctccaaccacattgtatgacaggtacagctccccaacagtcagcactactagaaggcggctattcgagaatgatagtccctctgaaggaagcacatctgggcgcatccccccacaacccctagtcaacgctgtccccgtgcagaatgtacctggggagactgtttctgtcacaccagttcctggacagaccttggtcaccatggcaacagccactgtcacggccaacaatggacaaacagtgaccattccagtccaaggtattgccaacgaaaatggagggataaccttcttcccagtccaagtcaacgttgggggccaggcccaggctgtcgctggctctatccagcccctcagtgctcaagcactggctggaagtctgagttcccaacaggtgacaggaaccactttgcaagtccctggtccggtggccattcaacagatttcccctggtggacaacagcagaacccaggccagccactaaccagcagcagtatccggccgcggaagactagctccttagcgctcttctttagaaaggtttactacttagccggtgtccgccttcgagatctttgtataaaactagatatttcagatgaactgaggaaaaaaatttggacctgctttgaattctctataatccagtgcaccgaacttatgatggacagacatctggaccagctgttgatgtgtgccatttatgtgatggcaaaggtcacaaaagaagacaggtccttccagaacatcatgcgttgttacaggactcagccacaggcccggagccaggtgtacagaagtgtcttgataaaagggaaaagaagaaactctggcagcagtgagagcagaagccatcagaattctccaaccgaactaaatacagacagagccagtagagattccagcccagtgatgaggtcaaacagcaccctaccagttccacagcccagcagtgcccctcctacaccaactcgactcacgggtgccagcagtgacgttgaagaggaggaacgaggagacctcattcagttctacaacaacatctataggaagcaaatccaagcgtttgccatgaagtactcgcaggcaaacgcgcagacggacactcctcccctctctccctatccatttgtaagaacaggctcccctcgccgagtacagttatctcaaagtcatcctatctacatttccccacataacaacgaagcaatgccttctcctcgagagaagattttttactacttcagcaacagcccatcaaagagactgagggaaatcaacagtatgatacggacaggagagactccaactaaaaagagagggattctcttggacgacggaagtgaatcacctgcaaaaagaatctgcccagagaatcactctgctctgttacgtcgtctccaggatgtggcgaatgaccgaggttcacagtgaggttagtgtccaggaggaaactgtcttcacatgaactggttagcaggacttaatgcatgcaggactacggaaccttgctcctgaatccagcaactgattaaaggaggggataaaagggaagcgcttctgactcagtgtggcagcaaatgcctggtatcccatcacccaaggggtaggggacaagaggaccaggagtttaaggccaacctgagcaatacagcatgtctgagggcaacttggactacatgtaacccttactcaaaaacaaagaaccggaagggatgttttggtaagaaatcagacttatctcactgtccttagactatttttcatcccagttgcctcttcctctacttagtgcttaccttcaacacggctcagaatccaaacttggggttttgaactctggcaaacttttacaagtactgcaggaagcaaatctttagaggcttttgtaggtaggccccaggagaggaactgtatttaaattcatttccacttgcatatggttaggtccaaccatgtgttttaggatgaaaacccagagacatttacaaacagaacaagaggggctggccccgacctggaagtgtccaggccttggcctaaagctcctgatcccttgagcactcactctcccttccccagtaggtactgtacagtgtgaaagcgtgcaatgtctgaaggaacctgtgtaattggtggcactttatggctgtaagatgcatagcattgtgacccagggtttgctgtatatttatgatggcactttctatggtgtgaactttggtaggtacaagccttaggctaaacagctaataatttcttttaatgcttttcttaaaagactgctgatatagctacatgttctggccacatgtaaaaaacttccatttgtggtagtggcattacatagggatcttttagctaagtaaagatttttaagtcaagttgaattgagagtatttgaaaagttttgaccccttccttttggaagtagttatcccaaagaaactatctttgagggtattcctggaagttaaaaaaataggttggagaagtgaggtttttattagtacatagtaccatttatacaaattagaaaattatttaacagctattgattatctacgcatatctttattaatcattattgtcgtttttttaagttggattaataatcctaaggaaaaaattcaattgtaaattggatcatgataaaccaagttactaggtaacttcatgctgctctacagcacccagctgaggacctacaagcctggcactcccccccccaccacagagtagtgctgtgcagagtacttagaaaaccttagtaccgctactgtaattttatatgaaaatatgtgtatttttcaataaagcacttataaattagtctctgtttagttatattgaaaaggagcattactttcctgcataaatgacaatcaatcatttattggtttatttcatctccactaacacatcagtc

SEQ ID NO: 457 - protein, 954 aa, Mus musculus
FLRNMNPFFKTFLNIPKKNSLASKEEENRGGNFPMISDDLVNSYHLLLCALDLVYGNALQCSNRKELVNPNFKGLSEDCHPKDSKASSDPPCVIEKLCSLHDGLVLEAKGIKEHFWKPYIRKLFEKKLLKGKEENLTGFLEPGNFGESFKAVNKAYEEYVLAAGNLDERVFLGEDAEEEVGTLSRCLSAASGTESAERTQMRDILQQHLDKSKALRVCTPLTGVRYVQENSPCVTPVSTAAHSLSRLHSMLTGLRNAPSEKLEQILRSCSRDPTQAIADRLKEMYEIYSQHFQPDENFSNCAKEIANKHFRFAEMLYYKVLESVIEQEQKRLGDMDLSGVLEHDAFHRSLLACCLEVVAFSHKPPGNFPFIAEIFDVPHYHFYKVIEVFIRAEDGLCREVVKHLNQIEEQILDHLAWKTKSPLWDRIRDNENRVPTCEEVMPPQNLERTDEIYIAGSPLTPRRVGEVRADAGGLGRSITSPTTLYDRYSSPTVSTTRRRLFENDSPSEGSTSGRIPPQPLVNAVPVQNVPGETVSVTPVPGQTLVTMATATVTANNGQTVTIPVQGIANENGGITFFPVQVNVGGQAQAVAGSIQPLSAQAGSLSSQQVTGTTLQVPGPVAIQQISPGGQQQNPGQPLTSSSIRPRKTSSLALFFRKVYYLAGVRLRDLCIKLDISDELRKKIWTCFEFSIIQCTELMMDRHLDQLLMCAIYVMAKVTKEDRSFQNIMRCYRTQPQARSQVYRSVLIKGKRRNSGSSESRSHQNSPTELNTDRASRDSSPVMRSNSTLPVPQPSSAPPTPTRLTGASSDVEEEERGDLIQFYNNIYRKQIQAFAMKYSQANAQTDTPPLSPYPFVRTGSPRRVQLSQSHPIYISPHNNEAMPSPREKIFYYFSNSPSKRLREINSMIRTGETPTKKRGILLDDGSESPAKRICPENHSALLRRLQDVANDRGSQ

SEQ ID NO: 458 - DNA, 77543 bp, Homo sapiens
ttaaacttaaagcagtttatgaccttaaagcatttagcacacctaatatctgatctgcataatttagattaatgttcttattttattaataatctttaaagctatttttatttcctaaagattgctaaagttacatgaactaaaaggcattaacattttaatttttcttttaaaacatttaagtgcttatttttgcttaagccaattagcttttatataaacattacacacacaacacatatataactacacagacagaagaagattgctacggtagttgtaagatttttctttgccagtttttaagttttttaattggttattggctttagggtggagtccttggaagaacagagcccagaaagggtctctagtgcctcctgtttttcccaaggtgtcccaagctgttagatcttgaatatctacttttaattaagctgacttttaaccacagcactatttagtaaagttcttttaaaatttcttattacctgactttagccagacaaaatggccagtatttctggcttttaaactttaccaaaagtaacctcataggtgctctgagaaaggaaaaatcaagacagtttatggaggggaagagaactaaaaaatggcaaaggtcacccaaatatgaatcagaaaggcttatcccataagctagggattgaaccaggccactaatgtgaaaagagccctcctgggggtccctagaaactctacttcagatcccacttctggcaccatccgatgaaagaaaaacttcagccaaattaaatttaaaagagtttaattcagcaatgaatgcttcatgaatcaggcagcccccggaatcacagcagattcagagactccagcgaagccacatgggggaagaagattgatttataggtaaaaaaaggaaaatgatgcacggaaatgggaagtgaggtacagaacagctggattggttacagctcagcatttgccttatttaaacacagtttggaccgggcgcaatggctcatgcctgtaataccagcactttgggaggctgaggcgggtggatcatgaggacaggagatagagaccatcctggctaacatggtgaaaccccatctctaataaaaatacaaaaaattagccgggcttggtggtgggtgcctgtagtcccagctactcagaaggctgaggcaggagaatggtgtaaacccgggaggtggagcttgcagtgagccgagatcgtgccactgcactcgcagtttgaacactcagcagtgtatgaatgattgaagtagagctgctgggattagccaagactcagctgttgttccaggcacatactcctaaattaggttttcagtcttgtctatctattagtctagtttgcagtttgtccacaacaactcaaatataggagtacggagtccttttcaggccatatttggttcgctttaacaaactacagtttatgctggtagcaacccatcttttaaaaaatatgtctgtgggagacacataaaaaattgcaaacacagttgaaggcatagttttaataatagttatctgataactcagtctgagagagaataacacatacagtttcatggtcacagggaatgaatttaaatttcatgttgagtgggaatgccaaaaggtagagccactttgaaaaaaaaaaaagactggggccgagcgtgtgatgtctcatgcctgtagtcccagtgctttgggaggctgaggtgggcagatcacttgaggtcaggagtttaagaccagcctagccaacatggtgaaaccccatctctactaaaaatacaaaaaattagccaggtttggtggcacacacctgtactcccagctacttgggaggctgaggcatgggaatcacttgaacctggaaggtggaggttgcagtgacccgagatcatgccactgcactccagcctgggtgacagagcgagactctgtctcaaagaaaagtttggcagtttttaaaaaaagtttgacatacacttaccatacaatatggcaatactactgtgttttagtcttgttggcctgccacaataaaataccatagactgggtggcttaaaaaacacattattttttcacagatctggaggttggaaagtccaagattaaggtgccagcctggtttggtttctggggaggcctctcttcttgccttctcactgtgccctcacatggccctttctctgcacacgtgtggagaaagaacgagttatcactctcttcttcttaaaaacccaccaatcggccaggtgcagtggctcacacctgtaatcccagaactttgggaggccacggtgggcggatcacctgaggtccagagttcaagaccagcccaacatggtgaaactccgtttctactaaaaatataaaaattagccagacgtggtggcacatgcctgtaatcccagctactcaggaagctgagtattaagagacagggtttcacaggttagccaggatggttttgatcgcctgaccgcgtgatccgcccgcctcagcctcccaaagtgttgggattacaggcgtgagccactgcacccagccagaagaggtttactattaaggagcactagaaaactcttagggtgatgaaaatgttcaatatgttgattgtggtggttgttccatgactatcaacattcataaaactttgggtgaattttgctgcatatgaacaatatctcaagctgaaagaaaagataaacagaaggagacttgaaaaaattaatttgaacatacatttttgctgaagggaaatctgaaagaagtcaataaataactttgaaacccaaaatatgttaaaattttgctgaaatagaatgaaaatatgaattaaaggagaaaaaggaatgacataaaatttctaattattaaataaaagttttgttgatgtatcttaaaatggataatagtattaaactgttgtgatatttagagtccattagatatatttaaagtttaggatcagttttgttttaggtttatagttacaatgctggatattgcatcctttgcacctaattaaacctttaatgaaaaattttagatgttaaaatatgccaggaggtaattccattagggaaacatgaccaaaaagtttgtagaccacttgttttattatataaaatgtttatgcgaggtttcacaattatgccatatattttaaggtgatatatacagtcagccctccatatctgtgggttgcacaaccatagattcaaccaatcatggaccaaaaatatttggaaaaaaaattaaatacaattaaaatataaaatacaagccaggtgtggtggttcatgcctgtaatcctagcactttgggaggccgaggcaggcaatcacttgagctcaggagtttcagaccatcctgggcaacatggtgaaaccctatcactactaaaaatacactgggcatggtggtgggtgcctgtagtcccagctatttgggaggctgaggcaggataatcgcttgaacccaggaggcgaaagttgcagtgagcggagatcgcaccattgcactccagcctgggtgacagagtaagactctgtctcaaaaaaaataaaatacaaataaaaaaatacagcataacaactatttacacagcatttacattgtattaggtattacaagtaatctagaaatgatttaaagtacatgggaggatgtgagtaggttatatgcaaatactatgctattttatataagacttgagcaaccttggattttggtatccttagggtcctgggaccaatcccccacagataccagggatgtctttataatgtaaaggaaaaatttatttttagatgactgacacatacgttctttgacattctgctgtgctatcagatcacaacatgagtaagaattttacatccacaaaatctgaggcttcaataagaacaagatatatcttgattataatcagtcacttactcgacaagtattatggagagtcaactccatgttcggccccatatttggcactgaagttatagcccagaaccaaacagccacttctcataatttcatagcacttaaagcatagggaagaaaatagacatgaaacagtcaaacatgtaaataatttattatggttataataagtgtcatgagaatattcaatagaaataacagacatttaaggttgtacctgactgttggaaaagggtgactgaaaaaggggtgggggaagtgcgggagggcaattttcagtgaggatgaaggggcaagagggagggaactcatggtatggaaggggtagactctgccaagagcagcaaggaaaccagctaagtaggggaagacatggtgagatttgtgtattaagatagccatttctgcttctgggaggacaaggaggtaagataagggaaagaagtgttgggtaagcatagtctaggattcttattttgaaaccatcttgcaaaaattatgacagtgagaaaatgacgacagtgaaagagatctgacctaacgatctcatcttgtctttaaactccaaactgcccttgttcattcctaggcataggccgagctaactataagagggatttagtttatagtttaatttgaaacaaaaataataacagctctttcctgaaacaaaccccctccttgcctggaaacaagactacctttatagaactaacaaattagccacaggattagaaatttcaatttaggggtcttgcagccagaggctacaagattcctaacctccccaattgctcttagggataacatcactattgtaaaacgtaagattggtgtttgagatatttttagaccctgcattctgatggagcagctggcactatccagatgggtaatctggctcaaccagttctgcaatcccagccaggaacagaagacagcagaaggaacctgcttagactccctgtgatttcatccccaactccaccagtgttcccactccctagacccctcccctgcccagcaaattatccttaaaaaaccctggtctccaaattttcagggagactgatttgagtcatacaagtccggtctcctgtttagctggctgtgagtgtattaaactctttctctaatgcaattcccctatcttgataaatctactcagtctgggcagcaggccagaaaaactcactggacagttacaatttcaactcctagcatcttgctcaagaactaagacagaatcagttaacctccacgatcaaaaatggctgtgacttaaaatctctttctttgaaggaacgttaatgtcaaacatcatttttttgtcccacagatttcagttgggcagggctcagtgggaaggttcatctctgttgtatacaacatcagctaggacaatttgactgaaggctggaggatctgcttcggcttccaaactggcttattcaacacagctgagggccagaggccttgggtcctatccacatggtgataactgcagaattcttggcacataaaggctccttccaaacctctgcacttaagagatgaccatatctcatgagcaaaagaaaagagagagagagagaggatcaaatttttgcattgcttctgggagcttagggtcaattctctggaatgatcctgggctccctgcccccaccctcccattgaaatcatcaggaagaataggggttctgtcttccagtctgtgtaggggacagtagcctgactttgatagttgctggctagtagacacaactagcctaatgacattaacattgacccaccttttgtaattttttactcaagctctgctctctccccctcctcctttactctttctttaaaaggccaagtcacatctaaaaaagttggaatgaagctcagctctttccctgctgtctgtcagtagttactcagtaaaatccgtttttcacactttaactaatgttcggctttgtttatctttgacaataggtgacctggtctttcccacagtatgttggctgggtacaaagagtgaatgaagaatgactgagagaatgagagacagagagagcacatgtgccagtcaggtgaaagacctcttgcattttatgactaagcttcataagtcaaataataacctcaaggaaatttaacttctccatatcagaggcatccaaaccagagtgactccatcttgagtgatggctaggaaaaatggggctgggactggctgggctgcattcctagaaagttaggtattcctagcccctagatgtttatagttaagggaacacattgataacatttactaaacagacccagacttaggagtgtcctgatatcccgatatcttgagaacagaagcattcctaattttgctttaaagataatatcaattcttgcaaaatatagtaattaggaagattaatcctttatcacaaacccttgtggcagagcacatctcctcatgatctttctaaatcctatttataaacaagtattgtacctagggtggatgcattcctcctcctactttcgggaacgtcctactctctatggagtaactgttctctcatcactttactttcttaataaactttcttttgctttgcactgtggactcgccctgaattctttcttacatgagatccaagaaccctctcttggggtctggatcgggactcctttcaggtaacactcacacccccattccaccccacccccatcccaaaaggctttgaaaacattggtattaacaagcaaaggatattttaataaatacatatttgatggtttattgccaccaattttgcttacattgcaataattatttaaattacattaacttttactaaaaatagtaaagataatttcacatcgtttgtttaagttaaacagtttgaagttaaactttaattgttaaaacaatttaagtttttctcttagttgctaaaagaaaaactttggacaagttaacagtttaagcaaacaacaattcatgaattgggcaccacttaaaacaagaagatattcagagcgcttctgcaggtgagcagtaagctttaatagaaaagtaaaacagttacttgattggctacagctgggtgtttgccttatttgggtgtgagggctgggcccggtggctcatgcctgtaatcccagcactttggaaggccgaggtggttggatcatttgaggtcaggagttcaagaccagcctggccaatgtgcttaaaccccgtctctactaaaaatacaaaaattagccggtgtggtggttggctcctgtaatcccagccactctggaggctgaggcaggagaatcgcttgaacctgggaggcagaggttgcagtaagccgagattgcatcattgcactccagcctgcgtgacaaggcaagactctgtcaccaaaaaaaaaaaaaaaaaaaaaaaaggaaaatccctaattagaggctagttggcagtttctgattggttaagcttatgttttgttttactgttgtcttactgtttacactgaattctggtttgcttacatataagctccagctacagagacagatgatatcaggctcatggcctctttatttgctttgacatagtaaagtgttgataatgatttccaaaggaagaaatatcattattttaaaatcaatattcccagtgtatatacaggtaaaatactaagattttaatacacttattatttattaatttatttatttattgagatggagttgctctgtcgcccaggctggagtgcagtggcatgatcccagctaactgcagtctttgcctcctgggttccagcaattctcctgcctcagcctcctgagtagctgggattactggcaccagccaccactcctggctaattttttgtatttttagtagaaatggggtttcacaatgtttgccaggctggtcttaaactcctaaccttaagtgatctgcccgccttggcctcccaaagtgtagggattacaggcgtgagccaccgcgccttgccaaattatttattattatttttttgagacagggtctctgttgcccaagctgtagtggcatggtcacagttcactgcagactccccaggcttaggcgttcctcccacctcagtctcccaagtagctaggattacaggcgtgtaccaccactctgggttaatttttctattttttgtagagacagggtttcactatgtcgcccaggctggtctcgaactcctgtactcaagcagtcctcccaccttgacctcccaaagtgctggatttacaggtgtgatccacaacgtccagcctatatacttaagatacttctaaaccatttgtgttcaacttctgttcttgccccatagtcaccttgagactcatcacttagccaactccaaaagcattgctgattactgtgaattttactaaggttttcttaagagggttccattgtctcaaaattgttcctgaaatatcctgttacctgtctacctgattttctcctatcttcagagttccatttcctgtcctcccgcctgtcattataccttccataagcccctacttttgtcccagcacttttccctctgtcagtttacatatcccaccaagcaaaacaaaaatagcaaaacagtaatgccttctgaatcctcaaattgctcaatcctcagattgctcctcaatctggaaaatgttttatatcaagcccatttataaatcaaggattggcaatttaaaaaattaaaataaagaaaggagaattggaaataaaatgaattggctgggcacggtggctcacgcctgtaatcccagaactttgggaggccgaggtgggtggatcacttgaggtcaggagttcgagaccagcctggccaacatggtgaaaccctgcctgtactgaaaatacaaaaattagctgggtgcggtggcgcacacctgtaatcccagatactcaggaggctgaggcaggagaatcgcttgaacccaggaggcggaggttgcagtgagccgagatcgtgccactacactccagcctgggcaacagagccagactctgtctcaaaaaaaaaaaaaaagtttaattcacgcagagccagctgaacggcagacaggagtttggttattcaaatcagcctaccagaaaattcggagactggggtttttaaagaatgacttggcgggtagggggccagggattggcgaatgctaatttgtcaggtgggaggtgaaatcacagggggttgaagtgggctcttgctgtcttctgttactgagtggaattgcagaacttgttgagccagattatggtctgagtggcgccagctagtgcatcggaatgcgcggtctgaaaagtatctccagcaccaatcttaggttttacaatagtgatgttatccctgagagcaattggggaggtcaggaatcttatagcctctggctgcaagcctcctaaatcataatttctaatcttgtggctaatttgttagttctacaaaggcagactgatccccaggcaagaatggggtttgtttttggaaaggactgttacaatctttgtttcaaagtgaaattagaaattaaattcctcctgtagttagttaggtcttcgcccaggaatgaacaagggcagctcggaagtgagaagcgtggagtcatttaggtcagatcccttgcactgtcataactttctcactgttaggatttttgcaaaggcagtttcgtgaacgtacagagacaggcccttgctattatccctattttttagataaggatatccaggcgatgaggaagttttacttctgggaacagcctggatacgaaaccttcacacgtcagtgtcttttggacattttctcgtcagtacagccctgttgaatgttctcacggtggggaggtacgtgtttaaaatgcggggaaggtgcttttatttcacccctggtgaaactaggggagctaatttttttaaacatgatttttggcccccttgaaccgccggcctggactacgtttcccagcagcccgtgctcaagactacgggtgcctgcaggcggtcagcgtcgtttgcggcggcgcaggcgcggtgcgggcggcggacgggcgggcgcttcgccgtttgaatggctgcgggcccgggccctcacctcacctgaggtccggccgcccaggggtgcgctatgccgtcgggaggtgaccagtcgccaccgcccccgcctccccctccggcggcggcagcctcggatgaggaggaggaggacgacggcgaggcggaagacgccgcgccgcctgccgagtcgcccacccctcagatccagcagcggttcgacgagctgtgcagccgcctcaacatggacgaggcggcgcgggccgaggcctgggacagctaccgcagcatgagcgaaagctacacgctggaggtgcgctcgcgggcggaggggcgcttccggcctagttggcgtgaaccggtgccttccgagccgcgtcgcgcgcctcgagagactctcgggcgggttgcgggctcccagccccgagaggggtggggacttcctctgcgctattccgaggctcttagccgctccgagggctaacccgctctcgccgcgctttcctgcggcttccgaatggggaacgcgtcttgccctaaagtagcacagcaaggctgagatcgcgctggggtcccgttgaggaaaatgggtgtgtgtggcccatctgaccccccgcccgccttgttagtagaatgaactagtgtcgttgtcaagaccacacggacaaggggaggggacttgcccttatttgcaccgcgattaaccgggttgtggcacctgggtctccaggcgtctccgtctgttcgcttccccctgttaaccaaattgcctttgccctggcgttgcgggcgtttgagtcaacgtgctgatgcgttttgggctgtgtttacgtctgtgtaaacaaattaatactcatttccccccaggccagatgaaatgagccctccgccgacccggatgtagacacatgcccccatttgtcactaggatcaggactgtggctacctcgagggctttttggtcaccccgggcattgcacaggactcctgttgttgttgcgatccgggtgtgttaggtcgcagccttcggacagggcttgcagatgagaaaaatggccattctagccagtgagtgtcagctttgtatgcacctccccttcatgggccaatgggaagtgacacggaagtacggattgtttatcagctgtttgactgtgtgtgtggcatttaaacctgaggccatttgatttctcaagtcgttttataattaatttgtagaaagagtcgggcaaataggtccaggatgcaaagcctaaccaaggtattatttaaatatgatgtttttggctatgtgtactgatgagtgaggttatttttaatttgtatttgcattaatagaattttaattcaattactagttccctctttgaattgttaggtctgcagaagatagtgtatggtggctttagaacccgacagacctgaaaccgctggaaaagttcagtatggtgatctctaaactggagatatttgtgtttacctcacagagctgttctgaagattaaataaggcaataatgtagtttctggcacataaagcacccatatggacagtgttttcaagtttactaagctctttgtatatttacatgatctggctgagtaagctatgttcctattcatctctcagtgcctttctgtagtctggcaaagagaaggactggttggctttttatgttgttttttgttttttgggtttttttttggtaaatggccttaaaggcttccaaacaagctcttattttaccctcaagataatcctgtaaatcagatagaacaagcattatcgccatttatttgaggtatttcaactcatagcagttaagttgtatgaagtctagtgatacatgagcaagtatcacgtaatagctggttagtaaattatttttgaaaacatgtttgattactcaattcttttgattactgagactttagtttcagcttcttagcccagtttattcagtaaatgatttactcagtaaaatattcatcaaatatttcttgagcacctattacttgctacacattgttctaggtgctggatatagagcagcaaacctgctcttgtggggcttacagtgaggtacgctgtgacaatatgggatgtcattctcatgggagtgcaagggaaaataaagctcttatgatgtttaatacagaatactggttatggaattttaacttgatttcttgtattttctgtgcatttttaacctgtaactcattctcacagtcctcagccaagaaaatgcagcctctgagactgttaagtaatttccccactgtgttatagctactgtatggcagagccggaatttgaaaccagatctatttgaccctagaagatgtgaccatgagatgttaattttgaggataacttttttagtattatggaattttcaacatatattttttaggaccaaagataaactaggcacagagtctactctttgcataaattatttaaaagagcttcgcgctccattttgtcatctaagcactgtaaaattctcacaagactaattcttctttttaggaacgatatagttgtaaactttctattttttttctttttttttttctccctccaccatccaagtagttgtgaattttctagagccaaaatagaacattatagattatcttttaaaccctttattgaagcagaggataatgctgtgaccgacttaactttatgctttctaagagatattgatatagtagagaaatgcagtagttatgcatctaaatttgcttttacatcataaatcaagaatattatgaaaccatctcccagagatatatgtgatacacagatcttggctgttttttttttttttacaaaagaacatctatgctattgatacatataagtgggtttgtaagacagtctatgtgtaaatgtgaaaaaaggaagaatttccagttcttctcattttcatttagaccagtaatgaatacattgaagctaaaggacatcttccatccttcctcgcttttatagggagaggaaagttgtatcacttcttgagtaaaaagaattgtgacgatcttttacaaacaatgccttaaaaattattatttttgaatgatatctggtagtggatccacaatagtctcatttggttatacaaataaattttatgtattcatgtatgtgttttgattaggtataaaattagtggctgaatatccattcaagcttaattttgtatttctatcacttttctagattttgagcaagattaaaaatataaacaataggccaggcgcaggggctcacgcctgtaatcccagcactttgggaggtctaggtgggcgagtcacgaggtcaggagatcaagaccatcctggctaacacattgaaacccagtctctactaaaaatacaaaaaattagctgagcgtggtggtgggcacctgtagtcccagctactcaggaggctgaggcaggagaatggtgtgaacctgggaggcagagcttggagtgagccaagatggagccactgtactccagcctgggtgacacagtgagactccatctcaaaaaaaataaaaaataaataaaaataaacaataatattgtttgcattactatggctatatagcaaattgccttaaaacttaggggcagaaagcaatttgttttggtcacaggttctgtgagtaaggaattcaggctggggacagtgtggatgtcatgtttctgcgtcaaaatgactggtacctcacctggaagacttgagcaactaggtactggcacagctggagctcgttgggcatctctgtatgtttgttccatgtggtctcaccagcatggtgatccagggtagctaaattcttacatgttggttcaggactccgaaggcacatgtcctaagagagagaaccaagtggaatctatactgccttgtataatcttttagaattacatagtttcacttctacctctgcaattattgatagagacagttaatcagtgtgagggaacgcagacccttgcccaggtccaaggtgagggaaccctctctacctctcagtggaataatgttaatgtcacattataagaagagcctacggggctgggtacagtggctcacacctgtaatcccagcactttggaaggccaaggcggatggatcacttgaggccaggagttcaagaccagcctgggcaacatgacaaaaccctgtctctacaaaaaatacaaaaattagccaggtatggtggcgcacttctgtagtcccagctacttgggaggctgaggtaggaggagtgcttgaacctgggaggtggaggttgcagtgagccaagattgcgccactgcactccagcctgggtgacagagcaagattccatctcaaaaaaaaaaaaaaaaaaaaaaaaaaaaagagcgtatgagatagggtcatcattgaaactaagtttcccacaaaaatataaacaacactttcaatttaaacatacttttaaaaatattgaaatatttatatgtagctttttaactaaaaatcaattttcttttcttttacagggaaatgatcttcattggttagcatgtgccttatatgtggcttgcagaaaatctgttccaactgtaagcaaagggacagtggaaggaaactatgtatctttaactagaatcctgaaatgttcagagcagaggtaactatgttagagtttgacaagtagagtatggctaatgtaagctcataaatcatagtgatagtaagaattatctctgtttatcattttctgagcatttgtacctgtggactggtgaaattagatgctaaaactagcatctaatgattttcctttctttatatcacagttaatatccattatattttacttctttggtgaaaatatttaaattttaatgttttaggcacttgtatggcagaatttatttttaaagtttaggacattgtgtaatattgggagaaatgaaggatattgagaaactttaggagatactccaagttgaaaaggtaaataaaatattatttgctattatacttagaaatatgtgcacaggacttgtggtcttaatataaatggaacatgtaagtatttctcagtttcctgtttggaggataaatgacatgattataatccattttagaaagggtcaaatatgtttaaaagaagaggcagaaattgctttatctgttgtgtaattaaattgattacatttattttttgtgccttttaggtgaattttcttacatggcttattaaagataagtggaaaaatgatgtttagcattttgggggaaattaccactgtcaaaatttatggagttaatggttaaaaaatcacttactaaataaaaaaattaactgggtgtggttgtgcatacctgcaggcctagctacttgggaggctgagatgggaggatcacttgagccctgaatgatggagcagcactgcactccagcctgggccacagagcaagaccttgtctccaaaaaaaaaaaaaaaaaaaaaaaagaaggttactattaaaataattagcaggctgggggcggtggctcacacctgtaatcccagtaatcccagcacttttggaggccaaggtgtgtggatcacttgaggtcaagaattggagatcagcctggccaatatggtgaaaccccgtctcaactaaaaatacaaaaattagccgagtgtggtgacatgcgcctgtaatcttagctactcaggaagccgagtcaggaaaatcacttgagcccaggaggcagaggttgcagtgagcactattgcactccagcctgggtgacaagagcgagactccatctcaaaacaaataaataaaataaaataattcacaatgtcatgttttagctgacgttgtgaattttagtaatctttttttaacctttaactccatcctgagttacattgaccaaagaatcagtatctagaattatatcaggaactactaacagggttaataaaatgaataaagaacatgacttcacaaaggttataattcacatagctaatagatacaggaagagatattcactgtcactaataaagactttcaaagtagaaagataacatttcattctgttttttttgagatggagtcttgctgtttcacccaggccagggtgcaggggcgtgatctcagctcattgcagcctctgcctcccaggttcaaacgattctcccgctgtggcctcccaagtagctgggattacagatgcgcaccaccacacctggctaattttttgtatttttagtagagacgggtttcaccatgttggccaggctggtttccaactcccgacctcaggtgatccacccgccttggactcccaaagtgctggcattacaggtgtgagccaccatgcctggccaacattttattcttatcattgggaaaatttgaagtctggtataccaagtttggtcactgtacagggaaacaggaactctattttttttatttttcagttcttttttttttttttttttttttttgagatggagtctcactctgctgcccaggctggagtgcagtagctcaatctctactcactgcaacctccacttcccaggttcaggtgattctcatgcttcagcctcccggagtagctgggataaaggcacataccactatacctgactaatttttgtattttttgtggagaccaggtttcaccgtgttgaccaggctagtctcgaactcctgacctcaagtgatctacctgcctcggtctcccaaagtgctgggattacaggcatgagccactgcgctcaggcaggaactctatattgctggtgtacattggtgagagtcaaaattgacacaactactttactagcaaatttggtggtatctagtaatattgaaggtgcacattctcttactgtacttcttggagtagtccccaaagaaactcctgcacacatgtataaggatgttttcattacaacatgttttgttatcatggaatattagaaacaacctaaatttccattggttggggagtgaatgcaaaaagtcattgtatgttcatatgaaagaatgtttttagcaattaaaatgaatatatcttacatatcaacattaatgtcagaaacattattgagtgtgaaaaagcaagttgcagaataccactgaagtatgatagcatttatataaaatgtaaaaacacgtaataagatattgcttattgtttacacatacatgtgtatgtgtagtaagtgtgaaaacataggaaggattaagaccaactttagaatggtttttatctttggggtagaagggtaaggatgggattagggaggagtataaaatggtaattttgactgtttctttttctttttctttttcttttttgagacagagtctcgcattgtcgccaggctggagtgcagtggcgtgatctcggctcactgcaacctccgcctcccaggtttaagtgattttcctgcctcagcctcctgagtagctgggattacaggtgcccgccaccacgcccagctaattttttgtatttttagtagagatcgggttttaccatgttggccatgctggtttcaaactcctgaccttgtgaatctcccacctcggcctcccaaagtgctgggattacaggtgtgagctactgcgcctagccttgactgcttctatagtgttgctagtttaaaaaaaaatctgaagtggcaggaggaggtggctcacacctgtaatcacagtgttctaggaagccaaagtaggaggatcactcaagcccaggagtctgcagtgagctgtgatcttgccactgaactccaacatgggtgatagaacgaaaccctatctcttacaaaaacaaaaacgacaaaatttatttaatatattaacatttaaaaaatctggcagtgaaccaacgtgaatgttggttaggttactcttgttaattttggtttgtattttcaaatatttcatagttaacaaatactttaggtaacctaaacaaaatggattaggaggatcagaggaatataccaatctgtaagaaattaagctagtcagagacatgagttgtgattttatttcactgtctaaaagtaatataatttaatgcgataatattgatttacttttgaatacttacttttgtatactttagccttatgttaattatgaaatatcttgtttgtctttaataccagcttaatcgaattttttaataagatgaagaagtgggaagacatggcaaatctacccccacatttcagagaacgtactgagagattagaaagaaacttcactgtttctgctgtaatttttaagaaatatgaacccatttttcaggacatctttaaataccctcaagaggagcaacctcgtcagcagcgaggaaggaaacagcggtaggttttcttgttggttcatcaggaatacacgttagtctgtgctgcagtgttgatattctgctaggttttttttttctggttttaaaaaagaaataagatttaaaaaatctttttcctcagtcgttttcttttaatgatgctttttttgcttttcattgtgggttagccatgaagagtggcttttttcatattgctaaatgtatacaggtctttgtttctataaactttcatttgtcttattttattttattattattttttcctcagtgatccttgttctgaaaccttcctttttcatttaagcaacaaaaaatgcagactgtacaagtcagacttagggattttcaccctttcgccgccttggagatgtatctgtatctgtatctggatatatatattttttattgcgcaggggccatgctaatcaatgtattgttccaattttagtatatgtgctgccgaagggagcactgccctagatatagatcactatattaaccactatattttctactagtgattatatagactattttatgtcaaactgagtaataaataatccccttgaaatgacttctctatgtattttgatgtttataatgaattcagaatagagagactggattgggaaaagacaggagaactgaaactattatgaatttgtgctttctgatcacttctgcaaagtctataagcatgctctgactcagtgttttctacctttcctgatagataaaggcagttatggaatacacattttccttctttatcattgaaagttttttcataaagtagaaatgaaaattctaacaattagaaaaatgttgacaagaaaagtaaagggaaaggagttaaaattatttggctagaataaataatgtttgcttctctttaaatataaaagttttcccagactgtgaaggatgtttacattaagtgtaaccttttaaaaataaaatgggggaatgacaaaccaggaggaaaaaaaatttaaaaaaactagaactatttacattttaatatagatggcaccactgatacagaagcatctggtctagctcacttacagttttggggaattgactatttaaaatgaagcattctgagccaggcgggttggctcacgcctgtaatcccagcactttaggaggctgaggcaggcgaatcacctgagttcaggagttcaagaccagcctggccaacgtggcaaaaccccgtctctactaaaaatacaaaaattagctgtgcgtggtggtgcatgcctataatcccagctactcgggaggctgagtcagtagaatcccttgaaccgagaggcagaagttgtgagccaagatcgtaccattgcattcgagcctgggcgacaagaatgaaactccatctcataaataaataagtaaacaaataaaaggaggtattctggctgagtgcctgtaatcccagcactttgggaggccaaggcgggtggatcactctaggtcgggagttcgagaccagcctggccaacgtggcgaaaccccgtctctactaaaaataaaaaaattagcggggtgtggtggtgggtgcctgtaatcccagctacttgggagggagaggtggaagaatcacttgaacctcagagttggaggttgcagtgagccgagatcacgccactgcactccagcctgggcgatagagcgagactccattttaataaataaataaataaataaataaataaaatgacatattctcctagcactttgggaggccgaggcaggtggattgcttgaggtcaggagttcaagactagcctggccaatgtgccaaaaccccatctccactaaaaatacaaaaattaggcaggtatggtggtgtgtgcctgttgtcccagctacttgagaggctgaggcaggtgaatcacttgaacccaggagtcggaggtttcagtgagctgcgatcgcgccactgcactccagcctaggtgacagagtgagacttcgtctccaaataaataaataaaaaatgaagtattctaaagtttgaatagaagctttgtactgagtctgagtgaggccaatgtgatcatttatgggaagatatcttctttctttggagtatctggaaaataatttcagattgcacttgttttgctatttcttaggatatatatactacctaattctaattaagagaattttaaaaggccatgtgcagtggctcacacctgatccccagcactttgggaggctgaagtggacagatcacttgagcccaggagtttgagaccagcctggacagtatggcgaaacttcatctccacaaaaaatagaaaaattagcttggagtggtggcgcacacctgtggtcccagctactggggaggctgaggtggggggatcacttgagcctgggaggttgaggctgcagtgagctgtgctcataccactgtactccagtttgggtgacagagcaagaccttgtctcaaaaaaaaaaaaaaaaaagtaaatcactttattagagattttacattttaatcactttgtatactttctgttagctctttctgttaactatagtcataatgtatagcacttactgagcatttactttggggcagggactcttaagacttcaatatgtattacttcagttaatccctctgacaaccttgtgatactcatactattgttagatagagaaaattagccgcagagaggttaagtaatttggccagggtcgcacaaccaagcgtggagttcttattgaaactgactgcgggaacccatgtgctttactgtgactatatactgcatctctcacacactatctgaaaatgtgtcactatttgtttagcacttatccacaggaaatactgttaggtattatgtaggacacaggcattttttaaaacaccaaaccccacagtctctgtcttctgagagcttacagtacagtcagcgagatgaggcaggtatgaagattccagtgcatgcaatgcagtgtgttataaaagtcccatgactaccagagggaatacagatgtaaaacttaggaggaaaagaaatcactctggatgagccagtcaggtaagtttacatggaataagtagaaatgggtcttgaaagatgggtacgagtttgataggtgaatttgaagatacagatagcaccttctgtgtagaggaaacaagaaaagacaaaagcagtaaagcaagaagaaatgtgggaggttagtcaagtttttttttctagaattctcaagttgtagagccagaattaagagtagcttaagtgttaagctaaaaaaaattgaattttattttggtaggcaactaaaactagaaatagtttatcatgcgcctatggtagagaggctacttttaaaagcagaacactgacatttaatccttgccatggactggtgaactaagtacagtattgtacccaagtagagtaatcttttgacagatgaaatgactaaggcccaggtgagcaagtaccctagctaatggcagtgctggaactaaatctaatctaatcttctccacggaatttcgttcttctgggcaccttgttagaataaggctgttgggaggtggagaccacagatttcttgtctaaaagttgtcagaggttttggtagaaaagccaagcttaaagcaggtctgaaacttggcagactacttggcaatatacaacaggtactcttaatggatggaagtataaggaattataggaagctcataatttacattaaaaaggccttttgtgatttgatatagtctggaatatctttaaggagggagggagggatacaggtcattagctatgataaaggagaaaaaaataaggacatatctgactgcatatagtggtcctaaagcagcatagcattgctgtgtcatcaaaagaactatttttattcattttattttccacctcacctatcttgccctcaaaaaactttaaaaaattctttaagaattttcttttctttgagatgggctctttccctggatcccagctatttcctaccaatattttgttaaggcagaacgtccacgttttccatgtgaagctgaatctgttgtctctccctttaactgtgggttttattttacacctgatttataatcatttgggatttttttttctgattcttctgttgtctcatgacttttttttttcttcccccaaaggcgacagccctgtactgtgtctgaaattttccatttttgttgggtgctttttatatatgcaaaaggtaagaaaatagtaatatttatttagatttaatatgtctatttacattttcaggtattaattttgtcaacttctaatatgtatcaggaaaagattttcactgaaaattttctcaagggttttaatcctagattcttttttaagtattgccttttcatcaaaggatctattggatttctttacaatatccaaatcttctcttattaaatggaaagtccattaactttgttgtatacaacatcttttctacccaaagctactcttttaaattatgagctgaaaacacattattctgtatatgcttgtattgtgaactctatttttcatgagatgtatcttatttagttgagcgcaattactgatcaacctcagagctgttcagatttttttttgtatcttgttcagataagtatacttagtcaaatgcttttatatactatttattttctttcccttttttcttgtctcatttaacctacccaaggtctgcattcagtgaaatacatgtctctattattttttgtcctttttgtatttatttatttatttatttatttgagatggaatctcattctgtctcccagggtagattgtagtggcacaatctcggctcactgcagcctacacctcccaggttcaagtaattctcctgcctcagcctcccgaatagccgtgattacaggcgcccaccaccatgcccagctaatttttgtgttttcagtagagatggggtttcaccatgttggccaggctggtctcaaactcctgacctcaggtgatctgcctgccctggcctcccacagtgctgggattataggcacgagccactgcgcccagttcctttttatatttctatgtagaaacaattctttaaagtagataggaaagtgcagttatattattatatagctttcttctgtatactatgtggaatgcctttgccactaagatggctcaataaaatgcaaagttaacaaagaatcttagagctggaaggagtttcataagtataagagagactctcattattagattaactagcttaacttactttattttatttttttttgagatggagtctcactctgttgcccaggctggagtgcagtggtgcgatctcggcccactgcaacctctgctgcccgggttcaagcaatctcctgcctcagcctcccgagtagctgggattacaggtgcctgccactgtgcccggctaattttttgtagtttttagtagagacggagtttcaccatcttggccaggctggccttgaactcctgacctcgtgatccacctgcgtcagcctcccaaagtgctgggcttacaggcgtgagccatcgcacccggcctagcttaactcatttactttattttttatttttatttttatttttgagacaggatcttgctctgttgcccaggctggagtgcagtggtatgatctctgctcactgcaacctccgcctcttgtgttcaagtgattcttgtggctcagcctcttgagtagctgggattgcaggcatgcaccattatacctggctaatttttgtatttttagtagtgttggggttttgccatgttggccagggtggtctcgaactcctgacctcaagtgatctgccacctcggcctcccaaagtgttgggattacaggtgtgagccaccatgctcagtcagcttagttactttaaagattaggcagctgagcccagaaactagctgctgggaacaaagctaagattgaactcagatctcctggttcctggttcttagtttcatactggctgtgaaggcctctgggaagaatgtgttacattgttggtctccaggtttgatttgtcctggtccctctctggctaattagggtgagagccgccatccttccttccctgagctgcatgcttgattcaagagaaaaatctttcttttgtcatacatgacactggcatgtttctttagtgatgataaaggcgacatgatcagtggcatgaaataaaggttttggagtatataaaccatttttacagcggctacaaattttagaatgtgtgactgctattatgtatgatggtaatcttttcatatgattgtattgggcaagtatgtctcatttctaggatttttatctgttttgtttgtcttttatggcatatgtgtacttagaagtaaatatagttggtactatatataatatgtacaatacaataaaaaataatttcattgtccttattttgttctcactggacctgttggggtggttttttctctgtaattaactcagtgtttgacttttatctcattaattcagtttataataattccaccttaagaacctttgtggattgggcatgttggcatatgcctggaatcctagctacttgggaggttgaggtgggagaatcgcttgaacctgggaagcggaggctgcagtgagctgagattgcacctccagtctgggcgactttgagaccgtgtctcgaaaaaaaaaaaaaaaaaaaagaaacttggtcctctcacagtccaccactgtgatcttttataatacacgatgatcttttctaatagtcatttaattgctttaattcagttctcatttatttgggggaaaggtgtactcttttatagccacctttctaatgacaaataagccaactctggagatgaaacatttctatttacttgttatctttgttgattaaaagataaaatacctcacaaagtcagatttatttgtaaggtcaggatttgaaatagaaaatacgtcatgttgagagagtcctagaatttaatttaaattagattctgatctttaggggcatttcagctttttattagatgttacagtactgcctttttttttttttttttttgccttctatggcaagtgcacaccagtaacaagtttaggcttgttggtgtgatgggctttgtagcttgaaatcagtaggtgctacttacttccttttttacacatgaggaaccaagtatattttaatattaaacctctttatagaagaaccaagcaagttggtttggctgtatcaatgcacagtttaatgtgttgattatcgtttgcctctttggcagagaagaatttttttttctctttagttcatttaagttgatttgttgaatgtttccatctatacaaaaaaagaattgctttgtatacgctgaggtaagtggtaactttctttggaggaacagagagaaagggaaacctgaaacaaagctgcaggtgtgtgtgtgtgtgtacatgtacacttgggtaggcgttaagtgtgaaatgctgaggtttggaaataattcttcatatgtatgttagctatttaaattgaatttatctgatgatacaagaatgtaaaatcaccatgaagcatacatgtgcagtgtttaactaaaaaaggatgggcttgaagttataaaataactagaaataattcttaatttctagaaaattaagataataataaaatggtttaactacacgtaaaaatgtgttcagtgttagagttcaaccagcactgcagaaattacatgtttctgtcagtttaggtttttgatttcttatttccctgttaccaagcatcagcaattattcttgggattattagccctggaattgaaagatatttaatggtactcctgttgcattaatttgtctgagtttatgtagaaaagtattaaaaatgttactgttggagtctgataaaaagttctggtcttttaaaaatatgtgtatgagaaatagcatgaactcaggaggcagagcttgcagtgagctgagatcgtgccactgcactccagcctgggcgacagtgagactccatctcaaaaaaaaaaaatgtatatgagaataattaagtgaattattttttcggctgtctcctaagtatttctaataattttcatgacagaaaaatgttttcatgcaaaacaatttcttacagtttgagataatttataaatgttttgtgttcagaattttcaaagaaaagaccaatgataaagttttattcagctactaggtatttaataaacacttaatgaatgaatggcatttttagtaaagttatagttttcactaagctgttagacatttattaatttattaaaggccaggcatggtggtttacacctgtaatcctagcactttgggaggccaaggcagaaggatcacttgagtccaggagttcaagaccagcctgggcaacatagcaagactccatctctaaaaaaagtttttaaattagccatgtgtggtggcgtgtacctgtaatttcagctgcccaggaggctgagacaggaagatcccttgagcccaagaggttgagggtgcagtgagccatgatcataccactgtactccagcctgggtgacccaccaagactctgtctcttaaaaataaataaataaagaaatttattaagatataagagtaatatgtcaaaatgtaaatttgccaaaacacttattgtaatgagtcaattttgtacaattgttttgtaatgtcataataagtaaaggaagaaattttttaaaaatgttacaaagtcaatgctaatttaactctgtaactgcttataatcctgcaggtaatttccccatgattagtgatgatttggtcaattcttatcacctgctgctgtgtgctttggacttagtttatggaaatgcacttcagtgttctaatcgtaaagaacttgtgaaccctaattttaaaggtaggtttgtaaatcaaagatttttgggcaatctgcgtttctgtgttatgtttacccttggagttgtacaggtttcctagcatcagtattttgaagagctcctgtcattacggctatccagggtacttataactaagagtcaagctgcctgtaaaaatatttttggataaacagttgcagataccacaaagtttaaagtcttaaatgacaacttcagaagtttctgaaatatatactcaacaaggagaaggcatttagaaactcagagttgcgaagatgacattaaagccgatgatgtttttctacattggcaaactttgtgcctgacacattgtaggagatcaaaaagaatttgttgaaagaatcttacttcaaattttggtacagaagaatagttatggttctaaaataaagaaaatgaactttcatcttttaaactaacagatatatggaaatgatgattttggcattgcatttaatagaacttaggtatataatttctatgaatgataaacagttacaagcccaaattatgatttacaaagcaaatattaaaaagtatgtatagagttaaaataaatattgctgctgctatttgagtaatattgtaataggattctgggtgattctcagttttgaggtaatttcagttaaaatttcagcttgtctatcaaggtagatttttaaaattagtggagttcagttgctcctggtatggtaaatttaatgttcctcatattcttttctgttctttctctcatttctatcataactcccttgtatattcccaaaaagctgcttcctttcacttttatcttttttttgttttaaattaaaaagaatttttttttttgagacagggtctcactctgtcacccaggctgggatgcagtggtgcaatcacaattcactgcagcctcaatctcctgggctcagatgatcctctcatctcagcctcccaggtagctgggactacagacatacaccaccacacccagctaatttttttgtatttttcagtatagatgaggtttcgccatgtttcctgggctggtctcaaactcctggactcaagcgatgtacccaccttggcctcccaaagtggattataggaatggagccactatgcccaacctttacctcttttatttttatttgattttttttcttttgtgctgagtctagggcaagaataaattgtaaactagtatgaaatacatctaatacattcaaattaaagtatataatatctgaacagtgtaatttttttaaagtggtgttttttgtttaaaagtagacttacttgcaaagttgtattttgtggtttttagatcttagtatcctaaaatttgatatcctaaaatttaagttttaagtttcccttaaccatctctacataaataattgaataactgaaatctttcgagtaatgatacactttacttctatttgccattttttgacaaattcttagcgttgaaataggcccatatatactgtttcctatacatttgtatgctaagtggtatactgattatactctatgttttacattttagtttattacaaattggcttattgtgtgctgatatctctgttttgtgattctatacaccataggcttatctgaagattttcatgctaaagattctaaaccttcctctgaccccccttgtatcattgagaaactgtgttccttacatgatggcctagttttggaagcaaaggggataaaggaacatttctggaaaccctatattaggaaactttatgaaaaaaaggtttgtaagtagcaaagaaataacgtgaaaatgttttctggagaaaaacttgatttaacatgacgacttaaggatctcttctttcatcatagctccttaagggaaaagaagaaaatctcactgggtttctagaacctgggaactttggagagagtttgtgagtacttctgtataaaatgttttaatattttaaattgtatacttaggaaacttcagaagttagtgtttttattgtttgtactctggaaactgagaatatgttttgtgagagaatacagggaagcaaaaattctgtcacctaaatataagcacactttttaaatgtgttcaaaattgtatggctgtttttgaagtttctttaagcttctggattataaattttgaaataaattcttttggaactatatgggtgaaaattgatgatgtgtaagtgtggaagtcttcaggggtgcctagagcagctagacagatagttaagcttctcaccggaagttgcacctaccagcagctgaaacactgtcagcaaaatacttgtactgtgtgatggatgagcttggggatagcaggattacatgtgatactatccagtttttgttttgttttgttttttgagatggagtctcgctgtgtcgcccaggctggaatgcagtggcatgatctcggctcactgcaacctctgcctcccaggttcaagcgattcttctgcctcagcctcctgagtagctgtgaatacaggcacgtgccaccatgcccagctaatttttgtatttttagtagagacagggtttcaccatattggccaggctggtctcaaactcctgacttcgtgatccacctgcctcagcctcccaaagtgctgggattacagacgggagctactgcacccagctatactatccagttcttataactacaagttaccctaccaaagtttaactttcaaaaaactattagaacttttagtaaataaaaaaatgaaataattaattgaaatggcagttctgtgagagagtacattttgtctgtatttgtttttcctatagtaaagccatcaataaggcctatgaggagtatgttttatctgttgggaatttagatgagcggatatttcttggagaggatgctgaggaggaaattgggactctctcaaggtgtctgaacgctggttcaggaacagagactgctgaaagggtgcagatgaaaaacatcttacagcagcattttgacaaggtgagtttagccatgccagaagagtagaaatacaggagcaggtaagccaggggttcttttttattttggtaatttcatgtttgtgttttacttgcctacagtatgaaggagaaaattctcatcatacttctcttaattgaaaaaggtatctctatgatatttgctttgttaatatcaactttcattcattttagtgaggtctgagaaaaagaaattaatataaatttaaacaaatgtgtcatgctgataattgttggttttaaaaagatgggccagtaatatatggtcttatatgtagtgaacatagtgtaggcatttagaaagtgataattgacctgactggggccttcatttaagagactggagaaaatgaggatctacagtctttaagaaaattcttttaaactgaatttcaggaccacgtggtattatttcaaacagacacttagagtgatgcaggccaagagtttcccttctgctatgtggtggaacagaaaacaccaaacttctggcaagtgccaccagggaaacactgggtaatccaagggccagttcacctggaagtgagctgcttcagacttgagactggtctgcttattcattcaacagatattcctaaagcattttatatgtcaggttgtgtcctggacactggagataaagcagtgaacaaaataaccacgagaaccctgttctaaagaagcttatattccagtgtggggagatggacaggagataaacaagtaaatatatagtatgttgggtgatgatagatgaagaaaatagagtagtaatacaaaatattgaggggaggggagaatgggatgggtgggctgtggtaggtaaggtggttgggaacggtgtcacacaccagaagtaagtgaggaagcaagccatatgaatagctgggtaaatgtatttgaagctgagagcataacaaatgcaaagccgtgaggttggaacaggattagctttttggaggaacagtgagaatgctagtgtggtaggaatagagtgagggaaaaagtggtaagaagtgacgggaggccaggtgtgatggctcatacttgtaatcctagcacattgggagactgaggcagaagactgcctgagcccaggagttcaagactagtctgggcaacaaagtgagaccccgtctctacataaaatattaatacaaaaaataagctggccatggttgtgtccacctgtgggcccagctacttgcgaggctgagttaggaggattcgttgagcccaggagttccaggctgcagtgagccgtgatcgcgtcactgccctccagcctgggtgacagagcaagagcctgtctttaaaaaaaaagaaaagaagaagaaaaagaaatgcagggaagagggaacaagagagccagacagaccgtgtaggctttggaagccatcgtaaggacttttgcttctgctctgattgaggtgaaagccattaagagggttattaagaggagtgactgatttacatttttaaaggtcttctgggaaagtgggattagaggcaagggtggaagtagggagttaagaagctattggaatgattctggcaatagtttatggtggcttgcttcagagaatggtttgtagctgggccatattttggagatggcacccacaggatttaccgagggtttgtatctagggtatgagaaaaagagaacagtgatgtctccagttgggtgaatgatataaaagctaaaatcctgacaagtgcctgtaatgttgtaagttatctggccctggctctctctgaattcatctactttcctccctcctcacccacttatgccacattaacctccttttttgttcttcagatatgccaggcatgcctgcaacacaaagcctttgcctttgcaattccctctgcctaaactgtattgcttcaagagactcatgtggcttccttctcacttcattctggtctctgataacccaactgctatgtcaataataaccacaacatcctccccaaccctcaggacttcttttccccctgactctgcttgctagtgtttctcttcgtatttatcactgtctgacagtaagtagggaggtaggtagaaagaattgtttattacctgtctccttgcattagaatataagcttcaccaaggctgtgaccagtgttgtatgcagcgcttggcacatagtagacattcggggaacatttactactgaaatttattaagagggaagagcaagtctgggggaaggggaatcaagagttagggttattagcatgttaaattagagatgtcttttaagcatcctagtagagaagttgaatagacagttgaggtatacaagaccggagttcacagttcacagtagaggttaggggttgtgtatatatgtcctggggtcatcagggtgggtacagatagctttttttttttttttttttgagatggagtctcgctctgtcacccaggctggagtgcagtggtgcaatctcggctcactgtgacctctgccacctgggttcaagcgattctcctgcctcagcctcctgagtagctgggattacaggtgcctgccaccatgcccagctaattttttgtatttttagtagaaacggcatttcaccatcttggctagtctggtcttgaactcctgacctcatgatcttcccgcctcggcttcctgaagtgctgggattataggcgtgagccaccatgcccagccgtagatggcttttaaagctataaaatgaggagggattacttagaggtatgaattgagagagaatacaagaggactaaggacaaagctcagggtcactccaaattttgtaagtcttcatttggagatggaacatcctaatatttttaagataccgacttaatatttgcacccaagttaaagattcctcttgatcagaatgaacaggaagctttaagctaagcacagtgctaccaagaagcaccatgttgaccttgaggactctggcaggaagctgtttgtggttgtcacacctagtttcctctgtgaaactactgctgcctgtgggtgatgtggttatatgctgctggctgctgttgattctcctgtttgtgtacaaggtgtttttccctcccagtgcctcccaatgtaggcatcggttcatgcacagtgaagtagttggctgcaagaaaccttgtaaggcagggagcagccttttgaatgcaataatctacccaaatcattttattgacttaattatagaatgaatttctttgaaacaaagtgaaagtcttagttgtattacactttaagacatagagaaaacatgtaggtttgtttctgtatacagtaaatttctgtgcttttctatatcttatgaaacttgaatagttggctctgttgccaggtgaaagttttgctaggttttttaaaaaattagaataagtacatttaatacacagggaaattttatcttgaatattaaaagacattgttaagctatcttaacctttcagagtttatttgaaaaatcagaaagatgttttactggctcctttgacaccaagtcacatcttctccatatttattgtcaagaatgttgactttaacttatttctctgaagacctgtctaccttagggggagaacctgtgatagattctggtaaccaaaggtagaggaggggcaggaagaccaatgaaggctgttctgcatcaagttgcctttttagggaatgttcaacttattatctgtctctgaagcaaatttgaatatttggatggtgggtgtattaattcattttaacgctgctgataaagacatgcccaaaactgggaacaaaaagaggtttaattggacttacagttccacatgactggggagtcctcagaatcatggtgtgaggcgaaaggcacttcttaggtggcggtggcaagagaaaaatgaggaagaagcaaaagtggaaacccctgataaggccgtcagatctcgcgagacgtattcactatcacaagaatagaacgggaaagactggcctccataattcaattacctcccactgggtgcctcacacagcacatgggaattctgggaaatacaattcaagttgaggcttcgatgcagacatagccaaaccatatcagtaggcttttgttaaatcatggattttttttggaaccaaatttaatcacaattttcttttatctttgagtgtctgcaaaaatagcagtagatgggaattgtgaaattctgtttctcagagctgagaataatcttaatttttcaggtgagcagaatgcttatctttgcctccgagcataagttttacaagagggaatgtagggagctgtaccttattttagagttttaacttttaagagacaaacttttagttagctaaaatacaaattattctttcacaccttcgtcttcacatggatattggcggctcttaatgctgttatgtttaaattccaagaatggtgacatttgagtcactaaaatttattgatattgtaaagataaagtcttactggcttgaagtcccatttgtgaagtgaattaaagtctttctggcctaaaataatgttctttaaaaaatgtttattaattctgtgtaattttttttttctttagtccaaagcacttagaatctccacaccactaactggtgttaggtacattaaggagaatagcccttgtgtgactccagtttctacagctacgcatagcttgagtcgtcttcacaccatgctgacaggcctcaggaatgcaccaagtgagaaactggaacagattctcaggttagtttgagccctgtctgctttctaagatttggttattgaccattttccaatttcctattctttcattattaatgccttaattcacccatgaataattttttatcaattgtatactcagtcctgttgtgagtctatagaggacctagcaataagatgtataagtggaagatcttctttccttagatttctttaatataatacaagacacagtaactaataacaccagacagtgtagagtaaaacacaaaagtgtcttattgccaactgttctttcaagatttcagggagtggtgaggtgggggcggggggaagctcagtgatgatgggaattgtcaaaggactttatgaagagggttgaacctgaggtaagttctgaagggtgactcagatttgaaaagattaatagagttccacatgttcataaagcaggacaaaaaccactgtaacttttgtaagctctataaaacatccttatcctggaaaggaagttcactgcatttagttcctttgatctccctgagactggtaggaatatcattgagttttaattaaaagcccagtaggctgaatctcatcatcttatgcataacctttggcaagttgatttgaaaagttacctccaaggtccctctcagtcctaaaaccttatgatatgataacgtagacccaaaaggaccccattttatttctgatgatggtatatcaagaagaccctatatgtacacataagtaatttcccactcatagccaggcttcttaaatgccaactacttttcctttacattttagtgaagtctgctttattcataaacttgattgtgatttatactcaacaagttatatctctgtggcctcttcctgagtcatgtttttcagatgcaccttgtttgccttgaatttagaagcatttcgtaaatacatttcagaagccatcttaatctctgtgtcttccagatcgctttacagtttctaactaggcataacagcattttaaatcttaggtaccattagtggggttaaataaatattaccagtaaatactaggtaaaataaagggtgctatttttgttgaaaggtatgtgtgtgtgtgttcccagaaaaattctgcttgtatatgtattcagtagttatctctagcaggactgtaattgatttttattctctttataattttttaaacttgcttcattttcacaaagaatatgtatataattatatatatatttgtgatcaagataaaaacagttgttacaaaaagcttacatggtgataatttgtataatgcttctggattgaacatatattgctttctaataatagaaagactgaagtaaacctcgttggcgggaaaaaaatgtagaatgccaggaacagtttatgtgagtctgtagtatgggttttacaccccttcattctattttcttccaggtgttcttaatgggagttttactgtcctctagggaaatagttaagggcaagtttgggataatcagtgactggggatgtgtaggacaggtgggggacagtcatagatatcgaatgggcccaggccaaggttgctaaacttcctgcactgaaaggtgtatccccggccgggcgaagtggctcattcctgtaatcctaacactttgggagcctgaggcaagtggatcacttgaggccaggagttcgagaccagcctggccaacatggtgaaaccccatctctactgaaaatacaaaaattagctgggcgtggtggcaggtgcctgcagttccagctacttggaggctgaggcaggagaatcacttgaacctgggaggtggaggttgcagtgagccaagactgcatcactgcattccatcctgggtgaaagagcgagactctgtctcaaaaaaaatatatatatataaaataaaaggtgtagctcccacaagaaaagtttttttttttttcattcaaactggtaataccaccacctttgaaaaggaagtatgggatctcttggattaatttgggaagtgtatagtttctgttcagagtgttttatatttacatgttagtgaaattatagaaacattttatccccttgtgacttgacaagacctttaaattatgttatttctcattaccttttttaggacatgttccagagatccaacccaggctattgctaacagactgaaagaaatgtttgaaatatattctcagcatttccagccagacgaggatttcagtaattgtgctaaaggtaaggtttaacattgttattctgcttttatgtttgaagtttaactaaatggagtcatttcttactaactaagaaagatgaggaaaagatttatgactttagactgaaggctaggatatggctgtccaatttttctggtcaaccaactgatttctgagcccttctcagtaagatagaaattttagaatggtatctttattatattggacttctgatgcttttttatctgcaaatctttaggttttttttgtaaactggaaattaaatagaagtgtagtgattcttcaacatattgagaataaggacaggagatatcactgttatgggcccaaacctggcctaggaattgtttgctgtcaggaattggaactaagtaggtgtggactagtaagccaattacatacctcttagcattggtctgttttgttcaaacatagaggaaaaaaaagggtgttagtcttaaatgatattacagttccttatgtgcaaatttcatttaataattttagaaaaatgtgactgttaccatgaagaaaattaaggtatcttagggataattaaaacaccaatcataagaagtgtgcatatctaaagtattgggttggttttgaattttattttgtgagtaaaggaggaggaatgggcctttattttctttgtgtgccatttttgtggggtttttttttttattatttctacagaaattgccagcaaacattttcgttttgcggagatgctttactataaagtattagaatctgttattgagcaggaacaaaaaagactaggagacatggatttatctgtgagtaaaataaccaatgtattgatcagcgcaatgaaacataatttccttcctgccctattctgtgggttgttttttttactttatatatagtctcctttcatacacaaaagtttttaattttgatgaaatccaatatattttttcactagttgcctgtgcttttgttttatgtatgtatgtatgtatgtatttacctatttgagatggagtcttgcgctgtcgccaaggctggagtgtagtggcacgatctcggctcaatgcaacctccgcctcctgggttcaagcaattctcctgcctcagtctcccaaatagctgggattataggcatgtgccaccatgcccagctcatttttgtatttttcgtagagatggggttttgccatgttggccaggctggtcttgaactccagacgtcaggtggtccgcatgccttggcctcccaaagtgctaggattacaggcgtgagccaccgcacctggcctgttgcctgtgcctttggtgcttcagtagcttttaattaaaaaataataattattgacaatgttggaaaattataagcaaaaagaacaaaataaaaatcatctatgattaatgtcatcctatgataaacatattcacttttggtacatggtcatctagccagtcacctgcctgcctgcctttctgtttttttgggtttgttgttgagacagagtctcactctcttgcccaggctagagtgcagtggtgcaatctcggctcactgcaacctctgcctcccagattcaagtgattcttgaacagtgttgcctgggctggtctcaaactctggacctcaggtgatctgcctgcttcggccttccaaagtgctggaattacaggtatgagccacctgcctggcccctttcaatatttttttttccttttttttttttttttttttttttgagccagagtttcgctcttgttgctcaggctggagtgcagtggtgcaacgtcggcttactgcaacctctacctcctgggttcaattgcttctcctgcctcagcctctgagtagctgggactacaggtgtgtgccaccacacctggctaattttctatttttagtagagatggggtttcaccatgttggtcaggctggtctcaaactcctgacgtcaggtgatctgcccaccttggcctcccaaagtgctgggattacaggcgtgagccactgcgcccggtccccctttcagttttttatagcacttactgtaaatactgttttgaaacatctttccctgtcattgttcttctaagcatcagtgtgtgtgtgtattttggttagagatgtaatctcttttaagatacattttataataggtaaggttttaaaattctcatacattccttttatatatttcctctactaaaaaatgggctttatttatataattaagaaaggttttgtaagaaaataaggacacactttgcactcactcagaaaatgagactttctttggtattttcacttaagttcactgggtatgaaatgactttttagactaagtaaatgtttctaatgctaataactttattttatagggtattctggaacaagatgcgttccacagatctctcttggcctgctgccttgaggtcgtcactttttcttataagcctcctgggaattttccatttattactgaaatatttgatgtgcctctttatcatttttataaggtatttttaaaaatatgatactaatggggatattgtagatgagaccaacttcctgttgttagtcatttagttcaagttaacatctaagaacatttattctgtttttatttacatagttaatctctatttgtggagtagaaaagaaatagaatcttaagacctatgtaaattcttttaatattgtatgaaagatctattttgggtaaaagctttgattcctctctatctaataaaagtttttagaatactgtgatttttatgagctgagaaggcttaaaaaaagtagcacacatgtcactagctaatcttgtatagcagcctttttttattttatgaaaattaaataccattgaaaatgtcagaaaaaaaataaaaagttctctttcatgtgttacagagaggcatagagttaaagcattgatttggtagctagttcttttttttttttgagatggagtcttgctctgtcgcccaggctggagtgcagtggcgccatctcagctcacagcaagctccacctcctgggttcacgccattctcctgcctcagcctgccgagtagctgggactacaggcggccgccaccacacccggctaattttttgtatttttagtagagacggggtttcaccgtgttagccaggatggtctcgatctcctgacctcgtgatctgcccgccacggccccccagagtgctgggattacaggctggtagctatttcttgatactgacttagcatatgagtttatcttaactctcataagatagtcaaaactaatttttatagtggcatagattaaatgtttagagatttttatatgaaattttaagagtaatgtttttcaacctcaatgtacaaaacatgtattttcattaaaaaattttgaaatacatcacaatgtaaaccattttatataattcatagtttgaactataattatttacaaagacagtaaaaggaagagcggctgtttcaaaataatacttcaacttgtaattttgactaatttcttgtctaaatatttaaaaatatttaataattattcagtgaaccaagacattttttatttcaggtgatagaagtattcattagagcagaagatggcctttgtagagaggtggtaaaacaccttaatcagattgaagaacagatcttagatcatttggcatggaaaccagagtctccactctgggaaaaaattagagacaatgaaaacagagttcctacatgtgaagaggtttgtgaaaataacatctttttatgagaaaaatacatcaatatctaatctattaataatccttttggggatgggagggtggcaattaggtttaatatgttataattacaccttgttatgagaaaaatcttggactgtaacgtccctctctacccacaaattgggaaggtgccaagagaccaaagaatgactcagacaagtccagcttggtaagtagataacgtttattaagacttacatatggaggaggcagaggtggtggggaaaaataaaagacttatatacagggtactcctaggtagcagcaggacagctctagagatcctcgccacctcccatcgctaagctgcttttaagctaattttctggctctttgcctactatgtgtgtgcacgatgggactgttttccttggtagtttctcagatcttctctgggatgttggggttctcagggacacctgttccttggctgggcaccatggccttggctcactgcctagccttcagggtttaggcagcagacatacacccttaagtaaggtaggtgacctgtcacatttcaccccatgtcaaagaggaaacgagtcagataatttgtggttgtcctaagattttggtgacagagtaaaaattcagtgttctttcttgatttccttaccaagtttctttcccatagagcagtggtccaacctttttggcaccaaggaccagtttcatggaagacaatttttccatggacagggttgggggttggagagattttgggatgattcaactgccttacatttattgcacactttatttctattattattacgtggtaatatataatgaaataattatacaactcaccaaaatgtagagtcagtgggagccctgagcttgttttcctgcaactagatggtcccatctgggggcggtgggagacagtgacagatcagcaggcattagattctcataaggagcatgcaacctagatcccttatgtgtgcagttcacaatagggttcacactcctgtgagaatctaatgccaccactaatctgacaggaggccagcacaggcggcaatgtgagcgatggggagcagctttaaatacagatgaagctttgctcgcatgctcacttgcctgctgctcacctcctgctatgttgcccagttcctaacagggtccatggcccaggggttggggactcctgctttagagtggttgatattcaaactctccaaaccagtaatgaagtttgactcatatttagtatccaattacaaggttttgaattttttgactgccaaaagttttttttttaactttattattaaaatgggaaagacagctgattttatttagatggaataattgttaagatactttttctgccttagattactattgtatttgtaattaaagtgcttttttggatactggcattctgtgtaaccaattcttcataggtcatgccacctcagaacctggaaagggcagatgaaatttgcattgctggctcccctttgactcccagaagggtgactgaagttcgtgctgatactggaggacttggaaggagtaagtttaaaatactaggagaatattttggggcttactatctggaaatttaaatttcatctaaccctacaagtgaagttaatagggtatacatagaagaaaatattctatgcatttttgtaccacatggatcacttaaaagaagggcctttaaagactaagaacacaggaaaatgcatgatataacaggtatcttttaaaaaggatagactgctttatttatttatttatttattgagacagagtcttgctctgtcactcaagctggagtgcagtggcccaatctcagctcactgcaacctctgcctgccgggttcaagcgattctcatgcctcagcctcctgagtagctgggactacaggcatgcgccaccacgcctagctaatttttgtatttttagtagagaaggggttttgccatattggccaggctggccttgaactcctgacctcaagtgatccgcctacctcgttctcccaaagtgctggaattacaggcatgaggcaccgtgcccggctgactgctgtatatttaatatgatccctatttttaaagtgtatgtttatttatgagcatacaaaatagtggaaatggaaaaaccaaactgttaagatcattgttgggtgatagaattcctggtgatttctgtaaaatttttaaggcaaatacatattacttttaaaatcagaaatagaaaagccttcttaaagatagagctgcatgatccagttaggtatagacaagccagtgagttaagacaactgagtatgttccactttgttgagctgtgctaccctagttaatgtgacattagtgctggcccaagaaatacagaaaagggcagttttgctatctatctggtttgtattttttaggcagctgcttagaagatctgcaaggtgaaaggttttagtttacatatgtgagatagaactacttttttaaagagcaattcagtaaatccagagagttctaaatccttggatccaattaaaagaatattcttatttctagatcagttttataatgtaattgataagaactggctatagaaggaataccagttttaaagtcaggattcactctaggctgggcatggtggctcatgcctgtaatcccagcactgtgggagacctagtggggaggatcacttgagccccggagttcaagaccatcctgggcaacatagcaagataccatctctacccccaacccccccaaaaaaatcactctaagtgtatacttaatacacatggatgatccttatgaaaagtcctcatttttgaaagatctgacagctggtctttcttagtctatttttgtagaattttccgttccctaatctacagattaggaagacttgactttaaacttcattttctttgtacttaccacttctcagttttcctgagatctcttgatattttataagaaaaaatgatcataatctattctttctgattctgcagctttgtaccaaatacaaatctagtaagtttatttacttttgtatcatctggaaatagaaatgttaagccacagtttgttaggatttactcctatcagtacttcttacaaactttctatgtatattttaaattttaaaaacactctgatgcacagctcttagaagtggacacagaagaaggaagaaatgcttctcaaaaattcagacattggtgtgaatacttaaaaatagactaagccataatgggttgtgtaccactgaatcatacacttaaaaatggttgaatggtaaattttatgttatatatataaccacaattttaaaaaactagcctgtaataccagcattttgggaggccaaggcgggtggatcacctgaggtcaggagttcgagaccagcctggccaacatggtgagacctcatctctactaaaaatacaaaaattagccatgccttgtggcatatgcctctaatcccagttacttgggaggctgaggcacaagaatcacttaaacccaggaggcagaggttgtagtgagccgagatcaggctactgcactccagcctgggtgatagagtaagactctgtctcaaaaaataaaaaaaatagtaacaatttgccccaaaccattgaattgtataatttaagtagatgaaatttatggtatataaactgttttaaaaaaataaattatgcttaactgaatccaaatcatgcatgtccaccttgcttaagaacattattgagttttaataattttttatatgtggaaaaagacagagatcaaaattgataaaaccggtggcggaatgctcctagatgacatactaccaatcaggtccccttatcaagtagtggctctgtagtaaaatcacatcttacatgagtggtaggtagaaagtggatatgatagaaaatattatagaaaaatataatatagaaaaatagggtaattccttaaattgcccctaaatcatgaaggttctttagtagtggaagacagagtcaggtctgatttgggaaagggggcgtggagaaaggaacactgcaagacaaaaaattccgttttaaaattttgctctcagtagtgttcactgaacacgaatgaaagttcactaatgaatataggtaagatatgacttctgtaattcttgtttgctttttgaattatgaagtatttcaaacactgtagttattttttaacataagagcttggacggaagtcagatctgagtctccttgagttaaatgctttgtttgatttgttttgaccctaggcataacatctccaaccacattatacgataggtacagctccccaccagccagcactaccagaaggcggctatttgttgagaatgatagcccctctgatggagggacgcctgggcgcatgcccccacagcccctagtcaatgctgtccctgtgcagaatgtatctggggagactgtttctgtcacaccagttcctggacagactttggtcaccatggcaaccgccactgtcacagccaacaatgggcaaacggtaaccattcctgtgcaaggtaaggaaggcagagttggatattgagttccttctctgtggcatgtattgaaaagttacccgaggtttggctagagtgacataggggacagaggagtgatggggagagagggtttgggagagcagaaattgtaaacctctgcccggagaacctcttattatcaacattttcttcatgctttttttctctgtcactaggtattgccaatgaaaatggagggataacattcttccctgtccaagtcaatgttggggggcaggcacaagctgtgacaggctccatccagcccctcagtgctcaggccctggctggaagtctgagctctcaacaggtgacaggaacaactttgcaagtccctggtcaagtggccattcaacagatttccccaggtggccaacagcagaagcaaggccagtctgtaaccagcagtagtaatagacccaggaagaccagctctttatcgcttttctttagaaaggtaatttttcacataccttatcagagcatgagcttgggaaatacaagtgttaaacaaagtttgaaatgtttttatctcctaggtataccatttagcagctgtccgccttcgggatctctgtgccaaactagatatttcagatgaattgaggaaaaaaatctggacctgctttgaattctccataattcagtgtcctgaacttatgatggacagacatctggaccagttattaatgtgtgccatttatgtgatggcaaaggtgagtaccatttggaattgtaaaggcaaagataggtcttcattactgagaacattttttaaccactgtcttgagatacagtttacatgctctataattcacctatttaaaatgcacaactaaatgggtcttagtatattcacagatatgtgcaatactcaccacaattttagaacataatattccattgtatagttatatgagagtatttttatccatttattagctaatgtatattttagttgtttctacttttggcatatatgcataataccactattagcatttgtgtttgggtttttgtatagacatgtattttcatttctctagggtatatacctaggaatgggctgctgggtcatacattaactgtgttttaactatttagggaattgctagattgttttccaaagtactgtaccattttacacttacacagcagtataataaagattttagtttctccactatctcattaacacttactatcttactttgtttaaataacttattgaggagaaattcacataacataaaattaattgggtttttctttttttttttgagatgttgtttcattcttgtcacccaggctggagtgcagtggtgcatctcagctcactgcaacctctgcctcccaggttcaagcgattctcctgtcgtagcctcccgagtagctgggattacagccatgtgccaccatgcctggctaatttttgcatttttagtagagatggggtttgaccatgttggccaggcaggtctcaaactcctgacctcaggtgatctgcccacctcggcctcccaaagtgctgggattacaggcatgagccactgggcccagccaaattaactattttaagttgaacaatttaggagcatttagcacatttacagtactaagtgtaataaatggttgtatactcaccacctctgtctagttccagaacatttccgtacctgcaaagtaaaactcctttcctattaagtagtttctccccattctacctcccacagcacctggcaaccagcagttggcattctggctgtatggatttatctgttcttaatcgtttatagaaatggtacaatatgtgacctcttgtgtatggctccttttacttaggataatattttccaggtttacccatgttgcagcatgtatcagtacttcattcctttttatgactgaatgatattccattgtatggataggcacaatttttttctccactcatacactgatggatatttgggctgtttccaactgttggctatagtgaatagcactgttgtgaacaggtatatcatgtacctgtttgagtgcccattttcagtccttttgagtttattcctaggagtggaactgcagggtcatatggtgatactatgtttaacttttttgaagaaccaccgtaccattttccacagaagctgcaccatttgacattgctaccagtaatgcacaagagttccagtttctccacatccttgccaacttattatttttattatagccatcttagcgggtattgggtgatatatcattgtggttttgattttcatttgcctgataactaaggatgtcaagcatcttttcatgtgcttactggccatttgcatatcttatttggagaaatatctttaaatcctttgcccattttaaaattatgttattattgagttgttggaattctttattttggatacaactaccttctcagatgtatgatttgcaaatattttctcccattcggtgtatcttttcacttactcgatagtgtcatttgaagcataaaagtttttaattttgatgaagtccagttacctgttttttggtttgttacttgcactttgggtgtcctaagaatccattaccaaacccaaggtcttttgatttttatagttttatctcatagttaggtctttgatcaattttgagtaatttttgtgtatggtatgaggtagcagtccatttccattctgattatgtggttgtgcagttgtctcagcaccattgttgaaaagaagatttttttcctcactgaatggccttggtaccctcctttaaaatcaattgaccgttgacaacatttgggtttatttctgaactctaaattctattccactggactatatgcctatccttatgcaataccatattctctagattagagagttgctttcttataagttttgaaattgggaaatatgagtgctcctactttttttttcttttcaagattattttcgaagtcccttgaaaaatgaattttagaatcaaattatcagtttcacaaaggaataagctaggattctgatagggttgcactgaatctgtagatccatttggggagtattgccatcttaacaattttatatcttctgatccatgaacataggatgtttttccatttatttagatcttctgtttttttttcaacaatgctttgtacttttcagagtatgtttgcaattcttttgttaaatttattcctattcttgttgatgctattccaagtgtagttgtttcattgttaacgtgttcattgcaagtgtatagaaaaacacttttgtatattgatctagtatccagcaactttgcagaagttattagttctaatagttttctagtagattccttaggattactatgtaggaaatcatgtaatctgcttataattttacttcttgtccaaactggatgccttttatttctttttctttcctaattatcttgctagaacttccagtatagttgaacagaactgtcgaaagcagaaatccttgtcttgatcttaggtggaaagcatctagtttttcactattaaagtatgatagtagttatggtttttttcatagatgccctttatcaggttgaggaagttcccttcttttcttagttcattgagtgttttttttatcatgaaagggcattagattttgtcaaatgcttgtgtgtccattgagatgatcgtgtgcttattttttttattctattaatatagtatattacactgattaatcttcctatgttaaaccagccttgcatttctggtgtaaatccctctcagtcatggtgtgtaagtcttatttttttctttttttgagacagtgtctcgctctgttacccaggctagagtgcagtggtgagatcatagctcactacaagcagtcctcccaccttcatctcctgagtagctgggactacaggtacatgctgccatgcctggctaattttttaaattttttgtagacagggtctaccttgttgcacaggctggtctcgaactcctaagctcaagcagtcctcatgcctcagcctcccaatgtgttgggattataggcgtgagccactgcacccggctgctgtaattcttttatttatttatttatttatttatttattttgagatggaatttcgctcttgttgcccaggctggagtgcagtggcgagatcttggctcaccgcaacctccgcctcccaggttcaagcaattctcctgcctcagcctcccaagtagctgggattacaggcatgtgccaccacccctggctaattttgtattttcagtagggacggggtttctccatattggtcaggctggtctcaaactcccaacctcaggtgatccacctgcctcggcctcccaaagtgctgggattataggcgtgagccacggtgcccagcctataattctttttatatgttgctaggtttggtttgccaacagtttgttgaggaatttgttttcagttaaaaaaaatatttattttttcaagtttccacatgcagcagtgattgctaaggaattttatccttatgcataagaggcattggtctgtagttttcttgttgtggctttgtctggttttattatcagggtaataatggtctcatagaattgagtaggaagtgttctcttctatatttaggtattatattttttcctttgcctttttttttaatttacagctgcctgaaagacccatggatatgagcttcttggtattaatgttttaaagtttggtagaattcagcagcgaagctgttgagaccagagattttccttgtgggaagtttattggtgaataattccgtctcttatttgttataggtctattcagatcatctgtttcttctagaatcagttgtggtagtgtatgtctttctaagaatttgtctgtttcctctgggctaaattgttggcaaataattataatatttccttctgttcttttttattctttaaggtcagtagtaatgtccttttccttttatgattgtagttttcgttttgttttgttttttgagacagtctcactctgttgtccaggctggaatacaggggcatgatcttggcttactgaaaccttagcctcctggtttccagtgattcttgtgcctcagcctcctgagtagttgggactacaggcctgtgccacctcgcccagctagtttttgtatttttagtagagatggaatttccccatgttgcccaggctggtctcaaactcttggcctcaagcgatccatccaccttggcctcccaaagtgctgggattgcaggcatgagcccctgtgccctgctttttgtagtagtttgagactcctcccttttgttcttggtctagctaaaggtttgtcaattttcttgatctttttcttttaaaaaccagctttttggtttcatttatctatttttgtgttctttattcattagtatataatcttatttccttctttctgcttacttgaggcttactttttgcccttttctgttgttttaagatggtttaagatggatgtttaggtaattaatttactatttctcttaatatcttttttccccaaatcctttacgtagatatcagtatcttttaaaagatacctttctaatatttcaatatcttttttttttttttttttttttttttttgagacagcatcttgctctgtcgcctaggctggagtgtagtgctcacggcagccttcctccagggcttaagtgatcctcttccctaagcttcctgagtagctgggaccacagccgtgcaccaccatgccctgctaattttttgtagatacgagattttgctgtgttacccaggctggtctcgaactcctgagctcaagcaatcctccctcctcagcctcccaaagtgctgggattacaggtgtgagccaccgcccttggcccttcttcattttcagtgtaagcattaacaactctaaattttcctccgtgcactgctttagctgcatgagtgttggtatggtgtgtcttcatttcaaaagtattttctgatttctttttttggcttctgtttgactcactggttatgtagcaatatgttgttaacttcgtatttgtaagtttcccaaatttgttactgatttctactttcattgtgattgaaaacacacttcattttattccagttcttttaaatatattaagaattgttttatagcctagcatatatgctctatcctaatgaatttcaaagtacatttgagaacagtgtgtattctgtggaggttggggagagtgttctgtagatgtctgttaggtctaattgttttatattgttagtaaagtgttttgtttccttgttgatctgcctagatcatctctccattcttgaaagtgaggtactgaaatctataaatattattgctgaattgtctacttttcccttcacttctgtcacttttcgcttcaggtattttttgtgctcagttattaggtatgtgtataactgttatagattcctgatggcttgatccttttatcattatggaatgtccctttttaataactttttttgtcctgaagtctgatttatagtgtgagatatatagtcacccagctttcttatggttgctgtctgtatacctctttccatcctttcattttcgaatgtatttgtattttttaaatctaaaatgtctcctgtagataaaatacatttggatttcttttgccttttgactatgtatataattggatttacatctgccattttactttttgttttcatgtctttccctttgcctttgcagctttgcttttgcattaggtcaatattttctaaagtagcattttaacgtcagtactttggtttcattttgtgtgtgtgtgtgtgtgtgtgtagtggttgccctagggcttaccatatatctcttatcaaaaatcagcttcagattatactgacttaattccagtgagatataggagtgttaactgtttcgttacacatattacatccataaatgtacaactccaccagtacattgttataattattgatacaattttatgacttctaaagtagcagaaaggaaaggagtgtaagtatgtatttaaaacttttgctctagtaaccttattaataatttctggtttcctttctttctttcttttttaagactgagtcttgctctgtcgcccagactagagagcagcggtgcaatctcaactcactgtaacctctgcctcccgggctcaaatgatccttctgcctcagcctcccatgtagctgggcctacagggtgcaggcatgtgccaccatgcccggctgatttttgtatttttttgtagagacggggttttgccatgttgcccaggctggtgtcgaactcctggcctcaagcagttcacttgcctcagcctcacaaaatgttgggattacaggagtagccactacacccagcctatttctatttctcttattcattcctgtgtatgtgagttgccatctggagtaatttcctttgctcaatatggctttgctcctgcctacctcctttgtactgttgtaggcaaatatgttacatttttgtatgttatgggtacattatatatatatattatttatacaattgattttttaatcagttaagaaaggagaagaaatgtgcagttatactgtatttacgattacataattatctttaccagtgctcttggctttcttcatgtgtagtgttgtccaggggcatttgcttttggcttctagaattttgtgtagtatttcttgtaaggggtttgctagcaccaaattctgtttttgtttatctgagagtatatttattttaccttcatttctgaaagataacttgcaaaaattttgaatattgacatttcagagataaaaatcttgagtaactttttaatactggattcttagtttaatattttttctttcatcactttgaatgttatcccactgcctcctggcctctgtagtttctgattagaagtcaaattttattttattggggtttccctgtaactgaaaagttgtttttctcttgatgcttttaatattttctttctttggctttgaacatttttactgtgatatatctgggtacggatgagtttatcctacctggaagtcactgaatgtcctggatatgtaatttaataaatttgggaagttttcagtatttctttgaacatttttttctgcttctttctctcctctcctgattctcccattacacgtatgttgatttccttaatggtgtgccacatttctctgaggctgtttttcttcattctttctctgttcctcagatcacacaatctctttcttcatgtttgctaatcctttttttttttttttttgctagttcaaatctgttttccctagcttctagtgaatttttcatttcatttactgtacttttctactccaagtctttttttgagagagagtcttgctctgtcacccaggctgtacagtggctcaatctcagctcactgcaacctccatctcccaggttcaagtgattctcctgcctcagcctccccagtagctgggattacaggcatgtgccaccatgcccggctaatttttgtatttttagtagatactgggtttcaccatgatggccaggctggtcttgaactcgtgacttcaagtgatccaccctcctcagcctcccaaagtgctgggattacaggtgtgaaccaccgcacctggcctctaagtcttgattcacatactatagactcctattgtttttattgaattttaatagatattcttgaatcgatgtatcttcatttgctatatgccgttaataccatttccagagactttaaatagcttttatataattttcaccccttttactgggcagcaggttcacagagctcctcacactattatggtggtagttgccatgtctctcagagcactcttattgtttgccaggtcacaaaagaagataagtccttccagaacattatgcgttgttataggactcagccgcaggcccggagccaggtaactacattttctctatgggctgaaaaataaagcttaaagtctgtgatgaatacaaaaaattaaccatagttgactctgtggccttttttccaagataaacacctgggactctacttaagggaagtttctactttaatctttattcttgatgtcacatgttgattaaggtctcttttcctcaaaaggcaacaatgttaaatatttgattgccttcttaattcagaaaaatcacaagataggaattaagaagttacttggtttctatgtcacctttcattctggtttagtaaacatactgtaggtttaaccaacagaatgtcacatggaaatttaaaacccactttgcctttattaccattcatctctgagaggcaaatcggccagatctgtgtatcttacttagaatgacttgacattatggttgggtgctgtcactgcagtgtagtactgcaggtagtacttggcatgtgatgctagatgggctctgattgaatcctggatctgttataatttgagttatgtttctcaacctgttctgaggacaactattgctatacaggttattgtgaaaaccaagtaacatatgtgaaggtcctatcaccaagggtgtgctcaacaaatactagtttatgtccccttctcattgtttctctaaaggtgtatagaagtgttttgataaaagggaaaagaaaaagaagaaattctggcagcagtgatagcagaagccatcagaattctccaacagaactaaacaaagatagaagtaagtgggatctttgtgaactacaagacaaaattaggagcttttcttactttttaggccttgaagaagtaactaagcattactaaatgaaataactatagaaactatgaaagtgttttatagatcagtaaaccatattctagctggcaaaactgtccattacatagctttggggcacatattatgtaacatttttctccaggagaattagagctttcagggaggaatctgcttgcctgagttccagaaaggtctgatatgtcaattggaaccatgctatggaaataccatcccctgcctgttgctttgtaccacttagtacagggcttaggtcctagaaaatttggtgtaacttattaatggacactactcagaaagcccttgctatggttatggcatagggagaaagttaatatcctagctgagctttgctttttggtgtgaagaacagagtgcctattcactgttattagcaagtagtgcaggtagctgttccctttctcctacttttaaaaaattaaaacagtcaatattagcagcctttgtactgacagcctttgttctcctggctgcagccagtagagactccagtccagttatgaggtcaagcagcaccttgccagttccacagcccagcagtgctcctcccacacctactcgcctcacaggtgccaacagtgacatggaagaagaggagaggggagacctcattcagttctacaacaacatctacatcaaacagattaagacatttgccatgaagtactcacaggcaaatgtaagtatgacagggattatttcatacttttttcactcatgagtgttgaggaatcatttatgatttatatatggaccattcacctggtccgtatataaactagttttggccaggtgtggtggctcacacctgtaatcccagcactttgggaggccgaggagggcagatcacttgaggtcaggagttcaagaccagcctggccaacgtggtaaaacccagtctctactaaaaatacaaaaatgagctgggcgtggtggcacacacttgtaatcccagctactctgggggctgaggcaggagaattgtttgaacatgggaggcggtggttgcagtgacctgagattgtgccactgcactccagcttgggtgacagaacaagactctgtctcataaataagctagttttacaaataattctattaagtaaaactgaggaggtctgtaatttacctaaccaatataaattctactgttgttaagcattaaacgagtaagattgtatttggagtccctacaaagtatagtagtacaagagacaggctacatgggttcaaattttccagtacttaacagtggtggtaaccttgcaaatcattaaattttctctgtacctcatttcctcatatataaaatgggaatataactagttcctagcatatggggttgttgtaaggatgaaatgacataatgtataaaaattgcttaaaataataactggcacaaactaagcacttaaggtttgctattagaatatttttctttaggttaagttattgctaatacatcactctgtcattcataaaactactggtttagcacacctcttcactcaataatcattttcagtaaaaataattataaatttttttcttagaattactgattttttttttttaaacagatggatgctcctccactctctccctatccatttgtaagaacaggctcccctcgccgaatacagttgtctcaaaatcatcctgtctacatttccccacataaaaatgaaacaatgctttctcctcgagaaaagattttctattacttcagcaacagtccttcaaaggtgagcctaacatcaatcttggcctttactaacctcaaaatgcttcagatgctagaaacagggtttgtgctaagcttaggcactcattagagtgatgagagctgccagggagcagtgatcagtcagtcctcatgaagcaaaacccagggtttgttttgttttttgccttttttgagggggagggggtggaattttagggtgggaaacagggtaagggatttggatttctttttattccctctcctatttgtacattttgctgtaaacctgaaatttgtgtttatcccatttgtaacaattttccacatttgttagggaaagaaattttggattccttaccaaaggcctgtttctgggacaggcagtgtcctcaggactctggctaatgggagaagttgacatttttgacattgcagtgcaatagtcatattagcacagatgtatgtggcaacagccacctcattctaagaaggggaaggaagcttgagtcaggccttaatgttgaaaagtcagggagctgttgaggtatggaagggcactcagcaggaagcaggttaaggggaagaaaacagtgtccttgaggcagacagtgatccaaagcttaattacgggcatcatgctatgttagcgagtggaactggattgtgaaggcccttacataatgagatttttattgataaaggttgcttagaggctgggcgttgtggctcacacctgtaatcccaacactttgggaggccacagtgggcagatcacctgaggtcaggagttcaagaccagcctagtcaacagggtgaaacctcatctctattaaaaatacaaaaattagctgggtgtggtggcatgcacctgtaatcccagctactcgggaggctaaggcaggaaaatagcttgaacccaggaggtggaggttgcagtgagcagagatcgcgccattgcactccagcctgggtgacaaaagcgaaactcactgtctcaaaaaaaaaaaaaaaaacggttgcttagaaatacacatatatatatggcctgaactcttcaaaaaaaggtcagtatggtaagaggacggggaaggtatcattgaggagactagggagacacgacatccaaatgcaatgcatgatttttgatcctgcataggaaaacgttgctataaaggacattttgaggaaaatttgaatgtggccttcagtgtatttttttttaaaagtttctttggtgttgatgatgcctagcagattatgtaggagactgtgctgaaagtattcagaggtaaagtgtcccagtgtctgcagcttactttcaaacgggttggttgcaatatatttaggtagggagagagtgaaagcaactcttagacattaatgattgataagtggctgctcagtgtactatttttttcaactctttgtaggcttgcaatcttttaaaaagttgaggaaaacagtccgggtgcagtgcctcacgcctgtaatcccaacattttggcaggctggggtgggaagattgcttgaggccaggagttggagaacggctcaggcaacataagaccccatccctacaacaaataaaaattagctgagcatggtgccatgcacctgtagttgtagctactcaggaggctgagcccaagagttcaaggctgcggtgagctatggtcgtgccaccacactccagcctgggcaataaagtgagaaaccctgtctgtttggaaaaaaaagttgaggaaaacaagtaaacaagaacagcaaaaatctgttagaaaatgtaataatgggccaggtgtggtggctcatgcctgtaatcccagcactttgggaggccgagatgggtggatcacctgaggtcaggagttcaagatcagcttggccaacatggtgaaaccccatctctgctaaaagtacaaaaaaattagccgggcatggtggtggacacctgtaatcccagctactcagaatcgcttgaatcccggaggcaaagtttgcagtgagctgagatcgtgccattgcactccagcctgggggacaagagcaagactccgtctccaaagaaaaacagaaaatgtaataatggagacacttttcctatcatagtaaaaaaaaaaaaaaaaaggtgtaaaggtgtcacgtgctttggaatgaatttataaaacttatgaaaactggaataaatgaagacataccagcgattctgaataagaagaccaaatatttaaaagatatactttctctgttatataggcttagtctaattccagtgatattcctagtaggactggttatgaaacctggaaacataaattggcagtaacagccccaaaaagcaaatggagttggaggaaatgattctgacggcttaaattagactctcatcctgtaacctataaattctaaatggattaacagagttaaatggaaaaaaagaacagaataatagcaggtaatagacaaagcagatgaattggaatgataatactcaaaaggtggcttaaaaaggaggaaaaaaggaacatacaggaaaatagcatttaaatgtaaatggtctaaatgtaccaattaatagttagaatttatctgactggacaaaaaagcaggaccaaactatatgttgtttgtaagttatatactttaaatataaaaatgtatatccataaaaggaatatttacttggcaataaaaaggatgaagtactgatacatgctacaatatgaatggaccttgaaaacatcgttaagtgaaagaagccagtcacaaaagagaacatattttatgattccatttatatgagttgtccagaatgggcaaatatctagaagcagaaaggagattcatggttgccaagggttgtggggaatagagtttctgcttatgaacaagaagtttctggggtgatgaaagaattcaaaaatagaatgtagtgatggctgctctgggaactctgggaacatactaaaagccatggagctgtacacttcaaatggttgaataatacggtataagaattatatctcaataaagctggaagggtggaaaaggttataccatgctaccactcatgaaaagaaagttggagtggctgtattaatatcagagaaagtagatttcagagcaaaaaatattatcaggacaaagagggtcgtttcctattataaagaggacatataaccctaaataaaaaaaaaaaactggtagtcaagagatttcaacataattggtacaacaaatagagaaaatcactaaggatacagaagatgtagacattatcaactgattgacatttatagaacactctctaacaaatcaagtgcagagagaacatttaccaacatagactacattctggaccataaaacaagtctcgataaatgttaaaagggttgaaatactgtgttttcactatcacaatggcattaaatcagaaatcaataaaagatacctggaaaatcccccaattcttggaacctaaattatatatttctattggttaaagaaagcacaagagaaattagaaaatattttgaactaaatgaaaatgaaaatccaaaatattaaaatttgtgggatgtagctaaaacagtgctaagagagaaatacatacacctatgttccaaaagaaaaaaggtctcaaattagtgacctaagatttcagcttaagaaagtagaaaaagtgtaggactcactgaaatggaaaactgtaaagcagagaaaaaccaaggcaaacaaaagctcggtttttttggaggctgggtgctgtgtctcatgcctgtaatctcagcactttgggaggctgaggtgggtggactgcctgagctcaggagttcgagaccagcctggtaacgtggcaagaccttgtctctactttaaaaaaaaaaaatttaactgggtgtggtgctgtacacctgtggttccagctactccggaggataaggtggaaggatggcttgagcccaggtggttgaggctacagtgagccatgctcacattactacactccagcctgagtgacagaatgagaccatctaaaaaaaaacaaaaacaaaaacaaaaaaccacctaggtattttgggagatgattttaaaaattgattcctctatgtacagaataatcaggaaaagaaatgacacattactagtatacattaaaagtataatgaaagataaagaacaacgtaatgccagccagatgtcgtggctcatgcctgtaatcccagcactttgggagaccaaggcagaaggatccttgagcccagtagttcaagaccagcctgggcaacatagcaagaccttgtctctgaaaaaaaaaaaaaaaaaaaagccaggtgtggtggggttggtgaggtgtgcctatagtcccagttacttgggaggctgaggtgggagggttgctagagcctgcgtggtcaaggctgcagtgagctgtgatggcacccctgcactccatcctgggcaacagagtgagaccctgtttcaaaactttaatgccaataaatgtgacaatgcacatgaaatagacaaattcttgaaagatacaaactaataaaactcaagtagtagtctcagtagcccctgtatctactaaagaaattaatttgtggtttaaaaacctcctgtcagagaaaactgtaggcccagatggcttcattggtaaatgctaccaaacatttaaggaagaaataatgccaattctatagaaactctcccaaaaagtgaaggtgataaatgatcttagtgtttgaaggaaagcatctgacaaaatccaacattcattaatgtaaaaactctcaaggaacttcctcagcttggtaaacatttaccaaaagcatctacagatatcatacttaatggtgatagactgaatgccttgcccctgtgatcaagaacaaggcaacaatgtccactctcactacccctgttcaacattgtaactgggagtcctagcatgtgcaataagacaagaaaagccatacagcctggattgtctacataggaaaatcacaaagaatccacaaaaagctactggaactaataagggaggttatgtgatcaacatacaaaaatcaaatgtatttctatatgctagcagtgaacaatcagaagtaaaataaaaaattgaataccataacattttaaaattacttaggggtaggtatgataaaaactatgcaacacatatatcctgaaaactatagaagcttggtgagagaaattaaagcctgagaagatacagaaatgtgttcatgacattgaatgaaaataataccttagtttccaattcatggaaaataaaacagcagttttctcccaattgatctataatttcaaaccaatttcagtcaaaatccaaacagatttatgtaaaaaactgattctaaaatttgtcatttacaaggcaaagaactcgaatagctaaaataattcaaaggtggaggattcacactaattatgaaggtacacaaaatatctgtattataacaccacagtaatcaagacagtagtgttggtggaagtatagacacagagatcaatagaacagaacagagtcctgaaatagacaacacatgtatggtaaactgattttcaacaaaggtgcaaaggcaatttggtagagaaaggatagccttttcaacagatggtgctggaacaattggatgtgcatataacaaaataatagtaaacttgttcccataccctgcactatatacaaaaactaaaaatgaaccacagacataaatgtaaaatctcaaactacaaaacctctagaagacaacagaaaatcttagtgaacatgttttatgggaaaattttatatacaacatcaaaagcacaatccgtaaaatactgttaaaatggattttatcaaaatgaataatttctgctatttgagacactgttaagagaattaaaaaaccagccatagactattagaaaatctgtacacgttccatatctgatgaagcatttgtatatctacagtatctaaagaattctcaaaattcagtaggaaaaccaccaaatgtaaaagtgggcaaaagatttgaacacacttcacccattacatgcctgttagaatggctaaaatccaaaaagtgacaaatcgtaagttctgacaacaatgtggaacaattttacatattgctggtgtgaacgcaaaatggcatcgccactgtggaaagttgtttcttaaacataccattatacaaccagcaatctcattcctaggtatttacacaaatgaaatggaaacttatgtttagacaaaatcacgtacatgactgtttatagtgactttcttcctaattgccaaaaagtgggaaacaacccaaacgtccttcagctggtgaatgcatataaataagctgtggtgcatccagacaatcgactgctactttgcaataaaaaggaactgatatattcaatgtagataaatctcaaatgcatcaatgcttaagtgaaagacactggattcagtaggctacttatgattccatttctgtgacattgtggaaaaggcaaaactattggacaagaacatcagtggtggtttgggataggctgacaagggagtatgagggattttttcagaggaacagttttatccgactgtaggtatttctagcacagaattgggagtctgtccagtaaaatgatagcgattattagactcttggttggagaaagatttgtcatcttgacgtaataggtgatagctgaaacttacggggagaatattacaaagcaagaagggggagaatattacaaagcaagaagtagcttatgtctagaaccaatctataacgtactaacatttagactactatgagaaaataattatcaaatactatacaagatcagttaagatgaagactgatcattagtgatacttgacagagcagtgtcagtgcactggtatgacttgttgaaaaataaattatggtagcattgcttatacacaattaacaatgtatacagtaaacagtgtaagaaatattcaagcaaatgggagactgcagagatagcaaatgcagaccagactcttaggaaggcagaaagggggctagaaaaagaattgaaggaaagctttcttcagatgcttaagattttgtggccaggtgcagtggctcatgcctgttcccagcacattaggaggccaaagcaggaggattgcttgagcccaggaattcaagaccagcttggacaacatagtgcaaccccatttctattgttaattaaaaaaaaaaaaaaaatgaaaaacacttgtgaaggtacatctgttgataataaagaacactgattttcattaaaacccccaaaacatttattactttaaagaataaaaataacaagtgtcatgataaaatatgtctgggatttgttttaaaataatctggggaatggaagtgaatcagagtataaatcaaacaaggctggccaaacatgctgaagtagaggaataggtatgtgaggatgcattatgcttctctacttttgtatgtttacaatttcctataatagatatctgtgaatttgcttagtatgctttctgtaagcaaacatggatgaagcagcacatgaaaaagaattttaaccaacaaactagcagaaaataatgtgacagacgacttttagaggctttggagaaactgaatgctaaaggtgctgtacagccagccccagtctttctgacattctggcagtgtctttctcaattgcagctcctcatctgagccactgtccagaaaataatttgagtaactttaatcctcaattctcccaaggatagtaccattctagatcttactaatttattagctacaatggataccttagggggggattaaggcctacttttctagtgaaatcccagttgagaatggctgctaaaaactgagtaacattagactgaaaaaaagggaatattgtataaagttgtactttaaaaaagagaaaaagatgtgtctaagtgactatcagatagcaatgtaatgctccctaattgtaaaaaaaatcacaaatttgtgaactcacaaattatagacatgtataattgacctacaggtcaaaagtgcctgtggaagagcttgttaaaaatagaactactcagccccttctcaaatagccatcggcctcagccagctgaaaagtaaagttggcaggttatgtaacttagtgtttcttttctctgtagatgtgttcaaactcttccagggtaaactgcttaactcatttgagattctttgacttaatactgagctatgtgcatttgcattttaaaatttttgtatctttttcccaccatagagactgagagaaattaatagtatgatacgcacaggagaaactcctactaaaaagagaggaattcttttggaagatggaagtgaatcacctgcaaaaagaatttgcccagaaaatcattctgccttattacgccgtctccaagatgtagctaatgaccgtggttcccactgaggttagtctcttgtattaaactcttcacaaaatctgtttagcagcagcctttaatgcatctagattatggagcttttttccttaatccagctgatgagttacagcctgttagtaacatgaggggacattttggtgagaaatgggacttaactccttccagtgtccttagaacattttaattcatcccaactgtctttttttccctaccattcagtgattactgtcaaggctgcttagaatccaaacttggatttttgactctggcaaagcttttagaaatactgcaagaaaatgatgtgtacccaaacgtgagcataggaggcttctgttgacgtactccaacagaagaactgtgtttcaagttcaatcctacctgttttgtggtcagctgtagtcctcataaaaagcaaaacaaaaattaggtattttgtcctaaaacacctggtaggagtgtgtgattttttgcattcctgacaaaggagagcacacccaggtttggaggtcctaggtcattagccctcgtctcccgttccctttgtgcacatcttccctctccccattcggtgtggtgcagtgtgaaaagtccttgattgttcgggtgtgcaatgtctgagtgaacctgtataagtggaggcactttagggctgtaaaatgcatgattttgtaacccagattttgctgtatatttgtgatagcactttctacaatgtgaactttattaaatacaaaacttccaggctaaacatccaatattttctttaatgcttttatatttttttaaaatgttaaaacccctatagccaccttttgggaatgttttaaattctccagttttttgttatatagggatcaaccagctaagaaaagattttaatcaagttgaattgaggggattaatatgaaaacttatgacctcttcctttaggagggagttatctaaaagaaatgtctattaaggtgatatatttaaaaatatttttgggtgttcctggcagtttaaaaaaattggttggagaatttaggtttttattagtaccatagtaccatttatacaaattagaaaatgttatttaacagctgaattatctatacatatctttattaatcactattgttccagcagttttcaagtcaaattaataatcttattagggagaaaattcaattgtaaattgaatcagtataaacaaagttactaggtaacttcatattgctgagagaaatatggaacttacattgttcaattagaatagtgttctgcaaaaatatttataaaacttctcaagatactgctactgtaattttatatgaagataagtgtatttttcaataaagcatttataaattagcctttgtttggttatattgagaaaagggtagtttcctgcataaatggcaaagaacaatcatttattggtttattttgtctctactaaacacattagtcatttatcatttaaataccggacttcattagaaaccgttgtaacactttttctccctcctgccataaaaatacagtaagtaatttgcttaaaaaaaacaacacaacactaggaacaagtgttctggtttcttctcactgaactaaagacatttctcagtgatttcagtttgtaaatcagtaagacagtgcaggctacaaatcagtgcaggctgaagactgagattcaaatgatcttccacttaaaagtgctgagctatggaacctgctctctctatacctctccatttcctaacatatatacaactgaaaccactgatttataaactattaagtagtgctgaattctgtctgctctattagtttaaatgaatgcaacttacctttagcattatattcagaaaaatacttacttaagcctcaaggtccccaataatttggagtactgaactagataaccaccctaagacacttctgacagaagtaatgcattacttagagacaggtttccaaaccctgctgttagaacctatgcatacatggaaaacactggcagtcagtcattgttcacacagttttactcttcaggcagtcctctgccattggtcagcttgaactaggccagagtctagcaggaaagtgcatggtgcaccagattcaccatctcttaagtcgccactgttttctcttctttactgaaaggctgtactgagccaggctttacccatgacaggccagcaacatgaacacttttattgtgctgttcttcaggcttcttctaggcacaatcaaaacagatatttaaaaaattactggtgaggagatttcagcactgtacaaacttgtttcccaaaaaaagttacttgtatgtaatgagcagtctccaaatgaagacattttagaaaagaaacaatgagttagccatttcataagttgttatccacttactttctgagtcagcatcttttctctggcttcatcatgtacagaaggattccatggagaaaagcttaaggaagagaaaagtatttaaaaactatttgttggctcactaaatttctataacattcattttgcagttttaagccaattcccctaacttaataaagcacagtattttttattgttgtcgacatgtatgttttagacattatctaattaattttctcacataactatccctcatacatgaatgatctcatttaagcctcacaccaccccttgaagtactgttatttaaagattaagacagcaaagcagagtaaattaattgctctgggttaccagagctaaaaagtacaaaagccacgtagtccatctgctgactccaagctcttttttttgagactgagtctagttctgtcacccaggctggagtgcagtggtgtgatctcggctcactgcaacctccgcctcctagattcaggccattctcctgcttcagcctcgctgggactacaggtacctggagtgcaatgccaagatcttggctcactgcaacttctgcctccctggttcaagtgattctcctgcctcagccttcctgagtagctgggattacaggcatgcaccacccacacccagctaattttgtattttgtatttttaatagagacggggtttctccatgttggtcaggctggtctcgaactcccaacttcgggtgatctccccgcctcggcctcccaaagtgctgggattacaagtgtgagccactgcacctgaccaatttttgtatttttagtagagatggggtttggccatattggtcaggctggtcttgaactcctgacctcgtgatccacccacctcggcttcccaaagtgctaggattactggcataagccaccatgcctggccatgagtccaagctcttaatagctatactccactgccttcctaagcactaccaatgttgccaaagagcaaaatcaccaattcgtccattcccaatactcctccagacactgttccttaaatcaaatgtcatagtgcttcaggaacccaccattctcacactattcagtttccctccttttaccacatctgaatgtcaatgagggtttggcagtttaagaggggctccagctaaaactgccagctgaaaagaagagtcctgacatgggaatgaataaatatatcacaaggatccctgggaaaccaaagtcaccagagaatgtgctgtcggcacagcctgtcagatgtgaagctttttgtttaagagaagagcctcaagaggcatcagaaatcgagttggcaccaagttataaaggttgtaggctaacagcttatgcatgtgcctttttatatccctattctgagaccacctggagaaaggaagcagtgtattggaaaggacagtggacagttcacttgggggatgcaccacttacctaattgcataggggtcttctattttaggttggtcaaacaaacgagcagtgcacaccttaacactgtcaacaactttacttttaaaaagctgaatatctttttcatacctgtgttaaaagtttaagtcaaaaagttactaacttaatctacttagctgcatcttcaaatttattttaaataacaaagcaaaagttacatacagtactgcagcctctgggttcagggggcttgctgtatcaatcttgtagaaaactctccttgcatacattaatacctgccaaatatgattatggttccgcctaaagggaaacatggcgtgattaccgaggcgtcctcttgctgtattatgtcactaaaagaaacactttatttacttacctccattttgcaaatgctctcttcacatccagctcacctgaggtgggatcaactagcgggtgaaagacaggaatatcgaacaccaagcgctgtatttaaataaagagagacatgtcctttaatggaagcagtggcgcttatgagacccataggaatcgtgataaaaagagcttcaggacaaggcagtcacgttatttaaagctaaagagctgcctcaagagggctacttaactacttttaccattttcctgaaaaactaaattttgcaatgaagcggggaaaactccctctcctccactagagcctgagggccaccattcacctggtgagtgctgcaggatggcaggcagccagcctcccttgcagaccctgagcagagaaacaaagctctgatggcatgccggaagctgctgcaaagcacagaagtccccctggacaactactgggtagataaatcataaaggtaccaggtcaggaaaagaaccaggaaagctgtaagccctttcagcccttctcgctgatccacaaataaagccagactgtgtctccaacttactggacagtcaccatctggatagttatcagggatgtaaactgtaaacttaaatacgccatcttggtaaagtccatgccgtatgaatattactccaaaccacactgtaggaaaaaataaaagagttaaggcctaaatttgtgtgggaggaactaaatgtgcccataaattaagagtgaatcctcatcttacttaatgcagagcgataagatggctgcacatagacgcctggtagcttctgcttcacaaccaaggtactacaacaaaagcagaataattaacttgtgtggatacaaatgacacatgcagatcaaaccaccccacattcactttgagacaatgaacggcccctcaatgggcagctgatgcccaaaccctgcaagccaagttctcacaatctctcacctgacacaactcaggaaagagccccagccctgatcgctgcccactactggcctcatagcagcagctcacagagaaaccagcaggccagcaggggccccacagtaagaactaaagccaaacaggaataaatgaagaataaagtttcctcccagaaattcgctcttccaaaacatcatcttggaaaccagcctataggtaattccgaataatgcaacctgaggtaagttctgtacagctgaggtcaatgagagtatttgtaaaattatgcttttgtgcctggatgatcattcaaaaacttttaaaatacaatgttagataaattaagatttcttggaattgggtcacaaagttgtcattttacattttaatcacaagatcccacagcagaaggcaatgttcagactcgcagtactgcctggggagggcaggcatccttgtgcggctctcacacgccctgctctcaaatggacaccctgatgcagagacctgaactctgtgggccttgccagggaatggaaaactgggtgctgaaaacaagaaacgataagtgtattgacacaaaggctacactggttcttctgggacccagttacccacccacagccattctgatcacattaacctaccaatcctggattctatcaagaactagtttatcaggccttaagtttatcatttttattacctactttccattcacttacttttcatcatttttgagttattatccggtccatttttaagttgctaaaattcagcatgtcagtagcaacatggctggcagctgtatctctactacagtgaagtttgccagaaaaggcagttctaatacagatttaatcaccccaatagacgcctgtccaactcactgcccagcctcaaacacaaggcctccattatagagccaaaggggccattactaccaaatcatacccagcctttgtatacagttaaaaagttacactggggcctcagacccactgaccattacaacattaatacatccagggaggggtcaaggatgctttttttttttttttttttggtttaaaaaaaaaaagatgaggtctcataggctgtctgcgatgtctcatgcctgtaatctcagccctttgggaggcgccaaggcaggcagatcacttgaggtcaggagtttgagaccagcctagccaacatggtgaaatccagtctcttactaaaactacaaaaattagccgggtgtggtggcgcacacctgtagtcccagctactccagaggctgaagcaggagaatccagaggcagaggctctgaggaggcagaggctgcagtaagctgagattgtgccactgcaccccagcctgggtgacacagtgagactccatctcaaaaaaaagaaaaaaagatgaggtctcactatatggcctacacttgtctcacattgcagagctcaaatgatcctcccacttcagcctcctgagtagccgggactataggtctgcagctgggaaatttttaattttttttttagagacggggtcactctattgcccaggctggtcttgaactcctgggttccagtgatcctcctgcgtcagtctcccaagtagctgggattacaggcataagccactgtgcctggctcaaggatgcttttaaaataactgtatacaaaggaatttttaaatgatggaaattaagaattctccaaactttctgtccttttaacaaattctctaatgaaatgccatctgcgtctgtgcagtgctggagcccccgtgtgtgccaggcaccacagggtcgctgccagcactccgcaccctgcttggcttcttgcactccacaaccaggtgcaactgcagcccagctgcagacctcggtgaccagtcagcgtcttccttacatggagcccacatctttgtctcttccctagaattgctaagtcctgcctttgggggtcatacagaataagatccttccttgtgacagaccttcaaatatattaagacaactttaatacgtgcttaagctgtctcttctccaagaaaacttctccagttccttcaactgtggatccctaaggactggccttcctggtccctccctgctaggccttctcctccatctgtcaggaggctgcctacaaggcgacaaccaaatggagcaccaccctccagatgggtctgacccaagaaggcagagacagccactctcccactgtcctactctctagaaaaacctccaggaggcgaattcctcacttcacataaacgaagactaaatttattaagttcctaatctactgtaggttctttgagacggggtttcgctttatcgcccaggctggagtgcaatggcacaatctcggctcactgcaacctccacctcccgacttcaagcaattctctgcctcagcctcccgagtagctgggattacaggcgcctgccatcaaacctggctaatttttgtatttttagtagagacggggtttcaccatcttggccaggctggtcttgaactcctgaacctcgtgatccacctgcctgggcctcccaaagtgctaggattataggcgtgagccgccatgcccggccaatctactgtaggttcttaataagccttagtttcttccttttgttactctccaaaacagacatggaaattaaagtaccctctgcctttaaatcttattcacccgagctctaaagaatctttaagagaggctatttttatctctctacctaggtcttggttaagaaacattttatcaccagcaatagcctatagttttatatttattaagtctgatactggaaagggacaggtttgagctttgagattaaatgtctgccctttactgcatccatcagaataaatttcattcttcactttaaaggatcattcctaatttaaccaaatagtttgttaaggacttacaattctgcaagaagagagtattccaggtagaagggtccataggacgcatgcgtgccatttgttgactgtgctgctggggcaggagatgtaggcttagttatgggcaaagcatttttgggaatagaaggcagctgtttctttggtgcagttcgtggaggactggttttcacgtcccctgttaatgtcttctcttcaccttcagatcgctatacaagatgaagttgtaagaatatctgttaggatgattcttaaatcacaagagtacattattagctccatggcctaaatgctggaattactcctttacaagcacattctaacaccatgaccaagatgactagaaagtcctttgggcaggcaggtcatataaagagaagacaaacctgaagcaagaccaaagcattagagaaactctttcatatagggaaactcatcctataaggatgatacaatcagtgtgtacaggattaactgaaacacagaaagaaatgttttttcctagtggccccaaaaagagggcaaggggttactaagcaattagacaactgtacaaggctagaaaagtcccccagcacttacatgctacagaaggttaggtgctaagaagctcaaaataatgtggatgactgaaatcagtcactgcctgttagcacttaggttagaaacaaagaatgaagctattctctcacttgcctgggtctgattttgatttgtccctactgggtatgtttcaacatttcaaatatcaccagcataaactgtcatccttcgtcaaagacaaaggtcgacatgagtcagagactaaactaccatctcataggtacttccttggcgcaagtacaaccaaacgctgtttaattagctatataaaaacatgtatatcatatgcattgctccagtgatgggggcatctaaaggccctgaattcagcacaatgcaatatgccaatgtagcaaaactaaacttgtaccccattactatgtacaagtaaggaagagatgtcatgtatatagaaaaaaagtaatagtggtgtttgttctcctagaggtgagattatagttttttttttttttttttctttttgagatggagtcttgctctgttgcccaggctggagtgcagtggcgcgatctcagctcactgcaagcaagctttgcctcctgggttgacgccattctcctgcctcagcttcctgagaagctgggacaacaggcgcccgccaccatgcccagctaatttttttgtatatttagtagagacggggtttcaccatgttagtcaggatggtctcgatctcctgacctcgtgatctgcccgcctcggcctctcaaagtgctggggattacaagcatgagccaccgtgcccagctggtttttattttcttattgtttgcctattttaacctttcctaaaatgaaaatatatttttaaaaaatcattttatttagaaaaattaaattagtgcccctcaagtctgatttaatgatattagactagcctttcccacagctgttctaaccgtagaaccttgaagtttagtagaaaactacaatgttacaaatttcatcatgtgtaaatataacctaaatcatcttagaattgtgatgaccagaacgatttctatttgagatgcaatcctagtctcagaaacagacttcaaccaacaaaataattatttctcaagagtaaacccttaactagaaaaaccaggtaattttgtcaagattacaggtgaccgtgacagattattttagccttcattctgaccctattttcagacacagaagcaaatgggttttcttactgaatttatcaactatacctactttgcgtacagagcttgtagacatgctccagaaagggttcataacgtgtattccaaacaaagaaagtcagtggtgtatcatccaaatcttctgtcttcggcattcactttaccttaaaacaagacgggaagacatagaaacatgccaacaccaaccattaagacttttttttttttttaagatggagtctcactctgttgcccaggctggagtgcagtggtgtgatctcggctcactgcaacctccacctcctgggttcaagcgattctcctgcctcagcctcctgagtagctgggattacaggtgcctgccaccatgcccagctaagttttgtatctttagtagagacagggtttcaccatgttggccaggctggtctcgaactcctgacctcaagtgatccacctgcctcagcctcccaaagtgctgggattacgggcatgagccaccacgcccggccaacagttaagacttctgaaatgatgaataactaattatgacaccctggatatacaatataatgttatataacaaggggttataaaaacctaggaaaaggtcttcaggcatcttcagaaatagtttccttctatacccacctccttttctggttctaatttctttcacacttagatgtctataagaatctgtgcaccaggtcccttggccaggattcagattactcagtgacacagatgagctttggtgccagaaattcagaagatacggacaacagttgttactagcacatctcggcatttaactaacaggaaagccagactcagaatgcactgtacccacatacacataagttgtatcactgttcccagggttatgggaacaaacaatagatacaaggaggctgatttaagcgctgcctcaactcacctgagtacaaaatgattcctccagcaaagtattagccaaagaaataagagaaaacaggaaggcacagcacaagtatgtcactaagacgacaaaagtagttacctgagtcctgtcagtaccatcccccaataaactgccttctacaacttcgaaacatatagaaactgcaggatcatgtacttaaggaactgccaagcaatccagacaaatgcaacacaggcacgcaagagagacatttcacaagtacagatcttccagccgaagcttcaagtcgtggataagaaagcatgtctcaaaggtcataaagtcagtgggtcatttactaaaaatacaaagaagcaaaggaaaagcagccaagcccagctgtaagaacagcaacttccctgccctggtatttccccccaggctctgttacctttaaagcagagctccttctctgaattcctacttgcaccaatcaaacggctgaaggtgaaaagggtcaaaactaagcaacgttttcctaatttcttaaacagatcatgagcaaaccatgtactaaatgtccccaatcagcaataatttgtcttctctgacgagcttgtgacatccagggacgtacccaacccaggtcatccataccttgccagtgcccattactgctgttttgttttccaagagaaaatgccacccagtaattaaatcagaggaatgaagatcctggctcttctactagcatggataacatgcaataagtaacaacagttctccgcaaatctgcctttaaaggtgagtatgacacactgaatatacttgagatatcaaaaatgtgcgggggcatgttcccctttggctcaaatgaagacactgattttcagatctagcagtaatgtgcag

SEQ ID NO: 459 - DNA, 4703 bp, Homo sapiens
gcgtcgtttgcggcggcgcaggcgcggtgcgggcggcggacgggcgggcgcttcgccgtttgaatggctgcgggcccgggccctcacctcacctgaggtccggccgcccaggggtgcgctatgccgtcgggaggtgaccagtcgccaccgcccccgcctccccctccggcggcggcagcctcggatgaggaggaggaggacgacggcgaggcggaagacgccgcgccgcctgccgagtcgcccacccctcagatccagcagcggttcgacgagctgtgcagccgcctcaacatggacgaggcggcgcgggccgaggcctgggacagctaccgcagcatgagcgaaagctacacgctggagggaaatgatcttcattggttagcatgtgccttatatgtggcttgcagaaaatctgttccaactgtaagcaaagggacagtggaaggaaactatgtatctttaactagaatcctgaaatgttcagagcagagcttaatcgaattttttaataagatgaagaagtgggaagacatggcaaatctacccccacatttcagagaacgtactgagagattagaaagaaacttcactgtttctgctgtaatttttaagaaatatgaacccatttttcaggacatctttaaataccctcaagaggagcaacctcgtcagcagcgaggaaggaaacagcggcgacagccctgtactgtgtctgaaattttccatttttgttgggtgctttttatatatgcaaaaggtaatttccccatgattagtgatgatttggtcaattcttatcacctgctgctgtgtgctttggacttagtttatggaaatgcacttcagtgttctaatcgtaaagaacttgtgaaccctaattttaaaggcttatctgaagattttcatgctaaagattctaaaccttcctctgaccccccttgtatcattgagaaactgtgttccttacatgatggcctagttttggaagcaaaggggataaaggaacatttctggaaaccctatattaggaaactttatgaaaaaaagctccttaagggaaaagaagaaaatctcactgggtttctagaacctgggaactttggagagagttttaaagccatcaataaggcctatgaggagtatgttttatctgttgggaatttagatgagcggatatttcttggagaggatgctgaggaggaaattgggactctctcaaggtgtctgaacgctggttcaggaacagagactgctgaaagggtgcagatgaaaaacatcttacagcagcattttgacaagtccaaagcacttagaatctccacaccactaactggtgttaggtacattaaggagaatagcccttgtgtgactccagtttctacagctacgcatagcttgagtcgtcttcacaccatgctgacaggcctcaggaatgcaccaagtgagaaactggaacagattctcaggacatgttccagagatccaacccaggctattgctaacagactgaaagaaatgtttgaaatatattctcagcatttccagccagacgaggatttcagtaattgtgctaaagaaattgccagcaaacattttcgttttgcggagatgctttactataaagtattagaatctgttattgagcaggaacaaaaaagactaggagacatggatttatctggtattctggaacaagatgcgttccacagatctctcttggcctgctgccttgaggtcgtcactttttcttataagcctcctgggaattttccatttattactgaaatatttgatgtgcctctttatcatttttataaggtgatagaagtattcattagagcagaagatggcctttgtagagaggtggtaaaacaccttaatcagattgaagaacagatcttagatcatttggcatggaaaccagagtctccactctgggaaaaaattagagacaatgaaaacagagttcctacatgtgaagaggtcatgccacctcagaacctggaaagggcagatgaaatttgcattgctggctcccctttgactcccagaagggtgactgaagttcgtgctgatactggaggacttggaaggagcataacatctccaaccacattatacgataggtacagctccccaccagccagcactaccagaaggcggctatttgttgagaatgatagcccctctgatggagggacgcctgggcgcatgcccccacagcccctagtcaatgctgtccctgtgcagaatgtatctggggagactgtttctgtcacaccagttcctggacagactttggtcaccatggcaaccgccactgtcacagccaacaatgggcaaacggtaaccattcctgtgcaaggtattgccaatgaaaatggagggataacattcttccctgtccaagtcaatgttggggggcaggcacaagctgtgacaggctccatccagcccctcagtgctcaggccctggctggaagtctgagctctcaacaggtgacaggaacaactttgcaagtccctggtcaagtggccattcaacagatttccccaggtggccaacagcagaagcaaggccagtctgtaaccagcagtagtaatagacccaggaagaccagctctttatcgcttttctttagaaaggtataccatttagcagctgtccgccttcgggatctctgtgccaaactagatatttcagatgaattgaggaaaaaaatctggacctgctttgaattctccataattcagtgtcctgaacttatgatggacagacatctggaccagttattaatgtgtgccatttatgtgatggcaaaggtcacaaaagaagataagtccttccagaacattatgcgttgttataggactcagccgcaggcccggagccaggtgtatagaagtgttttgataaaagggaaaagaaaaagaagaaattctggcagcagtgatagcagaagccatcagaattctccaacagaactaaacaaagatagaaccagtagagactccagtccagttatgaggtcaagcagcaccttgccagttccacagcccagcagtgctcctcccacacctactcgcctcacaggtgccaacagtgacatggaagaagaggagaggggagacctcattcagttctacaacaacatctacatcaaacagattaagacatttgccatgaagtactcacaggcaaatatggatgctcctccactctctccctatccatttgtaagaacaggctcccctcgccgaatacagttgtctcaaaatcatcctgtctacatttccccacataaaaatgaaacaatgctttctcctcgagaaaagattttctattacttcagcaacagtccttcaaagagactgagagaaattaatagtatgatacgcacaggagaaactcctactaaaaagagaggaattcttttggaagatggaagtgaatcacctgcaaaaagaatttgcccagaaaatcattctgccttattacgccgtctccaagatgtagctaatgaccgtggttcccactgagtgattactgtcaaggctgcttagaatccaaacttggatttttgactctggcaaagcttttagaaatactgcaagaaaatgatgtgtacccaaacgtgagcataggaggcttctgttgacgtactccaacagaagaactgtgtttcaagttcaatcctacctgttttgtggtcagctgtagtcctcataaaaagcaaaacaaaaattaggtattttgtcctaaaacacctggtaggagtgtgtgattttttgcattcctgacaaaggagagcacacccaggtttggaggtcctaggtcattagccctcgtctcccgttccctttgtgcacatcttccctctccccattcggtgtggtgcagtgtgaaaagtccttgattgttcgggtgtgcaatgtctgagtgaacctgtataagtggaggcactttagggctgtaaaatgcatgattttgtaacccagattttgctgtatatttgtgatagcactttctacaatgtgaactttattaaatacaaaacttccaggctaaacatccaatattttctttaatgcttttatatttttttaaaatgttaaaacccctatagccaccttttgggaatgttttaaattctccagttttttgttatatagggatcaaccagctaagaaaagattttaatcaagttgaattgaggggattaatatgaaaacttatgacctcttcctttaggagggagttatctaaaagaaatgtctattaaggtgatatatttaaaaatatttttgggtgttcctggcagtttaaaaaaattggttggagaatttaggtttttattagtaccatagtaccatttatacaaattagaaaatgttatttaacagctgaattatctatacatatctttattaatcactattgttccagcagttttcaagtcaaattaataatcttattagggagaaaattcaattgtaaattgaatcagtataaacaaagttactaggtaacttcatattgctgagagaaatatggaacttacattgttcaattagaatagtgttctgcaaaaatatttataaaacttctcaagatactgctactgtaattttatatgaagataagtgtatttttcaataaagcatttataaattagcctttgtttggttatattgagaaaagg

SEQ ID NO: 460 - protein, 1135 aa, Homo sapiens
MPSGGDQSPPPPPPPPAAAASDEEEEDDGEAEDAAPPAESPTPQIQQRFDELCSRLNMDEAARAEAWDSYRSMSESYTLEGNDLHWLACALYVACRKSVPTVSKGTVEGNYVSLTRILKCSEQSLIEFFNKMKKWEDMANLPPHFRERTERLERNFTVSAVIFKKYEPIFQDIFKYPQEEQPRQQRGRKQRRQPCTVSEIFHFCWVLFIYAKGNFPMISDDLVNSYHLLLCALDLVYGNALQCSNRKELVNPNFKGLSEDFHAKDSKPSSDPPCIIEKLCSLHDGLVLEAKGIKEHFWKPYIRKLYEKKLLKGKEENLTGFLEPGNFGESFKAINKAYEEYVLSVGNLDERIFLGEDAEEEIGTLSRCLNAGSGTETAERVQMKNILQQHFDKSKALRISTPLTGVRYIKENSPCVTPVSTATHSLSRLHTMLTGLRNAPSEKLEQILRTCSRDPTQAIANRLKEMFEIYSQHFQPDEDFSNCAKEIASKHFRFAEMLYYKVLESVIEQEQKRLGDMDLSGIQDAFHRSLLACCLEVVTFSYKPPGNFPFITEIFDVPLYHFYKVIEVFIRAEDGLCREVVKHLNQIEEQILDHLAWKPESPLWEKIRDNENRVPTCEEVMPPQNLERADEICIAGSPLTPRRVTEVRADTGGLGRSITSPTTLYDRYSSPPASTTRRRLFVENDSPSDGGTPGRMPPQPLVNAVPVQNVSGETVSVTPVPGQTLVTMATATVTANNGQTVTIPVQGIANENGGITFFPVQVNVGGQAQAVTGSIQPLSAQAGSLSSQQVTGTTLQVPGQVAIQQISPGGQQQKQGQSVTSSSNRPRKTSSLSLFFRKVYHLAAVRLRDLCAKLDISDELRKKIWTCFEFSIIQCPELMMDRHLDQLLMCAIYVMAKVTKEDKSFQNIMRCYRTQPQARSQVYRSVLIKGKRKRRNSGSSDSRSHQNSPTELNKDRTSRDSSPVMRSSSTLPVPQPSSAPPTPTRLTGANSDMEEEERGDLIQFYNNIYIKQIKTFAMKYSQANMDAPPLSPYPFVRTGSPRRIQLSQNHPVYISPHKNETMLSPREKIFYYFSNSPSKRLREINSMIRTGETPTKKRGILLEDGSESPAKRICPENHSALLRRLQDVANDRGSH

SEQ ID NO: 461 - DNA, 4929 bp, Homo sapiens
tggacgaggcggcgcgggccgaggcctgggacagctaccgcagcatgagcgaaagctacacgctggagggaaatgatcttcattggttagcatgtgccttatatgtggcttgcagaaaatctgttccaactgtaagcaaagggacagtggaaggaaactatgtatctttaactagaatcctgaaatgttcagagcagagcttaatcgaattttttaataagatgaagaagtgggaagacatggcaaatctacccccacatttcagagaacgtactgagagattagaaagaaacttcactgtttctgctgtaatttttaagaaatatgaacccatttttcaggacatctttaaataccctcaagaggagcaacctcgtcagcagcgaggaaggaaacagcggcgacagccctgtactgtgtctgaaattttccatttttgttgggtgctttttatatatgcaaaaggtaatttccccatgattagtgatgatttggtcaattcttatcacctgctgctgtgtgctttggacttagtttatggaaatgcacttcagtgttctaatcgtaaagaacttgtgaaccctaattttaaaggcttatctgaagattttcatgctaaagattctaaaccttcctctgaccccccttgtatcattgagaaactgtgttccttacatgatggcctagttttggaagcaaaggggataaaggaacatttctggaaaccctatattaggaaactttatgaaaaaaagctccttaagggaaaagaagaaaatctcactgggtttctagaacctgggaactttggagagagttttaaagccatcaataaggcctatgaggagtatgttttatctgttgggaatttagatgagcggatatttcttggagaggatgctgaggaggaaattgggactctctcaaggtgtctgaacgctggttcaggaacagagactgctgaaagggtgcagatgaaaaacatcttacagcagcattttgacaagtccaaagcacttagaatctccacaccactaactggtgttaggtacattaaggagaatagcccttgtgtgactccagtttctacagctacgcatagcttgagtcgtcttcacaccatgctgacaggcctcaggaatgcaccaagtgagaaactggaacagattctcaggacatgttccagagatccaacccaggctattgctaacagactgaaagaaatgtttgaaatatattctcagcatttccagccagacgaggatttcagtaattgtgctaaagaaattgccagcaaacattttcgttttgcggagatgctttactataaagtattagaatctgttattgagcaggaacaaaaaagactaggagacatggatttatctggtattctggaacaagatgcgttccacagatctctcttggcctgctgccttgaggtcgtcactttttcttataagcctcctgggaattttccatttattactgaaatatttgatgtgcctctttatcatttttataaggtgatagaagtattcattagagcagaagatggcctttgtagagaggtggtaaaacaccttaatcagattgaagaacagatcttagatcatttggcatggaaaccagagtctccactctgggaaaaaattagagacaatgaaaacagagttcctacatgtgaagaggtcatgccacctcagaacctggaaagggcagatgaaatttgcattgctggctcccctttgactcccagaagggtgactgaagttcgtgctgatactggaggacttggaaggagcataacatctccaaccacattatacgataggtacagctccccaccagccagcactaccagaaggcggctatttgttgagaatgatagcccctctgatggagggacgcctgggcgcatgcccccacagcccctagtcaatgctgtccctgtgcagaatgtatctggggagactgtttctgtcacaccagttcctggacagactttggtcaccatggcaaccgccactgtcacagccaacaatgggcaaacggtaaccattcctgtgcaaggtattgccaatgaaaatggagggataacattcttccctgtccaagtcaatgttggggggcaggcacaagctgtgacaggctccatccagcccctcagtgctcaggccctggctggaagtctgagctctcaacaggtgacaggaacaactttgcaagtccctggtcaagtggccattcaacagatttccccaggtggccaacagcagaagcaaggccagtctgtaaccagcagtagtaatagacccaggaagaccagctctttatcgcttttctttagaaaggtataccatttagcagctgtccgccttcgggatctctgtgccaaactagatatttcagatgaattgaggaaaaaaatctggacctgctttgaattctccataattcagtgtcctgaacttatgatggacagacatctggaccagttattaatgtgtgccatttatgtgatggcaaaggtcacaaaagaagataagtccttccagaacattatgcgttgttataggactcagccgcaggcccggagccaggtgtatagaagtgttttgataaaagggaaaagaaaaagaagaaattctggcagcagtgatagcagaagccatcagaattctccaacagaactaaacaaagatagaaccagtagagactccagtccagttatgaggtcaagcagcaccttgccagttccacagcccagcagtgctcctcccacacctactcgcctcacaggtgccaacagtgacatggaagaagaggagaggggagacctcattcagttctacaacaacatctacatcaaacagattaagacatttgccatgaagtactcacaggcaaatatggatgctcctccactctctccctatccatttgtaagaacaggctcccctcgccgaatacagttgtctcaaaatcatcctgtctacatttccccacataaaaatgaaacaatgctttctcctcgagaaaagattttctattacttcagcaacagtccttcaaagagactgagagaaattaatagtatgatacgcacaggagaaactcctactaaaaagagaggaattcttttggaagatggaagtgaatcacctgcaaaaagaatttgcccagaaaatcattctgccttattacgccgtctccaagatgtagctaatgaccgtggttcccactgaggttagtctcttgtattaaactcttcacaaaatctgtttagcagcagcctttaatgcatctagattatggagcttttttccttaatccagctgatgagttacagcctgttagtaacatgaggggacattttggtgagaaatgggacttaactccttccagtgtccttagaacattttaattcatcccaactgtctttttttccctaccattcagtgattactgtcaaggctgcttagaatccaaacttggatttttgactctggcaaagcttttagaaatactgcaagaaaatgatgtgtacccaaacgtgagcataggaggcttctgttgacgtactccaacagaagaactgtgtttcaagttcaatcctacctgttttgtggtcagctgtagtcctcataaaaagcaaaacaaaaattaggtattttgtcctaaaacacctggtaggagtgtgtgattttttgcattcctgacaaaggagagcacacccaggtttggaggtcctaggtcattagccctcgtctcccgttccctttgtgcacatcttccctctccccattcggtgtggtgcagtgtgaaaagtccttgattgttcgggtgtgcaatgtctgagtgaacctgtataagtggaggcactttagggctgtaaaatgcatgattttgtaacccagattttgctgtatatttgtgatagcactttctacaatgtgaactttattaaatacaaaacttccaggctaaacatccaatattttctttaatgcttttatatttttttaaaatgttaaaacccctatagccaccttttgggaatgttttaaattctccagttttttgttatatagggatcaaccagctaagaaaagattttaatcaagttgaattgaggggattaatatgaaaacttatgacctcttcctttaggagggagttatctaaaagaaatgtctattaaggtgatatatttaaaaatatttttgggtgttcctggcagtttaaaaaaattggttggagaatttaggtttttattagtaccatagtaccatttatacaaattagaaaatgttatttaacagctgaattatctatacatatctttattaatcactattgttccagcagttttcaagtcaaattaataatcttattagggagaaaattcaattgtaaattgaatcagtataaacaaagttactaggtaacttcatattgctgagagaaatatggaacttacattgttcaattagaatagtgttctgcaaaaatatttataaaacttctcaagatactgctactgtaattttatatgaagataagtgtatttttcaataaagcatttataaattagcctttgtttggttatattgagaaaagggtagtttcctgcataaatggcaaagaacaatcatttattggtttattttgtctctactaaacacattagtcatttatcatttaaataccggacttcattagaaaccgttgtaacactttttctccctcctgccataaaaatacagtaagtaatttgcttaaaaaaaacaacacaacactaggaacaagtgttctggtttcttctcactgaactaaagacatttctcagtgatttcagtttgtaaatcagtaagacagtgcaggctacaaatcagtgcaggctgaagactgagattcaaatgatct

SEQ ID NO: 462 - protein, 1063 aa, Homo sapiens
MSESYTLEGNDLHWLACALYVACRKSVPTVSKGTVEGNYVSLTRILKCSEQSLIEFFNKMKKWEDMANLPPHFRERTERLERNFTVSAVIFKKYEPIFQDIFKYPQEEQPRQQRGRKQRRQPCTVSEIFHFCWVLFIYAKGNFPMISDDLVNSYHLLLCALDLVYGNALQCSNRKELVNPNFKGLSEDFHAKDSKPSSDPPCIIEKLCSLHDGLVLEAKGIKEHFWKPYIRKLYEKKLLKGKEENLTGFLEPGNFGESFKAINKAYEEYVLSVGNLDERIFLGEDAEEEIGTLSRCLNAGSGTETAERVQMKNILQQHFDKSKALRISTPLTGVRYIKENSPCVTPVSTATHSLSRLHTMLTGLRNAPSEKLEQILRTCSRDPTQAIANRLKEMFEIYSQHFQPDEDFSNCAKEIASKHFRFAEMLYYKVLESVIEQEQKRLGDMDLSGIQDAFHRSLLACCLEVVTFSYKPPGNFPFITEIFDVPLYHFYKVIEVFIRAEDGLCREVVKHLNQIEEQILDHLAWKPESPLWEKIRDNENRVPTCEEVMPPQNLERADEICIAGSPLTPRRVTEVRADTGGLGRSITSPTTLYDRYSSPPASTTRRRLFVENDSPSDGGTPGRMPPQPLVNAVPVQNVSGETVSVTPVPGQTLVTMATATVTANNGQTVTIPVQGIANENGGITFFPVQVNVGGQAQAVTGSIQPLSAQAGSLSSQQVTGTTLQVPGQVAIQQISPGGQQQKQGQSVTSSSNRPRKTSSLSLFFRKVYHLAAVRLRDLCAKLDISDELRKKIWTCFEFSIIQCPELMMDRHLDQLLMCAIYVMAKVTKEDKSFQNIMRCYRTQPQARSQVYRSVLIKGKRKRRNSGSSDSRSHQNSPTELNKDRTSRDSSPVMRSSSTLPVPQPSSAPPTPTRLTGANSDMEEEERGDLIQFYNNIYIKQIKTFAMKYSQANMDAPPLSPYPFVRTGSPRRIQLSQNHPVYISPHKNETMLSPREKIFYYFSNSPSKRLREINSMIRTGETPTKKRGILLEDGSESPAKRICPENHSALLRRLQDVANDRGSH

SEQ ID NO: 463 - DNA, 5087 bp, Homo sapiens
gcttcgccgtttgaatggctgcgggcccgggccctcacctcacctgaggtccggccgcccaggggtgcgctatgccgtcgggaggtgaccagtcgccaccgcccccgcctccccctccggcggcggcagcctcggatgaggaggaggaggacgacggctggacgaggcggcgcgggccgaggcctgggacagctaccgcagcatgagcgaaagctacacgctggagggaaatgatcttcattggttagcatgtgccttatatgtggcttgcagaaaatctgttccaactgtaagcaaagggacagtggaaggaaactatgtatctttaactagaatcctgaaatgttcagagcagagcttaatcgaattttttaataagatgaagaagtgggaagacatggcaaatctacccccacatttcagagaacgtactgagagattagaaagaaacttcactgtttctgctgtaatttttaagaaatatgaacccatttttcaggacatctttaaataccctcaagaggagcaacctcgtcagcagcgaggaaggaaacagcggcgacagccctgtactgtgtctgaaattttccatttttgttgggtgctttttatatatgcaaaaggtaatttccccatgattagtgatgatttggtcaattcttatcacctgctgctgtgtgctttggacttagtttatggaaatgcacttcagtgttctaatcgtaaagaacttgtgaaccctaattttaaaggcttatctgaagattttcatgctaaagattctaaaccttcctctgaccccccttgtatcattgagaaactgtgttccttacatgatggcctagttttggaagcaaaggggataaaggaacatttctggaaaccctatattaggaaactttatgaaaaaaagctccttaagggaaaagaagaaaatctcactgggtttctagaacctgggaactttggagagagttttaaagccatcaataaggcctatgaggagtatgttttatctgttgggaatttagatgagcggatatttcttggagaggatgctgaggaggaaattgggactctctcaaggtgtctgaacgctggttcaggaacagagactgctgaaagggtgcagatgaaaaacatcttacagcagcattttgacaagtccaaagcacttagaatctccacaccactaactggtgttaggtacattaaggagaatagcccttgtgtgactccagtttctacagctacgcatagcttgagtcgtcttcacaccatgctgacaggcctcaggaatgcaccaagtgagaaactggaacagattctcaggacatgttccagagatccaacccaggctattgctaacagactgaaagaaatgtttgaaatatattctcagcatttccagccagacgaggatttcagtaattgtgctaaagaaattgccagcaaacattttcgttttgcggagatgctttactataaagtattagaatctgttattgagcaggaacaaaaaagactaggagacatggatttatctggtattctggaacaagatgcgttccacagatctctcttggcctgctgccttgaggtcgtcactttttcttataagcctcctgggaattttccatttattactgaaatatttgatgtgcctctttatcatttttataaggtgatagaagtattcattagagcagaagatggcctttgtagagaggtggtaaaacaccttaatcagattgaagaacagatcttagatcatttggcatggaaaccagagtctccactctgggaaaaaattagagacaatgaaaacagagttcctacatgtgaagaggtcatgccacctcagaacctggaaagggcagatgaaatttgcattgctggctcccctttgactcccagaagggtgactgaagttcgtgctgatactggaggacttggaaggagcataacatctccaaccacattatacgataggtacagctccccaccagccagcactaccagaaggcggctatttgttgagaatgatagcccctctgatggagggacgcctgggcgcatgcccccacagcccctagtcaatgctgtccctgtgcagaatgtatctggggagactgtttctgtcacaccagttcctggacagactttggtcaccatggcaaccgccactgtcacagccaacaatgggcaaacggtaaccattcctgtgcaaggtattgccaatgaaaatggagggataacattcttccctgtccaagtcaatgttggggggcaggcacaagctgtgacaggctccatccagcccctcagtgctcaggccctggctggaagtctgagctctcaacaggtgacaggaacaactttgcaagtccctggtcaagtggccattcaacagatttccccaggtggccaacagcagaagcaaggccagtctgtaaccagcagtagtaatagacccaggaagaccagctctttatcgcttttctttagaaaggtataccatttagcagctgtccgccttcgggatctctgtgccaaactagatatttcagatgaattgaggaaaaaaatctggacctgctttgaattctccataattcagtgtcctgaacttatgatggacagacatctggaccagttattaatgtgtgccatttatgtgatggcaaaggtcacaaaagaagataagtccttccagaacattatgcgttgttataggactcagccgcaggcccggagccaggtgtatagaagtgttttgataaaagggaaaagaaaaagaagaaattctggcagcagtgatagcagaagccatcagaattctccaacagaactaaacaaagatagaaccagtagagactccagtccagttatgaggtcaagcagcaccttgccagttccacagcccagcagtgctcctcccacacctactcgcctcacaggtgccaacagtgacatggaagaagaggagaggggagacctcattcagttctacaacaacatctacatcaaacagattaagacatttgccatgaagtactcacaggcaaatatggatgctcctccactctctccctatccatttgtaagaacaggctcccctcgccgaatacagttgtctcaaaatcatcctgtctacatttccccacataaaaatgaaacaatgctttctcctcgagaaaagattttctattacttcagcaacagtccttcaaagagactgagagaaattaatagtatgatacgcacaggagaaactcctactaaaaagagaggaattcttttggaagatggaagtgaatcacctgcaaaaagaatttgcccagaaaatcattctgccttattacgccgtctccaagatgtagctaatgaccgtggttcccactgaggttagtctcttgtattaaactcttcacaaaatctgtttagcagcagcctttaatgcatctagattatggagcttttttccttaatccagctgatgagttacagcctgttagtaacatgaggggacattttggtgagaaatgggacttaactccttccagtgtccttagaacattttaattcatcccaactgtctttttttccctaccattcagtgattactgtcaaggctgcttagaatccaaacttggatttttgactctggcaaagcttttagaaatactgcaagaaaatgatgtgtacccaaacgtgagcataggaggcttctgttgacgtactccaacagaagaactgtgtttcaagttcaatcctacctgttttgtggtcagctgtagtcctcataaaaagcaaaacaaaaattaggtattttgtcctaaaacacctggtaggagtgtgtgattttttgcattcctgacaaaggagagcacacccaggtttggaggtcctaggtcattagccctcgtctcccgttccctttgtgcacatcttccctctccccattcggtgtggtgcagtgtgaaaagtccttgattgttcgggtgtgcaatgtctgagtgaacctgtataagtggaggcactttagggctgtaaaatgcatgattttgtaacccagattttgctgtatatttgtgatagcactttctacaatgtgaactttattaaatacaaaacttccaggctaaacatccaatattttctttaatgcttttatatttttttaaaatgttaaaacccctatagccaccttttgggaatgttttaaattctccagttttttgttatatagggatcaaccagctaagaaaagattttaatcaagttgaattgaggggattaatatgaaaacttatgacctcttcctttaggagggagttatctaaaagaaatgtctattaaggtgatatatttaaaaatatttttgggtgttcctggcagtttaaaaaaattggttggagaatttaggtttttattagtaccatagtaccatttatacaaattagaaaatgttatttaacagctgaattatctatacatatctttattaatcactattgttccagcagttttcaagtcaaattaataatcttattagggagaaaattcaattgtaaattgaatcagtataaacaaagttactaggtaacttcatattgctgagagaaatatggaacttacattgttcaattagaatagtgttctgcaaaaatatttataaaacttctcaagatactgctactgtaattttatatgaagataagtgtatttttcaataaagcatttataaattagcctttgtttggttatattgagaaaagggtagtttcctgcataaatggcaaagaacaatcatttattggtttattttgtctctactaaacacattagtcatttatcatttaaataccggacttcattagaaaccgttgtaacactttttctccctcctgccataaaaatacagtaagtaatttgcttaaaaaaaacaacacaacactaggaacaagtgttctggtttcttctcactgaactaaagacatttctcagtgatttcagtttgtaaatcagtaagacagtgcaggctacaaatcagtgcaggctgaagactgagattcaaatgatct

SEQ ID NO: 464 - protein, 1063 aa, Homo sapiens; identical to SEQ ID NO: 462

SEQ ID NO: 465 - DNA, 68302 bp, Mus musculus
  misc_feature (1)...(68302): n = A, C, G or T/U
gacaagaactcttacccggagcctgccttgagggcaaacttccagaaacttcagtcatttggaagccaaggaagagttggaaagaaatacattaaaaagcttctgtagacgtgatcaatacttatcagcggagtcaagaccatgacagcaagggacaggggaagaactgtcagagaccggaaaggcctgaagtcacacaacaaccgtgaatgaccagggatcctgaactggaacagaaaaataacgttcttgaaaaattggctaggatcacacacaatatcctattaatctccatgttttatgattccaaatgttgttgacaccatatgttgttaacattggagggatctggataaagggtatacatgaatcctttgtactgatctgaaggcttttctttaagtctaaaaatattaaatctagaaagggattttgcatgcagtcagggacatcctagtaaagatgatgacactgtccccaccaaaccaggttttgcggggtttgttaatttttttagttaatttgtgatttgaagaagggtctcactgtgtagaccaggctgacctcaaactcacagagctgtccctgcctctctctctcaagggctgagataagaggtgtttgccaccatgtgtggcactaacttcccaattttgtttcttattgttctctcaagaagctcacagttctttctggaagaccgcgagttgagggcttgatgttgaactcactcagttcctgtcctggagaagcaggccctggagacaagttcctccacaagcaagcttgacctgctagacaaaagctccatttgtttagcccaggggaaaatgggaccagagctgtctccaaaggggccatttgggtgtctgaagtggccaaggtacagagttaagatggacagtggctaggggagagcctagacagatgggcaggtccctcatcagaaaggacctaggccctgctgccacaagggccctgtggatagaaaccctaagcaatgaggttcctgaggagctttgacaaggacaaggatgaaggacaaggtcctgagactgaagttgggcaaatagcaacccttcaagggtttgagtcgtggagcccagtctgtgccttgctgtactccaacaccacccacagctctcaggctcaaacctgaggctttgttcattaggaggcaagcactcttatcatggaactgcatcttttatgatattttcaaagttttgagatagggtctcactaattcacctagactatccttgaactctttgtgtagcccacgcaagcctcatatttgccatcttccagcatcagcaacctgagcagcaacctgagtatgctccaccagtcctagtgtgtgtcctgctttggaagtgcacctatacagcactaaaaagaccaaggggacagtcctcacagagatgctgagaaagcagctccttagtactaggccaagttcgtgagcttccatcccccacctaaagacatttaactactcccgccagggtataattgttcctgcaaaatgttatattcagcatacgtttcgggaaacagcttcttactgcagcatctcaagttcaccattgacagcttaaaaatgactagtaatcagaatagcccataacaccccaaaagtatatatagtcatcctatgtcaattaaagacgtgaaaatgactggcaggtagactggggtctgtgagatagaaaatgaccagctcccttggtgctgggctctgacagtccatactcagagtgtcatggagagaaacacagtgtacatgtagctagaaactttcttgaactcccaggaatcatcagaagctccaagagaggagaccaggcatgaaagagaggcagggcaaaagtcacccttcaccttggccactccactgaaaccccagtttgccccaagatacacaggaagtatatggaagagaaggggtttgaacttcagtcttctgattccagccccacccccacccccagagctagaagcagagagaataactcaatgctttctctaactctctgtgaaccaggccagccctgcttctccctcaacacaaccctgtttcatttttcatatttatcctctcaggtatcattggaaagcatagacacacacacagagatgcacagacacacatacgcagtagagtttttccatagaagatgtcttctgtattattattcatccatagtccatctccttcagaaaaaccaagtccactttttcaaagcacacacattctatgttttctctagcaagtgggtgccttatggtaccagggaaatacacatatctttattttcctctatcgggaaaataggtcaggacaaaaggaaacattatcattttttaaagtgagcaaattagggaaaagaacaagtatagagaggaatgacacagaaatgtacagttgccacatgtgcaggagatgaaattcccacccaccctgagcacccaactctccatgccccagccccaccccagccccacgcccagccccaccccagccccaccccagccccaccccagccccaccccagcctcaccccagccccaccccagccccaccccagccccaccccagccccaccccagcctcaccccagcctcaccccagccccaccccagccccaccccagccctaccccagccccaccccactgagactgagtaagtagcagagggaagcattatatgacaaggtacgcaatattcaagagatgccttcaaacaagttgaaaagataaggaaaactgctgttcagaaaaaaggagaatattttcgttgttctggaaattcttacacagagagaataaatnnnnnnnnnnnnnnnnnnnnnnnnnnnnnnnnnnnnnnnnnnnnnnnnnnnnnnnnnnnnnnnnnnnnnnnnnnnnnnnnnnnnnnnnnnnnnnnnnnnnnnnnnnnnnnnnnnnnnnnnnnnnnnnnnnnnnnnnnnnnnnnnnnnnnnnnnnnnnnnnnnnnnnnnnnnnnnnnnnnnnnnnnnnnnnnnnnnnnnnnnnnnnnnnnnnnnnnnnnnnnnnnnnnnnnnnnnnnnnnnnnnnnnnnnnnnnnnnnnnnnnnnnnnnnnnnnnnnnnnnnnnnnnnnnnnnnnnnnnnnnnnnnnnnnnnnnnnnnnnnnnnnnnnnnnnnnnnnnnnnnnnnnnnnnnnnnnnnnnnnnnnnnnnnnnnnnnnnnnnnnnnnnnnnnnnnnnnnnnnnnnnnnnnnnnnnnnnnnnnnnnnnnnnnnnnnnnnnnnnnnnnnnnnnnnnnnnnnnnnnnnnnnnnnnnnnnnnnnnnnnnnnnnnnnnnnnnnnnnnnnnnnnnnnnnnnnnnnnnnnnnnnnnnnnnnnnnnnnnnnnnnnnnnnnnnnnnnnnnnnnnnnnnnnnnnnnnnnnnnnnnnnnnnnnnnnnnnnnnnnnnnnnnnnnnnnnnnnnnnnnnnnnnnnnnnnnnnnnnnnnnnnnnnnnnnnnnnnnnnnnnnnnnnnnnnnnnnnnnnnnnnnnnnnnnnnnnnnnnnnnnnnnnnnnnnnnnnnnnnnnnnnnnnnnnnnnnnnnnnnnnnnnnnnnnnnnnnnnnnnnnnnnnnnnnnnnnnnnnnnnnnnnnnnnnnnnnnnnnnnnnnnnnnnnnnnnnnnnnnnnnnnnnnnnnnnnnnnnnnnnnnnnnnnnnnnnnnnnnnnnnnnnnnnnnnnnnnnnnnnnnnnnnnnnnnnnnnnnnnnnnnnnnnnnnnnnnnnnnnnnnnnnnnnnnnnnnnnnnnnnnnnnnnnnnnnnnnnnnnnnnnnnnnnnnnnnnnnnnnnnnnnnnnnnnnnnnnnnnnnnnnnnnnnnnnnnnnnnnnnnnnnnnnnnnnnnnnnnnnnnnnnnnnnnnnnnnnnnnnnnnnnnnnnnnnnnnnnnnnnnnnnnnnnnnnnnnnnnnnnnnnnnnnnnnnnnnnnnnnnnnnnnnnnnnnnnnnnnnnnnnnnnnnnnnnnnnnnnnnnnnnnnnnnnnnnnnnnnnnnnnnnnnnnnnnnnnnnnnnnnnnnnnnnnnnnnnnnnnnnnnnnnnnnnnnnnnnnnnnnnnnnnnnnnnnnnnnnnnnnnnnnnnnnnnnnnnnnnnnnnnnnnnnnnnnnnnnnnnnnnnnnnnnnnnnnnnnnnnnnnnnnnnnnnnnnnnnnnnnnnnnnnnnnnnnnnnnnnnnnnnnnnnnnnnnnnnnnnnnnnnnnnnnnnnnnnnnnnnnnnnnnnnnnnnnnnnnnnnnnnnnnnnnnnnnnnnnnnnnnnnnnnnnnnnnnnnnnnnnnnnnnnnnnnnnnnnnnnnnnnnnnnnnnnnnnnnnnnnnnnnnnnnnnnnnnnnnnnnnnnnnnnnnnnnnnnnnnnnnnnnnnnnnnnnnnnnnnnnnnnnnnnnnnnnnnnnnnnnnnnnnnnnnnnnnnnnnnnnnnnnnnnnnnnnnnnnnnnnnnnnnnnnnnnnnnnnnnnnnnnnnnnnnnnnnnnnnnnnnnnnnnnnnnnnnnnnnnnnnnnnnnnnnnnnnnnnnnnnnnnnnnnnnnnnnnnnnnnnnnnnnnnnnnnnnnnnnnnnnnnnnnnnnnnnnnnnnnnnnnnnnnnnnnnnnnnnnnnnnnnnnnnnnnnnnnnnnnnnnnnnnnnnnnnnnnnnnnnnnnnnnnnnnnnnnnnnnnnnnnnnnnnnnnnnnnnnnnnnnnnnnnnnnnncagcgtactcatatacattaaataaataaataaataaataagtcacttgagatcaaatttatacaaagagtcagaaggttctgtttccttgatctgtataaacttgggggccaccaatgcatcttaagaaagactcagattggagagatggctgggtggttaagcgcactgactgttgttctaaaagacctgggttctagtctcagcacctacatcaaggagatctgatcccttcgtctagcctcctctgatgccaggaacacttgttgtacagacatatacagaagcaaaacacccatacacataaaacaaaataataaacttaaaaaaagaaagaaagaaagagagagagagagagagagagagggagggagggaggaaggaaggaaggaaggaaggaaggaaggaaggaaggaaggaaggaaggaaggaaggaagcagtgtccagacagctcagctcaggggttaaatgtgtttgctgttcttccagagaacccatttggttcccaggacccatgtcaagtggctcacaactgcttgtaactccagggtcagggactcaaaatgccctcgtctggcctcctagggcaggtggcatacacagatacacacatataagtaaaaattctaaagagaaaaatcatttctcttccacgaaaggaagtagggagagaggagaactatttggggtccgtgagaggaggagaggagacagggaaggtaatgcaggcaggtataagcagagtataatgatgtggatgaaaatgtcccaaagaaactaattgttttggattactctcattttttttttattttaaaaagatgttatgccctgttttaatgcagactccaaagaatgtgtatttacagacagcttccacagacctcttagacaactcaaaggatgtgaaaatttacatccttgcctatcttctagaacttatagctttatacaatagctcagaagccatggcaagagcaaagccctagagagacaaatgacaatattcgatttagaggacacctggctttttttttttaattgaaaacaaaacagctcttattctttcttggtgccacctacccagctgtacatcactggggaactcactaaatgttaagaaccctgatctctctctgtgtgtgtatgtggggtgtggggttgtgtacacaaaactgcccaaggtctcagcacaccagagctatccccaagaagtatggatgtttctctgttgcatgaatttcctcattctctctaagctgtcacatctgtgctagtgactttaggacagaccctctctccaccacctcccaccagtcatgagccaaggtccctggcctcttcaacacctagtgtcaccagaataggctccagggcatgggcaacataattcttcatcatattggcagaagaggttttctgggcttcctacccacacacccttaaggtcaggtcctttatgatggagtttaagatgggaaaagcattgcactgtactcctataaaggtgtaccagatgacttaaagaaactgttcttcatacattgaaattgctttgggggagggggtagtttcctgtcagtgactggggtagcttgaagtatactgtgactctagggttaagtctggacagtcagcctttggaggttctcagtgcactgacctgagaagtccccatagtccattgaataatgctataccacagactggtaatttatagtggacagaaatgcatttggcttgggtctctgaaggctctgaagactaagatcaagggccacgctttgggagcgggggttgggaggtgctttgtgttgcttcatagtatgtttccaagtatcccgtgggtgaagagagtaagggaggagagcttctaaggatggtgctctcgtggcctggctccctccataacagcccaggtagctcttaaagtcacccacctttcaatcctcttgcattaggaattctaactcatggactctgggcagatgttcagaccttaccatgaccccatgaattcctgaagggcttccctccgcagcctccctgcctgatttttgacggagcagatgccagacattgatgtgcatccctgatgtctatgaagcatacagatgcacccgctggcatagaagatatccatagatgtgtataaactaacccatcgggatgtctactgaggtgttgtctacagaagaagggaaagaagggaaacaggctagatgtccaccagtagagaaacaattcaagaaaatccagcatgaccctcaagtacagtgctgggcagctattcacactgacacaggtgaggagagaggccacactcagcaagctccttctatttaagttatatgactttattttttttttaagagaaagaaaatacagtattagagtgggtggttttaccttctactttctctggtgttttccttgaatcctacactcatatgaatctgtgaatgggtagagatacagagacggcggcaagcagtcacagtccaactccacttgaaaccgttgtctttgttagggttttgcactgtgaacagacaccaagcatgaccaaggcaactcttataaggacaacatttaattggggctgacttacaggttcatcttgcaagcgctcaactggccaggaagaacgacactgcaacaggatccttctgcacacgtttattgggagagcttgattgtagaggcgaaagacctcgagcccagaactagtgctgcttttataggcctaggaggggcgtgtctcacacccggattggttatgtactaagcctcatttgcatgttcctcatctgattggttatactctcagtaccttacagaacctcattatcatgcctggtttgcatgtctcacatctgattggttatactctcagtaccttatagaacctcattatcatacctcatttgcatgtctcacatctgattggttatactctcagtaccttacagaacctcattatcatgcctgggccaggcagtgtctttgcaaaagactttactgcatatgtacacattggttgtttgtccaatcttatgcgtggtggccagcagtagtcagtgccactcagcaacggcacatgtggcttcccacaggttcagaggtccggtccattatcataaaggtggaaacatggcagcatccagggaggcatggtgcaggctgagctgagagttctacattttcatctgaaggtagctagtggaacactgacttccaggcagctacgacaagggacttaagcttccaccgctcctctgcttccccaaggatttatcatcaacatgcccacagtgacacacctattccaacaaggccactccctgggccaagcatatacaaaccatcacacccccactttttgttcggaggcacaggtttctcagaccagagatactcagataaaagggcatagagcaatgaactctttagggctgtgtcttcccactcaaagtgagccatgaccccacacccctaaaacacatagacactcaggcctgccaaagagtgaccactcaacagctggaagatttgtctggatcaactgatgtctgttcattgagtcatggccagtcttggtgcagtgggcagagctgtggcctctagtcctagctccctggtttggacctatcctggtcttttgtttgtccacaaaataaatgaaatgtctgggtttggacaacgggcccacccaagccttttctgacctcgctgctcaaacggctcaagcttccccccccccaacccccaaaacagacccagtgagctgagatcaacccctctatgtgttcagaagggaagccagtcaaggatgctgagtcccaaatgaacggttgcccacagaggctgggaggggctctaaccctgactctccacacctagcaaagctgaggtacaaagccttctgctttctcctggaggctgttttgtccccacctcccagttggcgcctgcagctggctcaagtctcttccacaaggtccccagggctcctctgcttccccaaggtttttatcatcaacatgttcaactctttgtcatcatgttttattttcaagaactgccttccagccagtggcaggcgtcagagtttcaggtgtccttccttcttcaaacctcagctccctcatcaataaagtaagggcttggagagggttggcaacaactcaatttatggattccctggtcagatttaccaactgtcaccctggacagacccctgcagtctcactaagatgtatcagccctgagggactctccctgatgagtaaatgttccaagtgattctaccagtaactgtagagcacaccagcatatttaaatgtgcgataagcagagaccttgtaataataacaggcctaggaatgggctgcggcatgccagaggccgcaaagtggggtgcatacagggaaggagctggagcccaggtccctcccctgagccaggcatcttccaaggtaggcttgcatctgccaagactgagcaccaggacagagggcatcaggtgggcaagggaagaagaaaataagcctgctgatagctcaaattgaaggccttggtcaagcctacgtgaagagaattcgaacagctgggaaccagtggccttgacgggctcctctgcccaaaccaaaggccagcagcagcctgtgtcccttctgctgcctctaccctgccttctgcccttagctcttgcctctgtccaacctttctggctgtccatctctgacatatggttnnnnnnnnnnnnnnnnnnnnnnnnnnnnnnnnnnnnnnnnnnnnnnnnnnnnnnnnnnnnnnnnnnnnnnnnnnnnnnnnnnnnnnnnnnnnnnnnnnnnnnnnnnnnnnnnnnnnnnnnnnnnnnnnnnnnnnnnnnnnnnnnnnnnnnnnnnnnnnnnnnnnnnnnnnnnnnnnnnnnnnnnnnnnnnnnnnnnnnnnnnnnnnnnnnnnnnnnnnnnnnnnnnnnnnnnnnnnnnnnnnnnnnnnnnnnnnnnnnnnnnnnnnnnnnnnnnnnnnnnnnnnnnnnnnnnnnnnnnnnnnnnnnnnnnnnnnnnnnnnnnnnnnnnnnnnnnnnnnnnnnnnnnnnnnnnnnnnnnnnnnnnnnnnnnnnnnnnnnnnnnnnnnnnnnnnnnnnnnnnnnnnnnnnnnnnnnnnnnnnnnnnnnnnnnnnnnnnnnnnnnnnnnnnnnnnnnnnnnnnnnnnnnnnnnnnnnnnnnnnnnnnnnnnnnnnnnnnnnnnnnnnnnnnnnnnnnnnnnnnnnnnnnnnnnnnnnccagcccagccggagcgccacggcatccgagcgggacccggagcccgagcgggaccggagctggagccgaagctggagccggcactgcggcgcacggagcggagcgccgcagccaagccgagtaaggggcgcggggcgcggggagggccgcagacgggggtaccgctgcttatgcacgcagctggggacgcgctgggcggcgggggacgtggtcccgagcggaacctcagcgcgcgaggaactgagcggtttgcccgagactcctgcggttcctgatcccgcatcctccccacacccgagagggtcaccgggacccgcgaatccccggggaaacgcgaggaatccgaggtctgcctgagtctcagacgagtatcctcccgggatgcaagcccatgacagggtccccagccctgtgccctcggtttggagggtcgctgaccagtccactcaagaaaagatactagggcacactcttgtctggggtgagaggagagggactggggttttacagagtttgagcctgaaccctctcccaccaccttaagccaggaagtttgacaattcaacggcccagtcacttggaccatgcctcattttgtcttacctaggatagaaagagcatccttgccgctccccccacctaccctctcccttcataaggaagactttcctgtgcagtcccttgcaaaggacccgaagctgaatccgaggtggcagttcctctgactacgcagcactaagtggtacctgccactctccccttcccaagctcggcaatgcccacccttgcccccccccccgcttcctcctttcctggttgtccttcgggctctgtagtctagggacaggtgcgtagtatcgaccctgggctacgtttctcagccacccctgtgccagcatgggcagccaaacccagcctgggaagggacgagcacaagtgacatactagagaatcggggaactctaagagtccaagtgcacctgagggccaacagacggccctctagactctcctcagtgataaggactgcttactagatgacttcaccactgagtgactcagtttccctctttgaaacgtatgcatgattctgtttagtagactgtgcagggtctttggagccatgagacactcttttagctgatttcccagctgtgtgaccttaggcaagacacttgacttctctgagcctcagtttccttcacctaaaaatgtatggaagatcgttagacgagtcttctgcggaacctgacacacgtctatccattgactgcatttggccacaggtgtttcctgaggcaaagagagcttgatgtgaggcgacatggtgctcccatctttctcaccctctgcgtcggcctttggttccctgtgaatctcctgacatctccttgcaaaacaagactttcctttagcctctccctttttcgcaggcgcgtgctgacatcttctgccccacccaaacctttcctatgctgctgtccaggttcaagaggctcactgactaaaggggacactctaccttttttttttttttgcctttggctggcacttgccaccccagacttgagacctcctacattgcgttcatactctgtacaaaggaatttacacacttcgatctactctggattaggtgaagagaggattgctcgctgtgggttgacttgggtgagccacaggtgatggttggttgcaacaggtatcaggatgctcagccgatgggacagtgaggttaccaggagccgcagaggtgcccactgagattccttgctgactatccaggccattactttaggtcacaggaccccatgatgaacctagtgaaggaaccggagctggtggcagacagcatgacttgaacttaagagctagcaggtttttggggaaggatcttcctgagtctgagcagttggggcctagagcagcccagttgcatgcctagggcttaggaaaaaatatgagcagcacatatccacagagcggcacagaggttgtaaggaaccaggagcattgatggaaagaaaacagacgtcactcccatcactcctacccagaactggaatgagatcaggaaatgtgtctacctgttgctgggcagaatggctgcctagggtttcttccctccagaagtccctctctccttcttttgtaacctaccccccccccattcactcactagggtgccccattccctgcatcttctataatcctctccgcttctcatcccagaggagtccatccgaagctaattaggctcgttctgccgctccgctcagtatttggagcacagctgatagggagggtgatggagatgcaggacaatcatgagtctttggcaccaacaggctgagcaccctcagaggacatcagcggctcttgaaagcctagtgccaagcgtgaggtagggagcgggaaggtaccaatctgttcacagcctctaaaagggaaactgaggccagggaggcttgcccccctgggaagtaagcacaagataagagttatggctgccagcacagcccttgggagctagcagccaggtttatagcatttgattctgagcaggggccccattccccccccaccccacccctttgcagcctcagtgttgtcttgaaaacgggatgaatattgattgcacacctgccagaatggtcatgaagactaaagaaatagtgcatacaaggcgtatggtagtgtccagtggagcttggccaggagcctttgccgtacctgtgttgtaaacaccctcacacaggagtttgtaagcacaagcacttttgctttgatctaagacatgagcattctggtggaatgggggcggtcaggaccatcctataatcacccccacggatggtcacaatgctgaagctcctgaggttaaggactgaagtcgggtatagaataggtaacatcactgagactcatccgtaattttacacggggtttgtgaaattgataattagcacattttcacttcagcggcatgcaattagttatcaagattattcctccatggagatattaatgattttgtgtctaagagctggaaatgaaggtgctaacggtctgtgggctatcacacttttagacgctcctttttttttctccctactcaaacaattatcaaactcatttagtcaaattgacttaaaagagcagtctcccactcttatctacacctcttcagttttctccggagcatttatcacctccaacatccatagccctttcttttccattaccccctctcgggagtatcactcactgtgatgtctcccgagactagaacggcattctacgttcagtatgctttgcaaaatcataagatgtcttgtcatgtcatacaggaggtctgctatttttattatccttgccaagtgtgcagatcgattaaaaacaaaatattatagtatgggagatactggtccctcaaatatttagcaaataagacttgcttcgggagctgaaggagatagctcagtggttagggagctcctggtgctgttctgccggaagacgaacgagtttggctgacagcaccgaccctgggtggctcacagccacctgtaactcctgctccaggggatccgatgccctcttctgacccccaaggtacacacacatgcacatgtgaatacaagtgcaaacacacacatgcacaaagtaaaataataaggaattttttaaaaaaagacttgcataagtatcgtggatagcttgaagaatgttaagaggaatgaagattaacggggtctggggatgcgagctgtgatcccagccactctggaggctgaggcaagggaatcacaggttcatggcaactctgggctacagagtgagttcagtgtcagcctgggttacttagtaacaaacataaaaatgatgtttagagtccagagagtgtggaggatgtaactcagggcctatataaaagaccacagaaaaggttatttatttttcaagtatcttaaggaaacttcttatttagatgggaagttaactttaaaaaaaaaaaaagaagaagaagaaaaccttctcagtaacaaaagttcaaaggcagattagctttagcttctcccaaagagctgacattgattttttttccttccaattactttctaccacaaaggattcttttctgaatcttcattgtgatgatctttcagattataaaaatcaatacatttcactgtagaaatttttggatatcataaaaaatatatataaattcttaatccctccagtatattctatttccatcctaatcttttgctgtgtgtgagtgaatgttttcattaggacttctgttctacaaaataaaggccgtgcacagttctgtaacttttttttcccctaaaatactcaagattctttttccatttaacattatactgagtgtctataagtcattaagatttttggaaaacatgatttcatgcctatgtaatatcccactataaatgagtaccatagatttctcagtctcctcttactgatggtggtggccacactgggattatgtcatacttcattatcataaataatgcctgccaggtctcttctggtgttaccaagtcctgagccaggcttctgtgtactcctggtcaagacgagaccagcttgcagatggcctagctcatgaagttgcctaagacattagacctctatgttttgtccacagcagtgggattacgccctaaagagcagtggttctcaacctctgggttgtgaccctttgggcaaacatctgtctaccaaaatatttacatgaccacattcataacagtagcaaaattacagttacaaagtagcaacgaaaataacttcatggttggggtcaccagaacatgaggaactgtattaaagggtcaaagcactggaatggttgagaaacactgctgtagagggacggttctggtaaattagtgcaagtagagacccccaaaccaccagacagatcttgaccagtctagtacagcacacataggtcctgccagtgagcttcaaggtctcttacccacctctgtggtcactctcttctcccagtcgccctcaccccaactcctgagtgcattctcctgatgtcaacctcactataaatagtgtgtgacttagcagcacttaccaaggcacggacctgcccattgaggaagtccccggttgggtcccttcctgtgacagaacaaagttctgctggtggccttagacctgcaggggcaaggtggatagcacccccattgcaagagcactgcatctaaccaagtccaggaaaatttctcacttccttcctgctctgagcgatcacatgcccacccacagatccagggaacaaagccctgtgggatgacatcattcattcattcagtaatcactgtgtacttcctgtgggccaggcagggtgctaggttatctatgtcccttacacctacagtctgcagttcggagtggactcagaaccgtgatcacctcccctctcagtggactcagaacctcccctctcccaccctctatctcagatccaaatgcctgtcagactcacctacactttcctgcccagggcatttgaataccccgttccactcaactagagtctcctcccccagagagccaccccgatggcctatcttatctctgctcacctaccacccccctaccaaagcccactcttcttgatctaaatgtgccccgcctgcacatctatctgtctgtccggtctcccctgttgcccaacatgcatgaccactgacagtatcgaggggaatttgttcagcatcagaaccagtgagaggcatctcccccatcacctatcgttcagcatcatcctaagcccacagatgtcctctagaaatgacaaaagctgaccctgtgactgcccagctgtgactctttctgggagcctccttaggtcaatgagcttgcttgccacctcgacagcccccccccctgattctgaatctcagaactgtcatctatagaagttgaggttcgtgttgaggacctggtgagccgacagtatggaacagcggtgggagcaggtgtgtcccacagcctctataacatgactagagctccagctatacctaaagccctccctgcctgccttctgtcctctggtgtgaggtaggtggctcccctggcagtattccccaggaggccccacaccctccttattcatgtctgagcatcccacaagcccagcatggaggtatgccagcagcaggaacataaaaggacatacaaatgacatggtctccacacactatttagccacttcaaagcctggagtgctgcccacccaccctcccttgcactctgagccaggcaatccagttggagatgagtcacagctgaatctgatgctaggctcagagcgaggcacgcagtggaataattgccttaaatgggcccacactggccaggacaggtggggtgcagcccttatatacagcttatatacagctgcctggcagctctgtccacatgcagggacccaaggtaggcgcttgttcacatggataccgtacatctagctcctttggactgagaactacaacagaattttgcccaaacagagggtctgatgccacccggcagtggttttcctgtaggtcacttggagatcctctagtggggagaggggggagaaaatagacagagagttgatcacctgcttcttttgagtccagagaaaccccattaaaggctagggatatatatcaggagtggagcgcttgcctaatatacatgaggccctaagtacgatgatgcacatttgtaaccagtgttcaaaaggctgaaggaagaggaacttgagttcaaggacagcatgggctacatagcaagacctagtctaaaaaatgaaaataaattaatttttaaaaagaattcttttaagatttatttatttcatttatatgagtgcattgtagctgtctgtcttcagacacaccagaagagggtatcggatcccattagagatgtttttgagccactatgtggttgctgagaattaaactcaggacctctggaagagcagtcagttctcttaaccgttgagccatctctccagcctaaaaaaataaaataataaataaaaaataatttaaaaaaaattttaaagaaaaatttcaaaagataagaaaagccattctttatgttgccaaggatctgaggagactccttgcaagcctgaagggaataggtgctgggaccgtgcaccaggggctatgtgtaaagtgctagctggggtacacagtacagggaatggtggcctggatgtgatatatatcagtgtcaccatagacaacaggctatgtggagataatcaagtctacaggagaagcctgcttcttggcatgcagatcattatttgagggctatctccacatagtgctgtatgttagtataaggctaaggttgacttactctaacattccaggtacttgtaaaaacgtcctctaaagtgagcctcgagctagtgtgcatagaccatgctgaccctcatcgacatgctggggaagtgccacccctgtgattgatctgtcaccaggagtcaagaaggcttcacagagagatctccaaagctgagatttgatggcaactcaggagtgctccaagtagataggccagacaccatatgccagggagcgaaagcagccctgaagtccaagagacccactggagcctgctagtaggctaaccagaacaccaaggtcagacagcagatctccatggatgccacagggtgtgagtgggggacaccaggagtagcagagctcttcctctatgtcttttctgtgaccttgaccaagtaaaccaccttgggcctcagtgttctcatttgcaaaattgaaaggatattcctcatgcgtaaggtcctgtcccaaaagagcagatgaccttaatggcacttaccaagcatttaactgatatgaaccaaccacatgtgtagaaccaagtgtccccaaagcctccccacataggactgtctacttgaggtgcttagcacacatcctacgggaatacttaggcactggaccatgagacacccatcttccctatggcctgagaatcattagtcttcacctctgagtctctgggtccagtgagaggaacaggtaggcccagagagtcctctcagagagacaggatcctaaggggagccccgagagagagagagagagagagagagagagagaggataacctgcagctctccgtggcatctggggtccccaggagcagcactgcaggaagtgccctcagcatgcacttttttttttgtccagaattctttttatttaaaaaaaaattgagattaatataatcatgtcacttccctttggtttttttctctccaaacctttctaggtacccctttttgctcttgatcaaatttatgacctcttttactttaagtgttacatacacaaacactcctaaatactacaaccttctcaggttgtgtaacagcatgcactttttaagctcctgtgctctgccagtgcacagagagttagaagacactggggctgtggatgctggagtgaggaacgggatgcttgccctgaggtgcaggggagctggggaagggatctgagcaagggattgacatggccatgctgtctttaaaacagatttctcaggggctggagaaatggcttagtgggtaaggggctttctctgtaagcatgaggacctgagttaggactccagcacccacaagaaagaaggaaggaaagaaggaaggaaggaaggaaggaaggaaggaaggaaggaaggaagacagccagccaagaataagcatgtatacctataactcaaagctggggctgggggtgggaacagagatgggatctctgaggcttgctggctcctggttcagtgagagactgtgtttaaagagaataaggtagataatgctagatagagcaggacacctgacaccttcctctggccttcatacccatacaggcctgcacaggcatgtatgtatgcacacatatacacataacagagaagggagggagaaaggaagagagagagagagagagagagagagagagagagtgagttctggagcaataggatgagatatctgctcactggtatacccccttaacatccacatgtatgacacgtacatacacacatagtatcccctgcacatctacaaatgtgaacgcagacatcagttctcacatgtaatttttgaaagcaaggttcacaggccttaaaaattcttcttgaatctcctggtgtgaaattggttctcttagcagcctgggagatcacctcctaccctccctctccccagccctcctccctgggtcaaaactctcccttggtttctatggagaccaagaatggatgtcaggccagcctagggttcacacaggcaaagctgaacaatgttgggaggtgagtgacaagtcactactcacagaagtgtccccaggtcggctgtattcctcctgcctcccattgggaacaaagggagcaccatgaggcctgtcacacaccatgaggcctgccacacagccctgctgctcctaaatcctgttccaagcctatccctgcttctctaggaaggatgtgaggttcagggaggtgaactgctttgtccagagtcaatgccaggaagtggcggcattgactttagtattacaggatctaggagaaaagcaagggagcccagggacagctcacttgttcaccttctaaacagaaaagccaatgtttccatgctcagccaatgggccccatccagacttcatgcatgttcggaacagaaagcccgtatgagaaagattcctacatgaggctgggctgagagcctggggtctgattctcacaggtaaattctgccacatgatgcaatcagagaggctggaggccaccaaaaagggacaggatgtttcccactggcctccttgcaagaggccctggactcagcataagtggtcccactcagtcaccccgacaagtgcagttaaggggactggagagatggcttagcagttaatagcactggctgctcttccagaggacccaggtttggttcccagcatctatatggtggcttacaactctctgaaactagtttcaaagaactaaatgtcctcttctggtccctaacggcaccagacgcacaagtgagcacaggcatatatgcaggcaaaatgcgcatacaaataaaacaacaataacaacaacaaaattcttaaagtgcattttagtttagactgaagtcaagtgtgccactccctaagaagtcagagcccgtgctgtgtcctttggggacacacaaagagagcctggttaggttcagttatttagtgtagtatgagatgatattactttgaaaatgtttccccttgtaaaggagcgttaaagtggcccagcacagcctagcagcatggaaaatcaggtgtcacaccgagttcatgtggggataaatatgggtatggaagaggcattatccttccacttacctatattcttatattgatgcagaccttctaaagggatgtgctggctggctgagggcatgagagggaagcagatctgagctctcaccccaacctgtgagttggcagctgtgtgatcttgaccaagctacatgacttctccgagcctcaaaagagcactcttagttctttgagcagtaatcataacacagtttgaactgggagtcagggaacaccctcccaaagccagccacgaagctgtgaacaagcttctcccttctccaggtctgctttcctctaggaaatgaggactccagtctttaagaattggtccatgccttacagccccaaggcactggggatgctgtagcccatggaagacgtggaaacagtaagtggtccatggtacaactccatggctttccactcccactccaggtccactcaagagagagatctgccccacctccatcactgtgacctcaatacccatgtgatattcctgtatccacactccatactttgtagcccagggatcccagactaagaatgtgttcataaggcccatccccaaaagtgatgaaagcgcctagcccctggacatggtggatgctgtaggcattccatcacctgcctctttgtgtctccacaggcgagtagaggggcctcccccctcaagaagtcagagctgtgctcgtgggcaggctggctccgctgttctgctccaaggattacatgtccttcaaacgcccttgcccctgtaagtctcttccttgtccatcactgttggggtccagctactgcagagctagagggcagagtcgtaaagatggcaccagggtgtttgtttaaggcactgagcctgaccaaggctagtgtggagggtttgaatctggggatagggacaagagaacacacacaagccatccccacatctgcagtgggctgcctggaacctgaaagtcacactttgtcccgttcccaaaacgtggatcaaggttcctctgaagcatactgatcatgcgctctctgcccacccacaatgccatggccaactcagtgtgctgttacaaatgggttagacactggcagcctttccagggccttcagtgggatggtacgctgtgatggatggtttctgtgggaaacagaagccttcagttcttccaaagcttaaatgcccacaaatgatgcttaatggatttgggtcctacacactatgttccttggaggctgactccctaaggaacttcatcccatgtctctcaccagaaagcacccacagactgaagaaaattcatgattgttgagaaatcaggctgtgtgttgcggtgacatcagaggacaccacctgctcccttggtgtccacacacactgcctctcacctcactctcactaaggtttttgcttgagtttctacctctagtctgtgccgtcctaggctgagcacatctttctcgcatagtcacagccccagatgctaactcctaaaatactgagggaatgccagtgaagggggcggggctgcatgtcccatgtggatgggatttagtcagaatctgggcagggtcctcaccacttatatggcagggaagaggccagctgtaggctcatctgccaagagtagagccagatgtggtaaagctctggccacccagaggaagggaggggagaatggagaaggagagcccagctgtatgtgacactgttggtggcttccaccttcttgactcctgaccctcctaagttcttccaagccactctgttcacggatgctgtccatcgtggctcctttggcgtggaggaagggaaccacacctgtccctgttgctcagccccctccttattctgcacagccagacttcatccttgctctgttgccctgcttctggctgcagtcttgagcggttgcttcccagcctgtctgtcccagcttcttcctgggtccctctgctttctattgcccccatcccacctcatactcaacctgccccaaattgaatggtctatcttccctctagaccatctgtctctgtctctgtctctgtcatatctatatctatatatctatatatctatatatctatatctatatatctatatctctatctcatatctctatctctatctctatctctatctctatctctatctctatctctatctctatctctatctatatctatatctatatctatatctatatctatctatatctagttcatgatacaaaacgcatatatattgatttgggtaccaccattgaatctagcccttagaccagaaatatgagtgaccctcagtctccctgttgtgtatacacccatcagtgctgactgcccaagtgaatcctgggggttttgagtgaggccaacagttcgccatcttgaagcccctttgctccgcccccgccctgcccctgcccctgcccctgcccctgccccgccccttcagacacaatctagaagtctggaagttgctcgcttacctttatgcttgcttgcctgtccacgtcccagtagaaggtgagcttccagaaagcaggttcactctggccttgccctctggctgtcctcagcaccaagctcattgttgactgagcaaatgaagaagtaaatgaagccagtgccctctgggctctgccaccatgcagactgaagacgctcattcaggtcctggaggtgtggtgagcaggggtgcggaaagggtgcttcaaaaccctgaaaagcctccaacagaactcttaggagccagacatggggagcattcctgtaaccctagcatttgtgaggatgatctctaaccccgggccagcctgggctacagaaggggactctgtcttaaattttttcattcttaaatagtgaaaagaaatatttaggatgcccagaaatggccatctgaggccacacaccccttctttttcacacacacacacacacacacacacacacatctagaactgttctgtgcagtgagaaaggtgacagagaccaccacgttagctctcctgatgaccttgccaggttatgaaaagatgccgcagccatgaaacctggaaaactcaagagtaggagacagtttgttcccgttcacacccctgctcccccggcccctgtggtttagacatacaacccaccagaaagaagacccagcccagcagtttcccaaagaaagacctctgtccaggagtcagagcttgagaagtctgtggagagtgtaagagtcacatctacctggagcagagagcaaggtggctggttaaatggtgctaaaccactgctgaaaactgattggccagcgcctgcagaccctggggatgtagcatacttctcaggctcctgggagttgggcagacatcagccacaaagggctgggttgtaggtcagttaatgtccaatcccatttcaccgtcagatacctcagcttgtctctgccccttgagggcacctccatcagctctccacagcagtccccttgggaaaacgagaagactgagggagaaatgcagcaagaacaagaaagaggaggccagggaaaccctgtcagggaagactgggcgtgtgcaggttacgtggctgcaaaaggaaaggggtttcctctgcttgaagtgatgtctgtgagcctttccccgtgtgcagaggtcttgcctgaggccctgagtgtggaggaggtctgttgttcctcgggaagtctggagatgggggtggggggtggggatcggttccctctgggctctgccgggcagaacagcctaggactccctggggacccaggctctaagcacagatgctacacatcctcttcactgtcatctagcagatggcagcaccatgtagctccctctgggggtgaggggagctgctcccctctggcctctggggacagatctgaagttgttgtttgagggtgaggtggggtggaagaaactggagactaagtgtggagcaaagcaaatgagggagggggagacataccccaccatctatggagaagccaagtggacacattactgtcaagttcatggtggctgctagacgcctggcagggccccatatgcctatgatacctcccaccccctcagagtaagggtaatgttgggctgtggcatgggaacactctagccctgatatttgccatctgtgggagtacgactcaccttcccaagccctcagtttgctcattcacaaaatgggaccggtggattcttacagttcactactcagagttgaggggccacgggaagagttgagcttggttatcaggctctgaaaagatgctcaagagctgccccactacctatctctgtattagccatgtctttaacggcgggggtgggaaaacacaggagaggctctaggggtagatgggatttggaccgtgtgttacctttttgctgctgtgacagaataccagggcaattaactttagggaggatgcggcttcagcccatggtcagttggacatgtgttttggggcaagtgatgaacattgtagcaatgatagaggaatcctgtttgcctggtgaaggcaaggaagcccttggattcccaacatcctcttcaaaagtatatccctggtgatctgactttctggcaaggccccaactcttaagggctctaccatttgccataaatgcatgggcctttgggagacattcacagtacagggtttctttgctcttcttgttgtcatggttacctctgttgctatcaacagaaggaagaatttgagggcaaacagggaaaataatggagcacactcaaccttccaccatttctgtgtccggagcagacatcactaatcaattatggtactctttctcaatgagcctagaggtaaactcagagtcactctaaatgcatgctggaaatacccatagatcactagtttttgtccatccctcgatgaagcaaggcactagaggggaagggactttagctgttcactcctgagtctcagtttcttcacttataaaatgggagttgataaaggtttgcatgttagagggatgctgtgaggtagtgtggggaaacccttacaaggccttaggatccatgtttcttgtgacctccttgcttccttgaagaagttctgcgaagaagggttagtgtttccattccacagatgaggaaactgaggcttgaagtagtaaaggaattatccagggtgctacagctaaaagatgagggtttcagactggaatgagagtgatccggtctcagttttaactaaaccacagctggatcaacatacaagtgcagccaggtgtggtggcatgggcttgtaattctagctctgggaaagtgaagatgaaaattcctggagtttgctggccagccaatcagtgagccccaagtttagggagccaccttgcctccaaaattagaaaggattagtggaggcactctgatatccacacacgtgtacacacacactcacatgagcatagacaggatgtgtgtttattgataatgtgttggggtggtatgtagcaaatacagcaggcaaaacacccacacacatacaattgtcaaaaaatataaacactgtttggtgcgatggtgaatgggttatccgcaggaagactgagtcatacccgtgtcttgtagaaaagaacactgagtgggaacattcagcaatgggagctggtagggcttgttccagcacaagaggaacagtggccttgaagaatgcacggaaggtaccagagctggcacatcagtcatatgatgtgtggccctggaagccatggtcagatttcagcttttgctttctgggaatctttggaagattatgagctgaaaaaagtttcaattaccctggtatggcaaaagaggctggaggggggaccaaaggagaggtggaggtggtcaggaggctaggaagtaatccaggatgtagtgagagggcctagggcagaaattgaagctggaaacagactggaaagtgaagttgttcagatatggtgtgaatgaggaaagaagagaatcttggagctacacacacggaaggaccagtctgtcactgactgagctggggaaagtcctaggtcagctggcaacctgactgggctggacttgaaggcgcactacatctgagatgctgtgtagacaccagggtggagaggcaggcagacagccagacatatgagcctggtgggttcaagggtgagtctggagctggagatgtaaattggggagctgtcagtgtctgggtgctgagaagtgggatgaagccaccggcaggacaggacacgtgtgggacaacagtgcgggaagagaaggaactcgagcgtgagcattgcgtggatggagggcaaatgatctccacacctagtggtcttgccaagagcacagtgatccctgaagttgtcacctaaagccaggttcatggaggatagcctactctgcagctaaaggatgtgtaagcactctgctattcctctgccaagggctcccatgcgttagccacccctgcacctggaaggcttcccagggcttgagagaggcaggttgtcctctatgatgccaccacagaaatgaacagcctgtctgcttcagaaacaagggagcagaacctggaggggaaacccagggaccctgcatcccccgtgagtcactgaaccatctgcttctagaggctgctctttgaacccacccctcttccttgaaacttgagggcacctccctcagcagtttaggagacactcatccttgtgatcatccttctgcccattgccctccgcactcctcaccacccccaccacctgtcgcccctcagcccccaaccagccttctgctcctgcatccctggatggaatgtgtcttcagcaggaaagggtcagagggtaggttgtggactgagtaggtgtgccctaatgcatgggcagcacttaagtaggagccaggctcagccaacactggagcaaatgtagttaactcctctgaatcactgcttagccccttgtgaaatgggataattgggccaagtttccaatgtgacctgagggtttggtgaacacagagtatgctcaataaggttgattccttcctgacttttaatcccactgtgatagccgtgaagctacactcagacttccctgtagggtcctcctaaaactgcccctctccccaagattttctctcccttcccatcagccccagattggcacagtgactgtccagcaattttgacagctgtcatcaggatccccctccccttgcccagatgtaaaccagctcacccagccttgcgatgcaggctagatataagccatctgcaggagctgtcccaactctctcttaccataggcttggtaaccaagtgcagagaaggagcgggatgaggtctcagagtgtatgagttggtaccacgtcagtcccctgtctcagaattaagtgtggctgccacacacgagtgagaaagtaccccaggagagagatctaaataggaagaccagactccttcgaaagggaaactggcagagctgcttcaagggacaaagatcactgcacggtccctgctcccacctcacatgtccctacacacacacacacacacacacacacacacacacacacacacatcctcatttaagatgccggggacagtcagaggaacctaactttagctcctagatggagcagcccttaccctatttcaagcttcaggtacttgaatctctacctctggagggagtgctgagcgtccctaccctgcttggtctctagggatttttttctttccttcttttcctttctctctgtgtgtctctctgtctctgtctctgtctctgtctctctgtctctctctctctttctctgtctctctctgtctctctctctgtctctctctctgcctctctctgtctctgtctctctgtctctctctctgtctctctctctgtctctctctctctctctctttctctcactcagcagaaatgtcaccctcaagagccaatagttaaaaatatttaggagtttcatgagcaaatgggttaactactggtagctctaaaatcaccatggtagaggcgttacatcctggagattgacaaactacgaatctgaaacccttcctcccttctgccttcttttattttccccatcacactttccttcctccctcatggctcttttttccatcctttttccttcttttctgcatacagaaaggtgcaccatcaccagggcacagctcaaaggattcgcacaaactgagcatggccctgtggggaaacaccgtctcacctgcacccaggtctccttcatatgtttccccacttgctctcctgtgtcaatgacatccacaaatagtgtttgctgtgtatctcactttattgggatcatgtagtatgttattttgatcaatagtgtgttgcacactttacctacctcattgagtataattgtagatgaagtagtctctccactaggtagtattcctttgtgtaaatacatcattctactctagtgggcatctgggtgttctcattgtgagatgatgcacggatagccatgctgtggatattctagtacagtgatatccaagagaagttcttcagtaatgaaaatgctgtcttcgctgttcagtatagacagcccaagccacatgtggctactgagcactcaaatggttagtgtaaataaaaagatgggtttcttttaatttaattagtttttatttagtagctgcccatagccatcacagtgaacatataaaaaggcatcccacctaggaggaggagcttgggtggaaggatatacatacgttaagttttcaagggtaaagctaaacatttccatagtggctgttccagcctgacctcttatgagcaaatgtgagatttctgaccactgtatgctctgacaacagtgagtgtagtctaagtttctcatctcagccattcacgtaggaaacagagatagtgtatggtggttttagtttgaatttctatggtaacttcatgtagtacttcaaactctcttgttaaggaacctctcaagtcttttgcccatttacagtgtgcttttattattgatttctaggtactctttatatattgtgaatgacttctcatttggacatattattgaaaaaaatcttcttgattagagattgcctctgtttttcattgtggtacctttggattaatagaatatgcctactttttcagtccataaaatataggttaattttcatatatgcaattatttagtttatacatctttaactgaatatgaggttatgaatacattcttgtactccttgggagtagagagtttatcactaccattcctagaataaaactttacaaatgtaaaaactatgttgagtactttcagtcacatagcaatcttgtggaagaggttttcctctactgttactgacatttcagactgcagtaaatacatttgtaatgacatttaaagagcactcacgaaataatttaagctttttcagaaatctccctttcttttcaaggtaaagagggatctgtcgtactttaaagtatgcacactggtcctgacattttaaggacattagaggacacatggccattacacatgcatagtacgtcatcagcacactgtcaaccttggggacagtggcattgtggaggagtagggtgatcaattatacctgcagtagtgatgtgctggcctgtctgccaagcataaaatccaattatctacaacaacatgactatcagcaacccagacagtgtgtaatttacaactgaattggtatcttctgaaatctggcccacgatctttaagttcttttaaaatataaattatactgagtgtaaagtcaaaagcaccagacctcagtagaagggtgaggctgaggctcccagcctggcgtagtaaatttttagctgtcatgcccatgtcaggttctgttcagtcttagctcctgaactgggatttgagaaatgaaaggcccagctgtccacagttgtcttcacacaaatgccatgggtttggcaagctgatgaagcacatttgcaacgaagggacacacagccccttccctaggtttgacactggctttgatataaatgataatgccaagacatataaaaagccaaatgaaggtctgtctgtcagtttaagttggtaaccaagaacattcccgtcagctgtatgtagcagtggggcccagaggcaactcagctcaaccctgagtcaggtagtgggaggttccagaggcacggctgaggcaagccatcactcagagacaccctgggtaaacagtacacacttcctgtcagctgtggctgaggactgcatatttctctctgcaaaggattccccgtggggcttcttatcatttgaagaaaggcaggctgtcttgggttctctgcatgaacacgaagcctgggtttttttaaattgactttcctgcatcatcgcagatgggtccggctgttagtgctgtttgacactgagcggccgtaatggatggcatgactaatcgcttgtgtatccagcgaagaacaagcccgttttgggtgaaaagctaatcatgggggaaaggatggttctgggaagacgagggagaggattgtttcgtgtctcagtagacaaacagcttagagaggtgttcaataatagcagcagcagcaaaaccaaactaaaataaactggaagtcaaagccttaacacttgaagagtgaagtcccataaataccttcatgactttagaacctttaagtaggacacaaaaggttctaataatttaaaatgtctgcgttgaagtgaagaacactaatgggagtttgggccacacagtgggatgcaccatcctggggcacatggttaatgatgagatatatcccacaagtcattttttagcaccctgcctgcttcacatctgactttgactnnnnnnnnnnnnnnnnnnnntacctaaattcctcttctacacctcccccacgcactccccactcccatgccgccatctccttgtgggggtagggacaggcacatctgtgtccttctctctgaactatttgttttctggtccacattgctccagtgcaatgtagccctttggaaatggtaatggagttgctaacacaccctaccagaaagaggaaggctccactcactcactcactcactcactcactcactagcttgtttactgtggtttccatttctatctatctctgtagggttccaagactgcccctagggaatcaaacgggaccaccgagagtgcacaccagcccctttggactgactggctgccttcctcctcctcctcctcctcctcctcctcctcctcctcctcctcctcctcctgctgctgctgctgctgctgctgctgctgctactgctgctgtttcaagattggacttccctgtgtagctctggctgtcctgaaactcactatgtagactagactggccttgaactcaagagatcccctgcctccagaatgctgggatttaagtaaggtgtgtgccaccatgtctgatagtcttcacatttagatctgcttctaggaaatgccttcagggttctaaggcttaattccatatactgaacacctgttatgagccagccatcctgttagccagtgtgttttgattagcttacatcagaggacactgctccagttttacaaatgagtcaagggactcaaatcattcaataggtgctaggcaggcaacagaggcagctttggacccatgacttttgatattgctctgtaacttgggctggcctagttctataaatgtcacttttatttcctcagatggagggatgagataagagccttgtccaagctgtgtaaatatacagtacagcttaggttgagcccagagcattgctttatctgttctaactatacctagacctaggcctagaagcttctagccaacctaatctttcaagctgactgattcaaactggcttctctcagcttctgactgaatcactctgcttagcctcatactaactttggcaatattttctaattctggccccttctcattctctggctcattctgccttcacttgtgtctagcttgttctctctgtaacctgtctctgtaaaactgtccctgtaaaactgccacaccaccaccaccaccaccaccagcgtctagcttgttctctctgtgtgttgccctcttaagtaacatctctttcctgtgctgttctcctaagagttgggcatatcctatctttgattcattctgtaaaaatctttctctgattcatcactttgtctgcctctcaattagacatcacttaaaaacatggctgcttccttctacaaactaaccttacctttagtattagggattaaaggtgtgtactaaggatgtgtctataccccagctagatcatactataatcctgggtgtgtctgctctctgcttggatcctatctttggatgtgatcctttgccagagtggccatgttgcaagattaaaattcctatagatatttctctttctactaatgacacattacactgctaaactttttgaggttaattctggatactggggaaacgtctatggactcagagacaaaattctgccacatttaatgtgtcccagactcagacaccccagagctctgttccaggtcaggaaaacaggagagcaaccacggggctataattcctccctctcataaaggtgtgcaatgtcacactgttggaggagccggtgtgatatttttcatgtatctttctattgtggatgtccactttaattatactacagccaaagagcatattttgtacactttaatctctctgaatttgttgctgcttgtgctgtgacccacacatcccaaagagtgtcccatatgtgctggggtagatagtcctccaatcgtcaggtttaacacttggtgacgtgttccttaagattcaattatgtcaagctgcttgctagcatccttcaagccttccagatccttgctgagtttctagatagctgttgtcttacttattgaggatgcagtgttaaaattcccactttcaaatgacttttcaaatctaataatactctctctcacgttttgggggattcattagttggtacgttcacccaataactatatgttcctgatatattgacttgatactaggaggtgttcctgcctccagtaatatttcttgccttgagtttataaactttgtctgaaattagcataattttgccagctaaggccactaagatgactcaaggccaccaagcatgacattctgagccccatccttgggactcacatggtggaaggagagaacctaccccacaggctttattctgatctcaacatgaatgctggggcacacatatgtatgcacacatgcagagactagattcattactactcatgtggtattttttctcccatttctttttttattttcatctgtttgttttttaaatctaattaaaatgtgtttcttggagtcagtgtatagttgatcttgcctatttaactcactatgatactctgttgcttgaataatagatctatacatatatttttaaaaacaccaattaataaaatataaataatggactaggacaagggtcattttagagtatttgccttttgtctcctgtctcttttatgtccatgtgttcctcctgtacctctttggcattaagtaaacatgtttaatttgctgctgtagtcttctgggttttttttttttaattctgttagtaattgctctgagggttattcatgtctcttcctgtatcacaatctatttcagaatagtagtaattcaatccagtaaaatagggagactttgatctaatgcatctccccagcctcgttttttgtgctcttatttttcatattcattatatccttatatgacatgaacataacaaagtggctttctaattattactgcagaaccttatctctttgaggaagctaggggaagaaatgagggaactggagagatgattcagcaatgaaggacacttacaaaggaccagttcagttgcctgcactcacatcagggggtcacaaccacctgtagttctagctgcaggtaacccagtgccttcttctggtctccatgggcacccacatgcacatctgtttacttgcacacaaatgcacaaacatacacatcagtaagctattttagagaggataagatgagaaagagtacacctacaaaatcttctctaattattgagatatttaccctgtccagaactttgcatttcctcctgtgcgatcacgctgacacctgctatctgctcctttcagcttcagtgtctctcatatgcatgacaggtccagcagcagcaaaacctctcacttatgtttatctggaagcttctttgtttatttcgagttttgagggagttctgctaatacagagctcttgtttaatggctactttgtgccactccacggccttgggtgctccatggtttcttattggacatgaaccgtgagtccaattggttcccttgtatgtgctttcgtgttttctctgccttcaggagtgttattgatatgttgaagtgtggatatctttatgtttattctacttgggatttgctgagtctcttggcgatgtagagcaggttaccaaattagggaaaatttgatgtaagtttctgaggctctgttcatattctctctctctctctctctctctctctctctctctctctctccttcacatttgatgacattctgttgatttgttttcaagcttaccaatgtcttagttagggttttactgctgtgaacagacaccatgaccaagacaactcttataaagacaacatttcattgggactggcttacagggtcagcagcatccaggcaggcatggtgcaggaggaactgagagttctgcatcttcatctgaaggctgctagcagaatactgacttccaggcagctagggtgaaggtcttaagcctatgtccacagtgacacacctattccaacaaggccacacctcctaatagtgccactccatgggtcaagtatatacaaaccaccacaaccaattctctggcaccttaaatttgctgataagtccctctagtggtttctcatcgttttcttttcttggctctagctgccttggaactcaatatacagctgagtgtcctagttagctttacctgtcacctcagcacaacctaaaatcatctgaaaacagaggtctaattgaggaaaagtctcaaatcagattggtccatggatttatctgtgggcggttgtattgttaattgatataagaggacccagcccactgtgggcagcactattcccttgtcaagtagtcctggccaatataagtaagctagctaaacatgagcttgtgagtaagccagcagcattccccgggtttctgcttcgagttcctgtttgagttcccacactgacctccctcagtgataggttgtaacctttaacctgaagtaaaccatttcctccctaagctgcttttgatctgtgttttgtcacagcaagagaaaggaagctagaaccctgaggatagcattaaacccttggttctcctgcctttaattcccaagtgctgggattgcaggtgtgtattaccctgctggcttcatctgcttctccactgtggcttacaaagattctctatgccttggagcattgtagtcatgcattccttaaactctttaagcataactttctttattgacttgcacatacttatcattgctttaaagtttttgtctatctagtctgatatctgaaacacagttgttattggctggtttttgttttacttttatttgatattttctgactatacgtcgtattttcctgtttctttttctgtgtttttgttgaccattgagcattttagatgatgtagtaactatggattcttactttttaatgccacacaagctgttgtttgccaagttctttaagacacggtttgaattaaaactgtaaaaacctcagtttcgaccaccaaacagttgctggtgtcctacttgccttttcctttcttggttccggttttaaggttcccttccttctagttgactggagtctacacagctcagcgctcacccaaagagcaataagggcttgcactctaatgctttgagataggaaagcttacttaccctctctgctggtacatttgtagtgtgaggcccagggaaacattcactcctaggctgttttccagttggctctcattttcagttctcagtaagattacacctctttgcattaacctaagacagaggtcctcagcatgtgggttgagacccctttccaggggtcatctaagagcataggaaaacacagatatttctattatgattcatgacagtagcaaaagtacagttatgaaatatcaatgaaaataattttatggttgggggggtcaccacaacatgaggaactgtattaaagagggtggaaacattaggaaagttaagaacctctggccaaagagatctgggctctgctccatgagatgcctgacagtagtcaaccccagccaagttggagagcctctcaggcccttgaaatgacattcaggtgccagctatcccactaacccatttcttgctacactcaaagccacaactgcaggctaatataacagctaaccctgtttgttcaccactgagactgctgcgtaaatgataccattcaaagtcaactaactgtattgtctcttatccacggtatcagggagctgctggcttccacaacttgctgcatttgggccagcagagccgatggagaatatgggaagcgattccaggcaagatctcctgctttttttccaagttctcactgctcatttctcaagtagaattgaaactgtattctgctggtgtccagctcggtggctgcattcatggagtggttaaatcatctacctccatggtctcgtgtgattcacagaaccaccttcaaatataactgaagacagaggacattaaggacatcagtaacatcattatgtcactggccaaggcttttaatcactgtatttaccatccccaggacttcctctccctaaagcctttggaccttctaaatttggggggtcgggggtagggattattcattctgcaatagcaaataatgtagtggagagctacatggaccctaggtctgactcgtgggaatactcaggattttctttcttacataatactaattagcacacacacacacagagagagagagagagagagagagagagagagagagagagagagagagagagagagagagagagagaaaggaaagaccagtttctactcatggtgaagtcaaccacagaagtatctctgactgtcctgggggccaaaccagaaagagcaaagagagccagttctgcaggttccatgttctcctcctttgttgcacttcgctttttttgttgttgttcatttgtgaggaggtctcacattgcccagggtggtcttgaactcattatgtagcagggaatgatcttgaaccagttctcctgtctctagttcctgaatgttaggatcataggcatgtgccaaaaatttgactgtgggtatttttttttcctgtgcatcagcttattggggaaaacaaagattttaatgatcttcatattcatatctgaatatatttacctttagcttctgtcccagttatttttaattatcaacttcacagaacccacagtcatttgagggattgtctatccagatcagcctggcctgtgggcatgtctgtgggggattttcttaattattaattgatgtaggacggcccagccgactataggcggcaccatccctaggcaggtaatcctggactatacaagaaagctagctaagcaaaagcctgtaagtgtgtaagcaagcagtgctcctcggtggtctctgcttcaagctcctgcctccagttactgccatgacttccctcagtaatggactgtgacctggaagtataagatggagtgaatgaactgtgacctggaagtataagatggagtgaatgaactgtgacctggaagtataagatggagtgaacttcttcctcccttagattctcatggccagagtattttgtcacaaatgtaaaggaagctaaagccgacaccaatgggactgatagatggtacctatagtcgcacacctttaataaagctgcttcccaggtcagtcgcctcagtccaggctctgaggcagaaggctgcagtgaaactctgagaagacagcacttaagaaagcctcagccatccagcgctagactgtttcagcttgttgcatgaacaaatacagaaatctttggataacatggcctccaccagtgatcttctctctccctatgtggaacagcttgtggtcatctgcagcatttgtgactttaacattttatggattaaatattcatgagttcctggaaattccatggtaaagcaaatggtcattttctatcatgattataaatctcataatgcaagttggcaggttggagctaatctcctggttgataggtgccagtcccttcacccccacccttatgatgcttctcaacccagtttcacatctcccacgtatccagaatacacagtgactctaccaaggttctaggaacctggcttctcatggaggtgtagctcagtgggagagagcttatttaggatgcttgcccaaggcaacgggttcagtccgcagcactggggaagagagaagagatgtggagccgactctagagagaaacgaaagagaacaggaagctcttgaggccactgatgcatctagcaaggaaatgagagctggtttgtggctctagacaagtgtattcttcccccacagctctggtctgcaatggcagctggctcataaatagggaaattggcttgtgaaattggttcagtggacttccagcccatgaataaatatttctgcaaaccagtaataaaatattagggaatgatggccaaatggcaaagatatgggattgaggtatgtgcagggacatctgagctcattttagtgtgtttatccgagaggcaggatgtgtcctaatagtagaataaatcactctgggctcctgtttagagaatcattaaaggcttgtgggtggttgcatatatttccccagttatatctgagactgtggttgaagaccttctagtttgcaatggtgtgctcttctgttaactcttgacttatagaccagatgggagcaaagttacgctgctgaagtgggaccaggaagcttcatcgacacagtgagtctccccctctctgtgccacagcatctattgggggatctctcgctgtccagtttgagaggttcgtttctgtctgattcatggtgatggtgcaagcctggagtgtgcatgaaataagcacttagtggatattagttcaagatgcatgaataaatggataatggatggctaggttacctgatggtgggtggatgggggatggatggatggatggatggatggatggatgaatacatcatgtagatggataggtaaatgaatggatgaaggcatgaaggttaaatagttaaacaatggcggatcaattaatgaatgataggtaggtgggtagatggatttatggatagatacatgataggtaggtgtatggatgactgatgagaagatggttgggtagatggacaaatagacaagtaatggtaggtgggtgaagggatgtgtttataaattgatagatggatggtggatggttgattgataaatggattaatggtgggtatacggatgggcagataagtggataagatgctgagatgctgcctagctagataatgcctgagaaagcttcattacttagattaatagagaaccggcaaaataagtcgactactttatacttcattcccttctaccatattctgcccccacttcggacatcacaaacagaccttgattttgcattcgttgacttcttgtagaggtacgtccccattgtaagaatcctgaacagcaagtagcctaccttcacccctgtggtctgaggtgacactcccactccccccaagagtggaccctcctccctgagctctctaagacctaaatcctctgtggttttgcccatggtccttctgcctctcatcttgttctgcatgctgccttttgtgtcctctctgggacatttctgccaaaccctctagcttcctcgtgtctgtctcttgaaacatctattccatggctgggtatcagcaagagagctgaggtgtcattcaaaacagcagggaaggagatgtaaaaaaatgtccaagtcaacaagctctgtcctctgctctctcctgcaggaagctggggcctgtcaatggggagtagcagaagatgatacctgtaccatgttccctctgttccttccactgactgcatggctaccctgtccacttgtgctgtgaagggatgccctgctgaattcagaccttcccagggaagtgcacctgtgacaaatgccttaggaatttttgtgacaggggccatcagtcagatctatgtccttgcttcctctccttctttctctcagcagaatctctgggaaagtggtccaaaaatgttgactcagcactctggtgtcaatgtgccttctccccgtccctgaggctcagcaagcttagggctataaggaggatgctctgtactcactgagactctttggctgcccaaatgctgaactcagcaaggatttagcagcagtggactgctacagtagccccgccctgcccacgttctccatcctagagccaaccttgccctcagcctaacagggatcttgaatcttgttacctccattcatggttgtcaggccctttctgccctcataacccacctacccaccctgcagagaacagtttatggcagccagcaggtccagatcatattgtccaaatcatattgtaaatgagtcttagagccaggatagaacagatactgatcccttccattgtaccctcttttcccaattctcagtctatttgttgctaacaaacaaaatatccgaaattggttactttataattatgtttgttcatgggctcggagatgtaaatgtatggcattgttgttggtgtctactaagagccttgagaaagaggggtgagggagggagggagggattgagaggaggaaagagagaggggtccacattattctctcataacgatcctacaatccactcccattagaactaacttgctccaagactggcacttccaagggtaatggtccatgacttatatcccttccattgagctccgccccttgaagatcaccactactgtaacttgagggcccaacttccggatcataaacttctgaaggaagaatccacaagcaaagcacagtgcctttgctatacctccctgcttcatgaacttccagatcccaggcttatgtacacttaagcatggtacttcagcccgcagagtgaagtgtcttgagtgaagttcactcaacggagcgacagtggtatccacccagatcatttaagaccttctgagctagtatgaatgagtagcagcccattcttggggcttcaacctggaagcaccacacactagtggcctatggatcccagcactactccagccctttggggcctcagaatcccatctgcagaataggagcttactaggctatctccaaagcttgtacagaagtcaggttgatggagccaagaatgtctctgcactgttaggctgtgacctcaagggcacctgcctaagccagggcctgtggtctgccctgtgtagtgtggtagcatacgctcagcatcctgcatccccagctgcatgcttatgtggctactgggcacccctgcccagtatcagatacagcagcctcttcacgagtctcctgactcccttcatgcctctgcccatctacctcccattctgcagtccaccggctcccttaaaacattctgacagtgccactgtttgcccctgggcaaaggacagcctcttggcttgacttttaagaatccccatggtctggatctgacagtgtctcctaggtcactctccaccagttctctctgcagcttttacctcttgtggctcctcacacgcactggccctcctcagggccccgaagttcttgtgcagtgcaagttgccagacctgtttatcatgaactggtaatcttccctagatttggactccctcctcaagacttgacctgcagctggccataatgtacatgcctgtaatcttggcacctgggaggctgaggttgaattgtatatagggtctcaaaacagaaacaaagtaaaatcaaacaaaaatcccacaagacctggtgaactctctttgttcatcagagatgtgcgtactctgccttgcatgtgtctgtggaccttataatcagacttggagagttgggtgagtggtggacaggaggatgggccagtgggtgagtgagaatgacagaaagcagctccttcattctcctcagggcacacagagctgtgaaccactgatcgttcttggtgccattcataggctcctgagcttcctttctgagctagccctgggcagaggagaatgacaaagagaaagggtatgtgcccaccctccagtggctccaagccaaggcttcgcagaccacagggtcctggattgtaaagagcaatctgccccaagccctggctccatccctttcacaaaccctgtgcctctgcctcttccttatcttgtgttgaaagacacctagctgcctctggagggttaaatgagctagacctttgtgcagagaccccttgtgtcagctgcctggtgagttgcaagttctcatcctacagcatgctcagcgacagcaagacccactctgccatccagagtgtcgctgggtgttctggaataaatccagaggctgaacacccacagagcagtggctcacggcccagccctaggtagctcccccttccgtatgtacctgcttgagacccacgagctctcacctctgggaacttggtatctcaccagcaatgttctgctaacttgtcctgagtaagcctaggtcacagcctgacaacacagaaagtagcctggaaggcaggagaaatcattttaggagagattttcctttttgcaagaaaccctgaactcccaggatacagcacctggtgactgtccacagaccttcctcagaatgcagagcaaggggactgaggcttcccagtgacccaatccctttctgcaatgctctatgactttggggaaattccttaacctccctgtggctcttcccttaccttttacctggggatcccatcactgaattaaatgaaatgacctagtaaagtcacacagtaggtactctggagataggcaccacccactttgaggaatggtgacctatcagggaattgcgtacacggtgaagtggtgtgcacttggccctgggcatctttggagacgtgtcctggaaaagaagtcaggggctgagacaaagcttgcttcttcctctgccctcgccgcagctgatgcaggggataggaaggcagggcagtgtggaaggggactgtcatgttattgctctgcagtcatatttatcttcttgataaaatggccccgagtttagaaattgcaagagtagctctcataatttaaagccgagcctcctctgtgggtgatggtgactgagagattaatctcccagccagccatgcaagagacactggcgccaacaggcttcatctacaggcatgggagatgccatctcccatctaactcataatgagcctggagtcctcggacaaggcaagctctcatctcctgctgcagcaggcagaggaagggacatcttcaaggtggccccgtggggctaacacctgttggcagcaggttctgcatactgaaaaaaggagacagggcatatgtgcacagtcatgcacatgcacacgcacacgcacacgcacacgcacacacacacacacacacacacacacacacacactgattaccatttaggcacctgcagccctgaaatccacagctttctagtgttgtgtacatctactttagatcagggtgtgactagtgtgttcccagccctccccacatctgggttcagaatgggacaaccagcccaaagccccactgggagcaagactcttgctctgagctccctgttccccagtagtgcacaacccacatgccacagtccctgcccttgactctgaaggtgagagtaaaagcatggtcattggagaggacagcatggtgtattgtgtcacacaaaatgatggatggctgaaagcaccaattcatgaccagctctaggcaacttatgtcattgcatggagtgctccgttgaaaggatactaaggctgtcaaacagggaggagaatcatgattgattagtaatgcctgtcaccggcatagacatgaaacagtgggaggcgtgctacagattagccctacgccaaggtcagacagcacaatttaaaatgatctctttggaatgggggcggggaagtaaggtgggtgcaagggagtttcgctttttatctgtgtgtcacagaaaaaaaaaaacaaaaacaaaaaaaaaacaccaaacagaaaacaatagctgacagtaaaaatgagaagttggcacttcacctaaaatccaagctgttaaagagaggagagatgggattctagcctaatagaaaacagagagccaaccaagccatcctgcagatatttaatgagcatctattatgtgcctggcatttgaccaggtgctgcggattcagtaagttaggcaagataaatgggatgtttatattcaagaggctaacaaactagtaagatgggcaaggagcacaagacacagaatcacaataaataagtaaacacatgagcgagtgaggcattcagagatcatagtggcgtcatctaaagtaagcatacgctgtatatgctataatgtcaggtaaacaagtctgccttgtttgaccacctcactacatgagtgacaatgggtaggaaatgtttgtcagcctgcacatctctagtcaaagcagaaagtgagagaatccaccagaatctcacacaaagggtgtatctcagcgacctacagatctcctgtgaggctccgcctcccaaagcattcacagctaccaatcataacaccggatctccgaattcagtaatctccgaggatgtggcttttaaggaaaagtccaaagactgagaaagaggaagctgaagtccatgtactttgggggttattatggtattagtttgaatattaattttacacagatgtgttttcctggtatatgcctagtgggatggtggctggatcatctaagattacatttgggaaggaccagagtgctttcagaactcagccaatagcatcacgtacattcccatgagcagtccaaaagattctcattcctccacagtacttggtgttattgatcccaccggtcatgcccatctgaatctctgcaccttttctttgtctggtttttggtggtggtggtttgggggatgttgttgttgttgttgttgttgttgttttcctgtttgttttgttttcaagacaggatctttgcctaagtcggtgttctattgctgtgaagagacaccatgaccaaggaagctcttataaaggaagcatttaactggggctggcttacaggctcagagtatcatcatggtagaaagcatggtggcatgcaggcagacaaagtgctggaggggaagctcagagctctatttccagatctacaggcagcaatggggggggggggagcagagacaggcagagagaaacagagacagacagacagatgacagacagagacaatggactgacttatgcctccacaagtgctgggattaaaagtgtgtgccactacacccagcacattttcatgtgtttattggccagttgtattttggagaaatgtctattcttatcatggtttactgctaacagcacaatctttatataaccagtgtggtgatagctctttatatattcaagactttcataccctctgagatatcgactcacacacagttctctcccattctgtggaccctcttttccatcccttcatggtctcccttggtacaaacgggttataaatgttatgtttatgtttctcttcggtctctcatgcttttgttgtcatatccaagaactgattgccaaatcagaagtcacgaagtcaacaatgcatttcactgcactgtagcaggaggctttgctctataaatattggactttttttttcttgtcatgcctttgtctgatcttggtatctagttaaacatggccttacataataagtcaataagcattctcacctatactactatttttaagaattctgtgaaaattgggattatttcatatatattcatatatataacaactatacatatagaactattttatctatacagatgaagtgcagtatgtctgtccacacattatataacaccatcaccacactctccagaactttcttttcattttccaaacctggagctttgtacctattaaagttacttattctttaatgtttggtgcaattcaaagtgctggactgttcctggtagaattggttttattagtcattcaatcacttcaccagtgataaatctgcttacaggttttggtttgtcctgtatctattcacccagttttgtgcatctctaagaatttgttcatttcatgcaagatatccaatttgctggcatttaattgttcacagttctccttgaaaccggtatttctgtagggtctgtagtaatgtttcctctttcatttctgattatagtattttgaaccttctcctttcacactcctttccttagtcattttggcataagactcacctattttgttcatctttaagaaataaagtatggccactccgacgttacctctctttgtcttctgagtctacatttcacaaatgtctactctaatcttcctgccttcttcttacacagactccagtttgcccttctatttccagtattctaagggagaagctattcatcgatgtgagatcatttttaaatttatacaggcacttgatgctgtaaatgtccattagccactgcattagcgtcatctcacagcggttcactcaaactcatcttaatgtatgtttagatttcccctctgcctttctctctgacttgttatttgtttattgatgtgttgcataatttccacatatttattatgttcacaaatttcctggtgtttgtccttctaatcttccttgtaaccaaagagcatactttgtacagttttgatccgttaaaataaattgtagtacatcttacatcctggcatatggcccattctggaaagcatcccactgtgctggaaaagaatgcatgttatatcaggtggagtgttgtaggcgtatgttaggtctaatttgtttgtaattgtgttcaatcttgtgttttctttttttcttccttctgcttagttgttcatttgtcagttggctagctcataagttggtttgtgagagggtctcactatgtaactcaggctggccttgaacttatgattctcctttgctgggattataggtatgtgccacgacctctggcttctacccaactttatagaaaatgaaatattgaagttccagctgttgttgtgctgtgtctatttcctctgctctttagtttaatgtattttggaactctgtttattacttaggtaaataaatgtttatagctttttgtggcttcctcaaagattaacccttttattataagatgtcccttttatgtctaaagactctgttgtaaatttcttttttcttaatgattaaagccacttgagccgtcttttaattgttttcatagtatatatttgtccattatttcacccttaattctggttcccaagagagatgcctacagacagttgcccagcctgacagactctgctcttggtcaggttggttaaaagaacacattcagcatgatagttgatacagctgtatttatgcatgtcattttacctttgtctatgtgtctcatgnnnnnnnnnnnnnnnnnnnnnnnnnnnnnnnnnnnnnnnnnnnnnnnnntggcaatagtgtaatatttttattcctataaaatatttcctaacatattcagtgatttttctagggcttgccaccactacctcacatttatacatattaatcccagtgagaattgttactcacattcttacataactcagttctatcttccccttccctgttgttttaatgcccctgccagcttcttatctatctcctcctgacttgtttagtgagggaaccacagcacagagagaacctgcctcagttacctaaaggcacttgagttagctaacagcttttagtctcagtgtcttcacacgaaatgggaagggttggatgaacataacttcaaagaggaaacaaaatcttaacactgagcctacacatagtagggcctctgaaaactggcctgtaattgccctcacacaatcccaagaatcaattttcattgacattctcctgtcagagcgtcaagaagtgtgcacgtgggctggagagatggctcaatggttaaagcacccaagcttggagactggagttcagattctcagaacccatatagatgctgggtgggttgggaggtcatatactcccagcctcagaagttagagagaaagaatctccagtcagctgactactgaaactagccctattggtgatctctggatttgattgggagaccctgcttcagtgagggcagtgggagagggatagaagatgattctgcacctcctcgggtttccacaggcatgcaccccatgctcacatgtgcccacatgtaaacatgcatgcatacacacgcatacggggtgggggagggagcacaaaaaaagaagaagcaagcatgcgcagctaggaccatggagtgcacatcccaccagggtatcaggcgggaatcacaatgacacacccactaatgatgatgatcagtacgctgcaaaagcccccagcatgagccaacatgctgccaggcatgttcaaatcccagctaagctcccgaattctttctttacccacctgtccttgctggggactgagtgtactggggttaatctggctaatttggaaccctccctgagtcccttgctccaaattcttatacttttgccttctgcacatcccctttcccttcccaagactttggtaatgatgtttcagcctggcatcttggtagaagagattcctggtttagtactgagattcttcagtttgagcctcagttctgccttgagcaggtccactgccctatctgagttttcctatctgtgggttagatgggttattgaagcagaggggccagaggaaacaaagtaggataacctataaccaacagaagcccctatgagcagttgagtggaatcctgtttctctctcccacaacaggaacaaaagcctgaccctgactatcctccacttatttagagacaaatgactcccaggacaacaaggttgagagaataaggtttgtggcaggcctgggacccagctgagtgtcctttctctgtgtccacagtagcacgatacaaccgtaccagctatttctaccctaccacgttctccgagagctctgagcacagccacctgctggtgtctccggtgctggtggcgagcgctgtcataggtgtggtcatcactctctcctgcatcaccatcattgtgggaagcatcagaagggacagacaggcccggatccagcgacaccaccatcgtcaccgccgccatcatcaccatcaccgccaccgcaggcgccgacaccgagaatacggtgagctctgagtcatgctacttctgccattgtggctgacttaaggaggtgtccagggctagaatctcatacaatggggtcagggaagtatcttggtctataggaagagtgcacaggtgtccactatcatgtcccacagcacgaacaggcctgtggtctaccacgaaaagcacctacagaggctaaaagtcaggtggaaagtgtgtcatagtcctcagcacctgccactcttgagtcatgctgtgttgatactggtccagatggcatctggatgaatggatggacggatacatgcatgcatgcatgggtgaatatatggatgcatggatggattgatggattcatggatgcatgaatagatgaatgcatggatggataggtacatggatggatgcacagattcatggatgcatggagatatggatggatggagagatagatggatttgtgagtaggtaggtaagtgggtaggtggatggtaggatgcatggaagataactaggtaggtgaatggctagagaggatggctggacaaatagagaaatgagtgagtagagagatgaacaaaatggatgagtagaaagacggaaggctgggtgagtggtgggtgaatggcagacaaatgactacatcgaagcgtaagtatgtagatgagtagatggatgagaaagggatgggtgagtggataagtggagatacagatgagaggagaaatgaatgaggggaaggatagatagatcggtgaatgaatggataaagagagggattggtgcgtgaaataggccagcagagggataggcgaataaggaattgaatgcgtatatcagtggatagttgggtggaagaaattgatggataaatgggcattacggatggatagacaaatggagaaatagatgaatgagggtagaagattagagatagaggtggactgagtcatatgcttgagtgagataggtgatctgggtgaataagtgggaacttgaggcccaggtaggagtggataggaggagtagctaaacagatagatagatagacagacagacagacagatagacagatagacagatagacagatgatagacagatagacagacagacagacagacagatagacagatagacagatagacagatagacagatagacagatagacagatagacagatagacagatagacagatagacagatagatagatagatagatagatagatagatagatagatagatagatagacagatagacagacagacagatagacagacagacagacagaggagtagctaaacagatagacggatgaatcagtgatggaatgaatgaacagtgaaaatatcagcccacaaagaaaaagatcattgtgggatttcttgtcatacattggtacattggtggctgtttgggggttagagcggaaccagtcccagtagggtccatctggtcagaatacatggacatttacagaacatggccccctgactccatctcattcctggcagggaccaccaatgaagcagaactatttagttctgagacgatgttccatggcaggaacaaggcccacgggagcatgcaccggtcagccagagccactacccagactagagaccacctgccccaggagaaaacaaaaacaaaaacagaccccccccccccccccgtgaagtgcaaaaccctgggaggcctcacactgtagctgaagtatttttgtgggacctgcagggccttccccattcaaggcagaagaagcctgggcacagggggaaccagcagagctgggacggtgttagcagtcaagggacacctgaagctagcacagaggactggtgggaaagagaagagcccctgctgattcctttgcataatctcgttatgcaaaatcctcctcccagttttgaatggctggctcccagttttgaatggctggctgggctccggacttcaattcgctgatccaaactttaggttggagcagttgaacaatggacccgggctcacccccttgagagaggtagattagagatgtgagccctgggtagctgagtacactcagaccgacccctacataaccctaaatggccagctataggcttagggctgggtacagcaggcacgtggacgccaaaggccctttggacctagatgctgctcctctggaagtctagagagaagcaagaggtcagatcttagacaaaattgagagcagtggcaatggaagaagggcagccagttagtgacatactctctgaaccagctaggaccagaaagaaaagtcagcaggtttgcatggacaaagaaggaaactcacccagcctaggcctcaagtttccgaagggccaagctctccctagcagacaagtcaaggggacatacagcccagcccagacatgacctatgttcccacgaggagcctaggtacaaccttaactgtcccccatcctggcaaacccagtacatccttcctgccttcctgctcctctgactcagcacccactgccccaccccacnnnnnnnnnnnnnnnnnnnncacccactgccccaccccacccccactttttccctccactccccaccccatgcacctcatgctcttccatcacccagcctttcgcacatgtgttagttccttctgctcagccatcgttctgaagctgccccggctcaaaggctgtttgcttcctttgggaagtatccccagccctccttatccctaccagaaaaagtaaaccccgggattccccctttttccttgccctccctcatacccatgcctcccgcctcagtcgcaggggtgacatccatgagagcaggacccgtgtgtggtccaccccacctgcagcccagaggaggtttttcagaggctatggaaggactgaccttcacgagtctttgtggtaagtctcacatagaaccaggatgagttctggagtgtcccaagccaggggtagggagacgaggaaagccgaaagctccagcttccactctacaagtagatcccagcctgtgtgaacccagagttctgggcagtgctgccagcgcaggaccccagctccagtgcccggtgggtggctctagctagtttctgttgttttgtctcatctcccctggctctcctctctcacctccttccaagctcccatttttcacctgacacctgaagaggcataaacctcatctcctttttcacaacctgttactggtttattttttctagtagaaatgtaatatgtattcattgtagaaaaacctttaagatacaggcaatatgggggataaaataagggtcatgacctgccagacaggcagagccaccaacaatgaatagatatgtctaaaatattctcctctgagagtttgcttggttcccgtgaataaccccagaactggacctgcagatatggttcctcatccagattcttccattgctattggctcaaaagtaagaagtttatatggggactgggaattagtttctggagtcacatgtgtgctgagcacacctgtcatgtctcctgcattcctgtgctaacttatcctggggacatctccatcatatccatcctcaaggggacttgctcagttgaagggaagagggtgtggccaagctaacttatcaaagcttagcaggtaccacctcatgctatcaataccctgggctaaacttccatccttaggataggacctcctcaagataggaccagccttgtctcctctctgtgaccccactcccagaactgcagtgttcacagtctggtggtgttgtttgagatagaagcagctgagtcttgtaaggggatggtcacatggggacctctgaacctcagatagatggctactgtgcgggaagtccctagcactgcctgcacttttgttctctgcagcatctggaggacacacacacagccgttctagccccaggatgccctatgcctgcagccctgctgaggactggccaccgcccttggacgtcagctccgagggggatgtggatgtcacagtgctctgggagctgtacccagattctccaccagggtaaggtgaccccatggtggggagagcagggagtcccctggataaaaagatctcccacccagggcaagaacctcagctccccatgtgtaaatacaaaaggattccagttggcttggccacagcctctgtctccaaccaagcaagtccccttgaggatggacatgacttgggagatgctgccggggtggactacagacaccagctggcttctttgggctgatgggtgattggtagagaaaccatgtagttttagtatggtctcatgacagttttcatgagccccaataaattcctctagggatctccctagggaccaagagtagtgggatgtttgggatcatgagtatggaatcagcattcatttagggagggaaatctgttgagcttctgtttttaacaccaggaacccacgcccactccaagatcagtctttctcatggattgtaggtatagccacagagtgcccagacttggctagtccctatcatctgttgggtctccattgtgtgctgtgtggtcagcctgcctttccagtccttttcccagcctctgcatattcttgtcttaagtcctgtccttgccttctctcagtcttgctttagccttcccagtcccatccccgacttgctgcacactcttgccgtaggcccatctaggtcttgatctcagttagcccaggcaggatgggctttcagcagcccattctcatctgatacgaacctagatagctctgactcacagacagccccacctcctctcagactctctccccctgaatctttacatccattgacatagcccctggtagccctgtcctctagatgaaccacaaggacagaggggtacccttgagtttccaatgcctttctcattcaggctaaaatagctgggctccctggagagcagggagattggcatgttctcagggcacaccttcaggagctatagggttctggtccactctgaatcattccccccagcccccaactacccatgcctttcttagcatcaaaaaaaatctagtaaattgaatgacccatcctactttccacaatgaaatagactgtagggcccaggacggaggagttaaatccactgctcgaggaaattcaagggcagtggccagggcacaggaggaatagagaaggaggcttgctagacactaggcctctgcccttggtgtgggacatctagatccgtagatcccaaaagccattcattgggacaggaatcatcatggccagccttccctggggcactggaccctgtgaagtgacagtgccttcttgagttcccctggtcctgacaaatatgtcattttcctcccacaagaggctctaaaaggagacaaggtgctcttagccctacagctatggtttcagggctagagactcattcctaaatctagaaaacagcagtggagatgtctcagtgggtcctaccgagcccattcacagtgcccaggctgggactcctccctagacagggctgttcttgctccagggaatctaaaaccccacagagaggggcaggggtgtaaggacttgctttggttcacatgggatgtgagggtcaagtctgacccagctaagggtgtcagactgtcctccctgaggactagagggtctcatgggagccagcatatatgaagttggctgtattctacaatgagggcagctccttgccatacagaatacagactcttccatctgcccgaaggtctcagaatctacaacccctgagtgaaaactcttctctcacagctatgaggaatgcatgggaccaggggccactcagctgtatgtccccacggatgcaccaccgccctactccatgactgactcctgtcccaggctgaatggcgcccttgactcagacagcggccagagccgcagccaccgtcagcaagagcagaggacccagggtcagagcagactccacactgtctccatggacacactgccaccttatgaagctgtgtgtgggacaggctctccatctgacctgctgccattgccaggaccagaaccatggccaagtaactcccagggctcacccatcccaacccaggctccgatgcccagccctgaaaggattgtgtgagtggccaagctcataaattccgctggtctttccaggctaccctctctcctccaggcatacaggtgcacacacaacccatgcacatgcatatatatgactatcaatatatactgacatatccccaagtgcttacactgacacaacccacacatatgtagacacctgcatatgcacatgtcccactactacacaaactcacctgggaaggttttctttggatgaggtgttccctacatggtatctcttcctccccagcctggtgcctggtggccgtgcctctctgaacagtgctgggcagaggtgagataggaaacccaattttctatcctctccccagcctcctctaggctatggccacaatctgattctcctgcagagactgcttggtcagcttcctgccataactcctaccccagggcttatcctattgggagctgagacaggtcccaataaggtcccactgtgcactgtgcctatctctcaactccagggctgaagagccacaatgtcaccgtcctgccacttccgaggtgggagagaaacaggtctggtggcttaggcatgacctggaggtcctcacagcccatttagcctgtctcgatgtccttagtgtggcggtgctagtggggttagctcagacacccaccctaagtttcagggggagacaggcccttgggcctgtatcgtggaggaacaacacagttcttctaatgtctgtgccaggattgagagctcaagagaaacaaggtgtgggcagccccatacacacataatgcttcctagacatcactcagaggaggcacagaagagtccactgctcagtaagtgcccagccagctctggtgacctgggtgtaagaggtctcagaccaaccaaagagccagcgctgtcatccagggtggtaactcccagctggggactgggctgatgaagtctggccttgcctctctgggatatacacagagacaacacacacacatgtaccccacaaaaaaaaaaaaaaaaaaaaaaaagcaaaaaaaaaacaaaaaaaacttcatgtcactatgagaccagtgtctgctgccaacatcccatcacggaagcaggtgtgtggaggcagccagttggagataggctcagatattagcctttgagctccagcgatgtgatctccatcgaagactatataaggtgacgaggccatctttgaagacccggcttgccaaagctaagcacctttgaggaggatcctgtcagcactgccgctggcagggagtgagacctcctgcctcccggactcctaccttctgacggtcatcccagaagagcagacccatccccactgaaccccttcccacattcaactcctccaatgaagggctaagaaaattcatcaatccctttcctaagcagaggggtagcaaggatttttattttctatagagaaagcatttattctgatgcagagccgaaagggcccaaccaccagttctgtagcatctaggcggcagcggctgcaggctgcgggcagcaccctagagtcccaggcctgggggagggagccttgtttacaagcccttttgcccacctttgtggcgttctgctttctaggcaaagatgtctgtctgtggtactgtccagcctttaaaacacaccccggggatgagactctttttaagaaaggcagtctgtttctagagctctggaaagtggtgggggcagaaaaacatccccgcctattcaccacgtcggagggatctgcggaacagcttttctccttcctaggttaggctgaataagcagcaatgtatcttttctgtactcaaaataaatgctcattatcaacaaatacgtagaaggaagtgatactttcgaggggtgtataggggccccggcgggttcctggtggctgcaaattcagagggtgaagggaaccctgtaaacaggcagtcttaagtatgcccctctgaacgctgagacgcccagctggctgtttctcaagtttgcgccaggtggcgctcttgtagggagggggtgtctgcacagtctcatgggatttcctcttttgtttctctgcttgtgtttgggttttagaaacaaatgttgctatgtagcccagggggcgatcctcctgtctctgcttccttattagtttagaccggctggctggccacccaagtcccccagacctcctgtgccccgctgtgcttgtgcacctggactttatgtggtactgggaatctgaactcagatcctcctacttggacctgcttgcacgacaggcacttcacttactgagccatctcccagcccccttcatatggagcctgctgccactcctctgagacctgtctgatgtgaggatatgatgagccaccaatttcagaacttgactccacatacacaaggtaccatcttttggccttcagtactccataggcttatccttctgaggaaaatagaaatatgctccatgcttccctctgcagaaacactcatctttctcattgcccttcagacagaggctttgcctggtgacctctttttacgcacagagactgtctttctcggacatgttttccttccgctagcacagagaatcccaaaaatcacaccctaaaattggggtgtgaccctgaacaaagtgaggcagatgggggtgtcgggggtattatgagacagggacccacaggttccttctgaaaaatccctaggcctgctgtcctgcaactggcctaactcaagcacacactgccccctgctggctctctgctgccactgttcatttgtcacagactctaccctaggaggaggaggaaatcccttttatttttaagcccactgctgctgtgggacactcacagctatatgagcctgatgtttggatcccgggtttgtattataccgctgattttcaagaggagattttgtctctgggtctcattttctgataattcctgttggctgcattctcctctctatgcaaaacacttggccctctgttctgtttgctactatgttgcactgtggggctctacctcctttatggtgctggtgtccagccacatgctgactcccacccggaccacctacactgacgctcattctaacgatttaaactcctgggactctcagcctcttggttctgcctgtctcttctatccacgtactccttgggctgtaggcatcctgctcagggctctgcccattcctacaaagagcctgagccctctgtttgccagggacaaggcctaaggagaacagctgggtgcctggaatccctgggagatggcatgtgatggtccatcattcggatggtaagccaggaagaagcaggaccaactcctggtacatggccatactatcaaaagcgccggtcagggaaatggcatcggggaagtagaaggtggaggtggcgggagatgaaagcttgaaaggatgcaggccaccaaactctcccagtggcaacccaagagacagggtacaccatgccttgaaggcctcgatgtcaggcattcggaggtgacagctccgtgtcgctcatacctggctctcagcagcgctgttttgaggcagccttttacagagtgttgattcctgccatgcaggctctttagatcagaagaggccttcacacagggaagccacagcgggtggcagacaaagccataccgtagctgaatcattatggatgggcacagaaagtcccaggctttggctagcaaccagaggcctctgccactgctaagcaccaggcctcactgaagcacagacggaaagaacaagtcactagcgaggctaacagcagtccatggctaccatgcgcaccctccaccatcactgggttaagcctgtgttcatatatacaaaccgtgtgcatgcacacggcaccattacataactccctcctccttcctacacgtttactcagacaaccttggtgcccacacaagtaccctctccatgcaaggctctcgtttgcacagccaggtgcagctcacacctgctcccagctcccgtctgcatcctctgacactaacatggttgtccaaggactggatataaaggccaccgctttatcatcagagagcgatctattgtcctgggttctgttctgcctagcttcgcggtacttcccaagcccatgctaactctctggagcccaagagcccttatctagccaaagcctaatgggtctgagcttgggagctaggtatacctttgaccactgggctgtagcagagctgtgtctgctcagcacatttccaagaaattccaaggcggcagccctgttatagtctcagccaccaaactgtcaccctcatcaggctgagtccttggggcccggggaggggctgcagggctgttttctattaaaatggagagtttgaccctctgacaggctctgagccccaaccatcacccccttctttattcaattgcaagaggcaagaaagaatacttactgggtcatgtgactaaattgtccaagtgataagtcaggcttcatttgtggctagatccaggaagtccaagggcatggattgatatactgtccctctggactctgaccaccacactgtctccattctcccattggtaaaatgacgataaatgtcccatgtctgacttggttggttcctgacccagaatgaagagatgctctctcttccagaaagcaagtatcagatctcacaggactctgactggactggacaggactctgctggagcctctaagtggctgtggttggcggcagagcaagggagagaacatgtaacaacatacggttctattctgacagaaaacagccctttccctggtgttacacatgagcttgatgacagttaagtgctgagtctcaggcctgggaccctgtgcccaggccgcatccttaactggatctctctcctttatgagcccaagttcataggttatacaagggaccttagggctattgaaagtgaaggtcctccggcctgctgagacaaaagaagttcttgaatagccgttgtccaacctccgcactaatccccgttgcttccctgcagctaagtgcttgggcatcagtgagagcaggttctctctgagcgcatcactctcttgagggcccagagagtataaccaggcttcagccggccaaatgtagaggcaggcatcaggccaggaagctgccgtggagaagcaggacaggttcaaacatgtgaggccggagaggggacttcagcaaccatacgcagcgttttcactctccttcccaatcatggcttccctttgagaactagaagtgggtggctcttaggcccaatgggtgctggggactaaggtgtctagatctggggaaatggttcacttactaagaaatccaaagcaaacagaagaatcccatgagaagggggaaactgagtctgccagttttcgaggtctgggagagtggaaaaggaggccactcccgccttctcttcaaggaactaatctgcccacagccaagggattaaagaaagagataggaagacaaacacggtgattagtgtctttaagatgcccaagtgcgtgttagcactcaggagatggaggccagagaatcagagcaaaaccaggctcagctccatactgggtttgagccagcctgagtggcatgagcctctgcctccaaaaatcagggagagtggagactctggctcccacggacacacttcgtggtcaagtgtcttagtcagggtttccattgctgtgctgaagcaccatggccagaaagcaacgtagacagcagagggtttatttcgcttgctcttccacctcgctcttcacagctcaaggaagtcaggacacagggcaggatcctggaggcaggagctgatgcagaggccatggaggtgtgctgcttactggcttgtttcccctggcttgctcagcttgctttctcatagagcccaggattaccaggccaaggatggcaccacccacaatgggccctccttcattgatcactaattgagaaactgccttacagttggatctcatggaggcatttccttatctgaggctccttcctctctgatgactctagcttctgtcaagttgacacacaaaaccagcccgaatcgccaaggacctaaagtcctgcatctccccatctagaagccccccacccctgttctcaacgaccaagtttcacaatattggacaggtatgactttgagtatcagctagacttgggatggtggaccacaggactcccctcccatgcaaagatgcttgtatcgtaatctcagaacctgtgaacctgctgcctttcttactggtggtcagaactgtcagggttgcagcaagtatttctaggttcttggccttttacccaaagaattgaaaataagggctcagctttctgagacgtggtggtgcgggctgtggagcgctgtacagtctgctccgtccccactcaccgctgttccctcctgctgaagaacaagtcggtcaggaagccatgcctcagccatggtatttaaagattaaagagacccgtggagcctgagatggcaagtcaccatactggagtcacactaaccaccctcagtgtgaagtcgctggaggaggtttgtgtggatttgatcaaaggggcaaaagaaaaggctctgaatgtgagaaggctggtgcgcatgtgtaccaagacatggagaatcatcactaccagaaaaaccccttgtggtgaaggttccaaacgtgatcatttccaaaggaggatccacaagctactcagtgatctacactgtccttctgagattgtcgagcggactgcttccattaatatggagccaggagtggaggctgaagtcaccactgtagatgcctaagtcaactgtttcaataaattaacttaatggctaaaaaaaaaaaaaagaaaaaagaagacgagctcacaccaatttgtgtaaatgtaacttaccagatataattggcatcttcgaggcttactgctgaataagctcactctttctagttctttctgagctccggctggctggttcaactcagttgctcaaaacttctctccaagctgactgattcaaactggcttctctcagcttctgactgaattgctcggcttgacctcggaactttggcagtctgtttctaatcttctggttccttctcgttctccggctcgttctgtcttcacccgcaatctgtctcagtaatattgtcctggtagacctgtcccccgcctcccccttctccttccctctcctcatgagagttgggcatatcctattctgtcaaatctttctctcatttgtcactctaccactcaattagacatcactttcaaatatggctgcttccttctacaacctaaccttagctgcattgtttgggattgaaggtgtgtactaaaggcattttatgtgtgtattacaggcagaggggttgaaagtgtgcgccttgtcagcattccagcctgaccctacagatctaaaaggtctctgaatgtgctcccttgccatagcaagtacctctaatcagagcaaagtgatggaacagactggagagggacacactgtcaagacgagtgggtgaggatgcccaaggctccgattacggttcccaagagaatcatttgttactaagaggtggttctgttttgattgatagctttggacatctaaccatctttctgctgggcataccgattctcataatgcatctgacattcatcatacacacaccctgctaggcataggcatataagatggtaaaaatagaagattctgcctacaagtgtttttgcctatcctgcatgtacacccaaaaccagctgaggccacaccagcctttctattctttatacacagacacactaggaatatatttgaatagaaaccatctgattgttgttagaggaagagaaactcaccccattgtttcaaggtgtgtgtgcgcaacctgacagaggtagtgagcccatattgctaggtaacctggttacggaggggtgtgtgcacagtatgtacatataaaggagctaggttgcccgttattattagaagagggagatgtacctagcctaccagaagagccccaagttactgaactatccctagattgccggcctcacattacctggcaaaggagctatggaaaatacacagtgagcccatatctgatccccggaaccgtcgtccagcatctcacaacatgaaactacagctccagggcattcagggccctctcctggactccgtgcacactgtgcacaggtacatatgtgtgtatatatgtacatatatggggcgccacagatacatgggcatatacatgattcaaaataaaaagaatgttttcgtttaggaagcgagtccacgaggtcgggaagtacctctctctccctccaggaataccacacctcagtagcctactacttagcctgaggaatcgtggaggccagaagcaagggcaccttgcttggcagagtgtttaccacatttatttagccacaggtcgttttccaaacactgagaagggaccctccaaaatgcagtttgtgaaatctgacccagatgaaaggaataagtggtcttggttaggatcaagtgacaacactctagctcttcagggatgccagtccctgccacgctccaccagccactcggagacagctgaaggcagtgatgccctgtgtctaagaactaggccttgtggcccaccatgtgttacctgcccttttctggccatgagatgttagtgctggtacttgctccatgacccctgcccctaccaggtctgcctgatagcagtccttgggaaagatgcttctggctgttttgagtgtgatcttttgagctggaaggttctgcaaaccttagccattactggagatgatctcctgtctgcagtgttgaagtgcaaggacagcaggctcttttttgagccatgcgcactatactataaaatgtggtgtttgaaaaatgaacacatggggctagagatggctcaggagttaagcacgctgggtgttcttctagggaccctaggttcaagtcctagcatgcccatggcaagccacaactgcaactccagtcccaaaagatccaatgccctcttctggcctctatggtcaccaggcatacttttatatacaggcaaaacacacaaacacataacaataaaaaataaaataaagtcaactcaaaagtgaacacacaagccagacatagtgtcacatgcctgtaactcaaaagtttgaggcaaaaatacttctgagagttcaaggccaggccagtctataaaatataacctgactcaaagaagagagggagagtgaaaaggagagggagggaagagggagagaaagagagagggggagagaaggagggagggagagagagagaatatggatgaatgaatgaatgaatgaatgaatgaatgaatgaaaatgaatttacatcatggtttagctgtagaattttattggctactagagagaaagagaaacagcacatttctccccaaaacaagtgttctggtagagcaaagggcaagtactagactgttcgtttgcaaattctaaagatgcccccatgagtactgctggttcaaagttcctgcctttctcaggtttatccattgctggactgcaggtgctgatggacaatctccctggatgctactcttcatactaccaaaagggccaagaattggtccaaacagaaaggaccaagagctggactcttggccctctttctagctcccaggcagctaaacaggggagcagggctcccctgcagccccctccccagcctgtgctgtgcttctccagggtatacggtcatcattcccctgtatcatctgtgtccagtcttttccagatgcactccatccattctagaatgtcaagagcagcaaggcttaaattgtctttgttggcaaaccatgactttccagtctcacggtcctgaggaatggccggcctctcttggtcatgactgattcaagtaacagctgcaccttcagtgcacagttacggctcagcaaagctaaggtattttctgatccaatagagatgacttcttcatgctcgtggtccatgacatctgctcagatggaaaaacacttcaaaggagttaaggccactgtcactctccctggagcaaggggacactgctcctcacacaaggacaggagagagtgatggggtcttggaagctcagctggctgcccttggcctcgctcagcaaagggtaaagtgtccaggtcccataacccccttttttctgacacaaaacgacagggaactggtagagtctggggaggactcatcctcaaggactctggcaccaagcagaggccgatccaggagtccccagtggacaccgaggtccaggtgacaaaggaatggatagaggtcacagtaccctcataccaggacaccctgggctcatgccaaataagagaggtgtgccaacacctagtgatgtctggtctccttgaactggcccggtactgaaagatgatggaattcacaaactgtccactcttctcacagaggcgggggctggtgctcagagcagcagggcggtggggaacagcttaggaggaggcagcccaaaccaggtatctgaatggtcccagctccctccacaatgctctggcttgacgagtccccacacctctctgggcttcaaatccttgcctggggtggaagactgctccctcacccatgaggtgacctgatgcagaggatccagaacaaccccagggatacagtcagtgattttaacacagggcttcatcgttaggaagccaccaggaggggcaccaggagggatgtatgctgcaagcatctgacagacaaaagccatttgtactgcagtgaaaagaccattgagaaaatagatctgattagataacagaccctcctaagagtagattcttccaaatgctcctagcagctaacctggccctggctgggctgttcctggcgctgtcttgtagatcactcagtcctagggtccatgcttccagttctctggagttaatatccgggcccggttttgttcaaagagttctaacattttctccaagttgtggtcagcctcaatcacctggaaataaaacaaacaggtcacaggctgcactggccatctccatccccactggggaggcaagaggctgagaggccaagagggtcagaaccacacactctggctccagggcaactgacactctcaaccagatttccacatcccaccaacaatgccttttcttttcactgagacaggagttggggctctgctgggggctaaacccggggactccaatgtctagacaagttctctgccactctgccactttcccagccctctcaggtttgcttttcacagtgaaggaaacaataaactctgaaagttcccacagtgacatgtcccttatcacctgtctcttagcaccaggatgtctctgtggcctacagcccaagggcataaacaaaagcccatgatcaccggctggatgtgagacggcctcaagtacacctgcctgcctgaggaaattcaggaggagcacactggggcacaggacacacagtaggacatatggataggtaggacacaccagcactgctacattggcctgcagcttggaggcagcaggagcgtggcacttttacacctcagcagctcctgaggtgccactgtgtgacaactgaggacaaccactgagatgccttcagaagatgcccagtcacctaactatgacgatgggtgacgatgggctccgtgtcacccactgaagaatggacaccatcatccccaaaggtccaaatgcaaacccaggtccagagtaactgaggacttctttgtggtgatgatgagta

SEQ ID NO: 466 - DNA, 2250 bp, Mus musculus
cccagccggagcgccacggcatccgagcgggacccggagcccgagcgggaccggagctggagccgaagctggagccggcactgcggcgcacggagcggagcgccgcagccaagccgatagcacgatacaaccgtaccagctatttctaccctaccacgttctccgagagctctgagcacagccacctgctggtgtctccggtgctggtggcgagcgctgtcatagcatctggaggacacacacacagccgttctagccccaggatgccctatgcctgcagccctgctgaggactggccaccgcccttggacgtcagctccgagggggatgtggatgtcacagtgctctgggagctgtacccagattctccaccaggctatgaggaatgcatgggaccaggggccactcagctgtatgtccccacggatgcaccaccgccctactccatgactgactcctgtcccaggctgaatggcgcccttgactcagacagcggccagagccgcagccaccgtcagcaagagcagaggacccagggtcagagcagactccacactgtctccatggacacactgccaccttatgaagctgtgtgtgggacaggctctccatctgacctgctgccattgccaggaccagaaccatggccaacctggtgcctggtggccgtgcctctctgaacagtgctgggcagaggtgagataggaaacccaattttctatcctctccccagcctcctctaggctatggccacaatctgattctcctgcagagactgcttggtcagcttcctgccataactcctaccccagggcttatcctattgggagctgagacaggtcccaataaggtcccactgtgcactgtgcctatctctcaactccagggctgaagagccacaatgtcaccgtcctgccacttccgaggtgggagagaaacaggtctggtggcttaggcatgacctggaggtcctcacagcccatttagcctgtctcgatgtccttagtgtggcggtgctagtggggttagctcagacacccaccctaagtttcagggggagacaggcccttgggcctgtatcgtggaggaacaacacagttcttctaatgtctgtgccaggattgagagctcaagagaaacaaggtgtgggcagccccatacacacataatgcttcctagacatcactcagaggaggcacagaagagtccactgctcagtaagtgcccagccagctctggtgacctgggtgtaagaggtctcagaccaaccaaagagccagcgctgtcatccagggtggtaactcccagctggggactgggctgatgaagtctggccttgcctctctgggatatacacagagacaacacacacacatgtaccccacaaaaaaaaaaaaaaaaaaaaaaaagcaaaaaaaaaacaaaaaaaacttcatgtcactatgagaccagtgtctgctgccaacatcccatcacggaagcaggtgtgtggaggcagccagttggagataggctcagatattagcctttgagctccagcgatgtgatctccatcgaagactatataaggtgacgaggccatctttgaagacccggcttgccaaagctaagcacctttgaggaggatcctgtcagcactgccgctggcagggagtgagacctcctgcctcccggactcctaccttctgacggtcatcccagaagagcagacccatccccactgaaccccttcccacattcaactcctccaatgaagggctaagaaaattcatcaatccctttcctaagcagaggggtagcaaggatttttattttctatagagaaagcatttattctgatgcagagccgaaagggcccaaccaccagttctgtagcatctaggcggcagcggctgcaggctgcgggcagcaccctagagtcccaggcctgggggagggagccttgtttacaagcccttttgcccacctttgtggcgttctgctttctaggcaaagatgtctgtctgtggtactgtccagcctttaaaacacaccccggggatgagactctttttaagaaaggcagtctgtttctagagctctggaaagtggtgggggcagaaaaacatccccgcctattcaccacgtcggagggatctgcggaacagcttttctccttcctaggttaggctgaataagcagcaatgtatcttttctgtactcaaaataaatgctcattatcaacaaatacgtagaaggaagtgatacttt

SEQ ID NO: 467 - protein, 225 aa, Mus musculus
QPERHGIRAGPGARAGPELEPKLEPALRRTERSAAAKPIARYNRTSYFYPTTFSESSEHSHLLVSPVLVASAVIASGGHTHSRSSPRMPYACSPAEDWPPPLDVSSEGDVDVTVLWELYPDSPPGYEECMGPGATQLYVPTDAPPPYSMTDSCPRLNGALDSDSGQSRSHRQQEQRTQGQSRLHTVSMDTLPPYEAVCGTGSPSDLLPLPGPEPWPTWCLVAVPL

SEQ ID NO: 468 - DNA, 32088 bp, Homo sapiens
cacctgtcccaaaggacagtctcttgatgtgaccttgaagacccctcacggtatggtccctgcaagcccctccaaacttagcccccagcaggcttctctccagcctcctcctctcttgtgattcctcaaatgcatcaagtcctcagcagggccccaagattctcctataatggaatttgccagacggatttatcactgatgggcagcccattccagaccaggactctttaagtcctgacttgctcttctggctgaaagcacctactctgttccgacactctgccactccttgtaaatgtctgtggatcccacgattgggctgtgggggttgggtgggtgatggacggaaggatgggccaatgggtgactgggagcagctcccctgggatgcactcaggcacaccgtgcacaccaagcaaccagtcacagactgcccctggtccaattcaaatggctcctgagcttcctctctgcactggccctgcccagtatcctaggcagatggggtgacaagagagagagacacaggccccaccctcctggtgttctcagtccctgtggaaccagagcgctggagagtgccagttcaggaattgcaaagagcattccaggctcaccactttaaccagctctgtgctcagcttccctctctgtaagatggaggaaagacactctccacctctcagggctgctgtgaagattaaatgagagaagcatgcatgaaaagagtttagagcctgatggatgtacagtaagtgctgtcagtgagagctatcttatctttatcattgttcttcctcagtaaaatcacccaagggtccctacctgcaatctagaacatctctaggacatacccagagatagaacagatacagaacaggaggtcctcgcacatccctggatgatttgcttctccccaggcacctgcctgctgtggcccatctctttctgagacacacaggctcccatctctggaatcctggtatcttatggcaatgttcagctgttgatacaccttcatcctgaatagccccaggtcatggctggctctggctatatatcaagtggctcagaagaagcaaaacatcattttggggagaagagcattctcccttcacaagagttaagaaaccagaactcccagtgcatggtgcctggtagccacagaatagcatattggctaagagcacagggcttcagtttttcactgacccaggtctctatctgtggggctgtgtgaccttgggaaagttacttaacctctctgaggctgtttccttacctgttaactggggaatcccattatagaccatcatgaggattaaatgagataatgtggtgcatgacaagtaccacgtatggtgtaaggcatacaatacagtaggtgctcaggagatggtaattactcatgctggcattgggggggaggtggtatctcagagaagagcctatttttttgaggtttccactggatcatgagcacctttatagaaactgcttgggaagaaagtccaggaaggaggcaaagcttgtttcatcttctatccttgctgcagctggtacagggggacagggagaccgggggtgggaagggggattgtcatcatgttatttctctgcagtcatatttatctttttgataaaataggcccttgttttggaaattggaagaatttccctcataatttaaagcagcgcctacctctgccggttgtggtgactgggagattaatttcctagctgtccaagcaggcggatgcctgcaccagctggctccatcttgcaggcatgggtgatgccatctcccgcccatctggtaatgagcctggtgctgctagacaagggcaaggctctcatctgctgctgacgcaggtgaagggagaggcatcttcaaggtgaccccatggggctggtcccagaggcaggttctgcgtgctgtgcagggcaggcaggcgcagacacacacacacacacacacacacacacacacacacacacacacacacacacacaaacgcacgcacatccaactctaggtttgcaatctaagcacctgcaaccctgccatggccaggggtcatgggggatcatggggtgaccagtgtgtcccaacccacatctggggtcagaagacattccagagccccatcggggacaagactcttggagccagcccactattctacagagtgtgaacccctcacactaccctccctaaggagggctggtgtccctaacactcccaagtcctgccctgggctctgaaggtgagaggacgcatgacagagagcaatcagagtggccattggctcaggagtggtagcagggagaaccgggatcatgctagatgagtggtagccaaaagctccatttcataaccagctctagccagttgtagtcacagcatggagtgctgtgttgagaaggatgctgagtctgccttctgaactgaactggaaagagaaccatggtcaattagtaatgtctgccattggcatagacttagaaagtggtggcaggtatgctatagattcaccagacaaggactagatttctcctaagttgaggtcaaacaagccaaattaaactgactccatttgcctacaagaaaaagatggaggagagcctcaccttgccaccttttctctgtgagtcttgaagaaaaattacaagctttagtttacagtagccaagggaataaaaattagaggttggcacttcatccaaaactcaagctgtcacaatcagtcaaaaaatagagaagaaactgaattctagactaatgaagagacagacacagagccaactaagttttctgcagttcactcagtcacccaacaaatatttaatgagcacctattatgtgcccagcacctggctgggcgctgcagattcatgcaataaaagagtcaggacaaggccaggggcagtggctcacacctgtaatcccagcactttgggaggccgaggcgggtggatcacctgaggtcaggagttcgagaccagcctggccagcatggtgaagccctgtctctgctaaaaatacaaaattagctgggcatggtggtacatgcctataatcccagctacttgggaggctgaggcgggagaattgcttgaacccaggaggcagatgttgcggtgagctgagatcgcgccattgcactccagcctaggcaacaaaagcaaaactgtctcaaaaaaaaaaaagtcaggacagatgggatatctgccttcaaagatctaacaatcaaatgaggtggacagggaatccaaagacatcacaatttaataaacaagtaaacaaataaataagcaggatgtttagggattgtgatgactgctgttcaaagaaaacacatggcatgatatatagtggggtagaggtcagtcaggagcaacctgtctgaggagctgacttttaaggaaagctctaaaggatgagaaagaggcagctgtgcaccatgtactttgcgggactaccatgagtaatactcatgaatattcatgtacacatttttgtgtggacttatgtttccatttttcttgggtatatgcctaggagtgcaagtgctggatcatgtgataattatgtttaaccatttgagaactgccagtctgtgttcacaaagcagctgtaccattctacattcccaccagcagtttataagggtttccatttctccacatcctcaccaacacttggcattatctgtctttttgattatagccatcctactgggtgtgaaatggtatctcattgtggctttgatttgcatttctctgatggttaatgatgttgggcaacttttcatgtgcttactggccaattgtatcttctttggagaaatgtctgttcagatcttttgacaatttttttaattgggttgtctttttattattgagttgtaagagctctttacatattctaggtaaaagtcccttatgagataagtgatacacaaatatcttctccgattctaccgactgtctcttcactttcttgaaggtgtcctttgctgcactagtttttaattttgatgtttatctatttttcttttgcttcttgtgcttctggtgtcgtatctaagaatcatttgccaaatccaaaatcatgacaacttacccctatgtttttatctaagagttttatagttttaggtcatacatttaggtctttaatccattttcagttaatttttgtatattatgtagggaatccaacttcattcttttgaatgtaagcattcagttgtcctaacaccatttgttgaaaagactattctttcttccatttaattgtcttggcacccttgctgaaaatccactgaccataaatatgagggtctgtttctcaactctcaattctagtccatttatttatatgtctatctccatgctagtaccacactatcttgatcatagtagctctgtagtaagtttagaaatcaggaaatgcgtcccctccaactttgttcttcttttgaggttattttagctacgtttggtcctttgaattttcacatgaattttaagatcagcttaagatcatttcggtttctgcaaggaaggctgggactttgatcagcattgtgttgaatcttcagatgaatttggggagtattgtcatcttaacaatatttagtcttctgaaacatgaacatgggatgtctttctatttatttggatctttaatttcttttgaaaatgttttggagttttcagaatataagttttgtatttttttttttctttcttgagacagagtctcgctctgtcacccagaatggagtgcagtggcgcatctcggctcactgcaaactccgtcttccaggctcaaacgattcccctgccacagcctcctgagtagctggaattacaggtgcctggcaccacgcctggctaattttatttgtatttttagtagagacggattttaccatgttggctaggctggtttcaaactcctgacctcaggtgatccacccgcctcagcctcccaaagtgctaggattacaggtgtgcgccactgtgcccagcctaagttttgtacttctttagttaaatttacttctatttcattcttaatttcattttaggtttggtcattgctaccatataaatatattattgatttttatctatcagtcttgtatcttgcaaccttgctgaatttattagttctaatagttttttaatgaattccttaggattttttatatacaagattatgtcatctgcaaatgtagttttacttcttcctttacaatgtggatgccttttatttcattttcttgcctaaattgccctggctagaatctccgatataatgttgaatagaagtaccaaaagtggacattcttgtctagaccctgatcatagggagaaggttttagtatttcaccatgaagcaccatgttatctgtgagtctttcataaatgccctttatcaggttgaagaagttcccttctatttttagtttgttgagtgattttatcaagaaggagaattcaattttgtcatatttttctgtatctgttttgatcatgtggtttttgtcctaaagtctattgatatggtatattacattaattgattttttggatgttaaaccaatctttcattcccgggataaatcgtatctagtcctagtgtataatcctttttatgtattactggatccaatttgctagtattttgttggggatttttgcacctatattcctaggagatattgttctgtaattttcttttcttgtaatgtctttgtctagttttggtatcagggtaatgctggccttatagaatgagttgataagtgttccctcctcttctatgttttagaaaagtttatggaaattggtattatttcctttttagctttttctgttgtgataaaatatatgtaacataaaatttatcactttaaccatttttaagtatacagtttgctggtattaagtacattcacattgctatgcagccatcaacactatccatctccagaactcttctcatcatcccaaactgaaatcctatatgcattaaagttattatttcttctgtaaatttttggtagaattctccaatgaagctatctggtcctgggattttctttccggaaaaagaagctgagaactttctcgtgttaataattcaatctctttgcttgtgataggcctcgccagagtttctgtttctttttaagtctttttccttacttttgtgtatttcttggaatttgcacattttatccaagttatccaatttgttggcatacagttgttcatagtattccctgaaaattcttatttctgtaaggtctgtagtaacacctgtaactgggaccacaggtgtgtgccaccacacctggctaactttttgtatttttagtagagatggagtgtcaccatgttggccaggctggacttgaactcctggcctcaagtgatccacccacctcggcctcccaaagtgctgggattataggtgtgagccaccgcagccggccaaatttgttaatctttttaaagaaccaacttctgggccgggcgtggtggctcacacctatggtcccaattactcaggaggctgaggcaggagaatcacttgaacctgggaggcagaggttgcagctgcactccagcctgggagacaatgcgagactctgtctcaaaaaaaacaaacaaaaaaacaacaacaacaacaaaaaacacacttctggttttattggctttctctattgtttttctattctttatttcactaatttccactctaatctttattatttccttctctctgcccacttcagattttagtttgctcttctcttcccagtatcttaaggtagaaggttaggttgttgatttgagatcttttctcatttttaatgtagacatttacatacataaatttccctctaaacactgcattagctgcatcctgcaagttttttgttttgtttttgtttttgttttgagatggagttttgctcttgttgcccaggctggagtgcagtggcacgatctttgctcactgcaacctccgcctcccaggttcaagtgattctcctgcctcaggctcccaagtagctgggattacaagcacccaccaccacgcccgggtaaatttttttgtatttttagtagagacggaatttcaccatcttggtcaggcgggtctcaacctcctgacctcaagtgatccacccacctcaccctcccaaagtgctggcattacaggcatgagccactgcgcccagcctgcatctcacaagttttagtgtgatgtcattttaacttatcaccaaagtgaggcagacaaatccaatttgtcagtacagagtgatttatttggggaacttaaggatggaagtgtagtcttggagagcagcaaaacaggtagatctccacactgttgctccccagacccagggcttatatatcacagggaaagggtatacatgctctatgcaagacaattaaaggcagccctccagaacaggcaagaatgctacatgcatcataacctataatttgtgcaataacatcaaggctgacatgttcttacgctaaagacagtaaataaagtgagaatcaggaggttttcacaggaccagggctaatcagaagtcaacagggcagattagcatctgtattagttcattctcacattgctatgaagaaatacctgaggccggataatttataaagaaaagaggtttaattgactcacggttccagatggctggagaggcctcaagaaacagacaatcatggcggaaggcacctcttcacggggcagtaggagagagaatgagtacaagcaggggaaatgccagacacttacaaaaccatcagatctcatgagactcactcattatcacgagaacagcatgggagaaactgcccccaagattcaattacctccacctggtcctgcccttaacacgtggggattatagggattacaattaaaggtgagatttggatggggacacagagccaaactatatcagcatccaagatggagtcactcttgtctccacaccccacattctcacatcggagggtcaggaagcatgcatgtccaaccaaagccttagggcgctccctcactccagtgcgtgcctctccaggggagcgtcttacagtgaacttcagcaaaggcttggctctcaagagtgagatgacacactggcccagacactagagcctccatctcactccctcctgatgaaggctagtaggctgcaagagccaccagcatgggccacacctgccccaagggcatgtttctagccccagctaaggtcccgagtttgtgctttaccacctgttcctgtcctaggttgagtgtgattgaggcttttggggtcagtgctagaaaggtatgggaaggagaaacgatcacagctgagtgtcaagcctctgattggtagatggccaggccctcacctgggaaaaaagccctcctacagctactcaggcaggtggccacccacgctctccttgattaccacccaagacagaggcctcactctcctgaggcatcgcaaggcctccctgccatttccccatctggtctcaagactggagctactcactcaatacatgcattaggaaactttggagtgcctagccccattgttgagtttgaggacacagagagtgatcaaacacaagccctggaaaccagacatgatcatatgtaacaaatgcaaagctggggcttgaacatgggctctgggagaacgtgcaaggggacccctctcagaacagagcctacgaaagatctgaccttcctggtgcttgcccgtgaccctgtggttcattgaatgtctgaagctggctccctactgctgttcagagatccggctggcagcctcaggaagggtttgcactgagagcaggagaggcactgagggcaagagagcaagcactggactttgaagccagatctgggttctagcttagctctgccgtggagtaactgagcaaccatgggccagtcacttaccagcgctgagtctcagtccacccatctgtgaaaggagaaagttgcatcctaagttgcagggctgagttggagggaattcagtgacactccaagacactcactaatgcggagctgactgtccacgtgaggcagtgggtgcccatggctgcccctagctgactcagacccctccccaggaccccagctcccaaggccccagcatcttttccggtgagaggactaagtcacccgtccccaggagcttctttccgtaggactctcaaggatccagctgttagtcctggaggaggttcctgcactctccccttgctcccaccacaccacatcctccctggaagtcccctctacccttctgtgcctttgtccctcctggaatgcctctccctgccttccctgagctaactcatcctcaccctccaagatcaccttggccttacctcttctgggaaaccttctctcatctgatccaagcccctgacgcatctgggtcaatttcagcccacagccccaggcctgcctgaagccggcagaatcgttactcatactctgtccccctgtgcatcccccactgcttcctaagacattggtaaaatcatgttgacctttcaacttgtctagctctaagagtcttggattcaagcctcagctctaccactaatttgctgggtaaccttgggcaagtccactgccctctctgagcttcctgtttcctatctgtgaggtagttcagcttgtgggcagaggcttcagaggagaggagggacagtcagccctcactaccagaggctcctgcaggcagcggagtgaggtgctgctctccttctcccccaggagcagccaggatagagtccgtgggcctgagcccagaccctcctccatttatttagggagcaacagctcacagggcagcacgggcagagaaggaaggggtgtggcaggcctgggctccagctcagtgtcctctctctctgtccacagtagcacgatacaaccgcaccagctacttctaccccacattctcagagagctcggagcacagccatctgctcgtgtcccccgtgctggtggcgagtgccgtcataggtgtggtcatcatcctctcctgcatcaccatcattgtgggcagcatccgcagggacaggcaggcccggcttcagcggcaccgccaccgccaccaccgccaccaccaccaccatcatcaccaccgccggcgtcgacaccgagagtacgagcacggctacggtgagccgccgcccaccctggggccctgggacctcatctgactgggattgcaacacaggaggcatcaaggagttggcaactctgccctgggtggagcagggtggtcgggaaagcatcctagaagtcttgggtggtcaggaagagctcacaggcgcccaccataatgttctcggtgacatgagaggcccggatgactgctaagagagaaactcagagtgaggctgaaggtcagagggagagtgtgtcactcctcccctgccactgttggtccaggctgcaccaagggctggtccatctggtgtctcgatggatggatggatggatggatggatggatggatggatggatggatggttgggtggagagatgagtggatgaatgaagagaggaatggatgggtgagaagggagaaggactcgtaggaaaatggatgggtgaggagtgaggtgatggatagatggaggttgagtggaagagtcagtggatgggtggagagatggatgggtggagagtatgaatggataaatgggtagatgaaaggatggatgaatgagaaaatggagggatggatagatgggtggattgagtgttatgcctgagtggagagatggaagggagggttgagtggaggaatggaaagataaataggtgggcagtgggatgggttgatgggggtgaatatatgaataagtgaatgggtgaatttatggaatgaatgatgagtgaataaaactatccctggtgagagtcagcagagtgcaaatagaactgatctgagggtctcccagttgttgggatcacccttaaacagagttggtggctaattcttgggtgaccagtcccaaatctgtgcatgtggctagaatgcctgaactttttacagaacgcagccacctgactgtgtcactcctggaaggggccagctgtctaaggcagcaggaaaaaattcaattgcattccattctcagacgattttcaatggcaggaaaaagccagactcttccttcccaaatcaccatccacaggccttcaggggcctctgcctaggtccaaggccaccaccagatagggaaaagaaaagcaggaccttggaggtgcttaacagcagtaggcacccttcacactgcagggtgaagtgatgccaacctcctaggagccagagccatggccagacctgaggcgtttccctctccaaggcaggaaaagcttggggaaaagaaagataggaaaaatttttaaaatagattgaattggatccgatcagccctggcctttggggcccctcctccccctcccagacacaccctgattagccaggtttggggtatttcctgtcctttttcagagttaactggttaaggaggggactgatgggtagctggagctggtgaacaggagcctgggtagtaatggccagtgagtaaggagtgcttgctgggtgcctggcgctgtctgtgcacataatctcactgcaaaatcctcaccatggtcctagtgagatgataactcacttgagcccaggcagcctgacctggcacccacaggctgccccgctgcacagcactgcccaggaagggagctggaggtgtcggggagacgcccctgggagccgccccgtgggctcaaggcagtgtccggcagacacgtacatggccacagtgggtgtcactcagacctggatgttgctcccctgggaaagctgttaggagaatcagaagagcaggaggctggaccttgtgtaagacacagagggacatcccgggatgagtcggacaagtggccacagttgaggaaagacacagcaggctagtggactgttctcactgtccaacaatgaggatcaaagagaaagttcagcatgaataaaacagatgtggaaagctcagcccacccagtctctgcaagtctccccagaagccagggactccccaaggagacaagccagaagcactcccaggccaggacgggcctgtcccacccctgcatcaccaacctgaggctgcagagtccagggctcctgcccagagcatgcccatcccctgcaagagaaacccaggtccccaagccctggaggatgccgggtagacccaggatggtcagtctgccgcctgcccctcgcacagcctggcccttgcccagctcctcccactcttttccagtcccctgtccatgctccttccagcctctgccctttgcctgggctcttccctctgccctgactgccattccctggccttctcgaaccgaaaaaaagccttccaggccccgctcaaaggctgcctccttatgggagcttgtctggcctctcctcacacctaccaggcagagctggataggtgtccccctcctctgtacctcctcggcattgcacccatgcctccctcagtgtcttggtcatggggtgattgtgctgcatccatgagagcagggcccacaggtgactcgtccccagacaggctcaggcctggaggaagcgctccatgggcaaggtaggagccactgtattttatcctcaaggcaaaagatgtagttgccccctttaaagactaggaaactagtcaggtgcggtggctcatgcctgtaatcctagcactttgggaggctgaggcggacggatcatctgaagtcaggagttcaagaccagcctggccaacatggcaaaaccttgtctctactaaaaatacaaaaattagctgggcatggtggcacatgcctctcatcccagctactcaggaggctgaggtacaagaatcgcttgaacctgggaggcataggttacagtgagccaagatcatgccactgcactccagcctgggtggcagaacgagactctgtctcaaaaaataaaaagtaaataaagaataggaaactgggctgggtgccatggctcacacctgtaatttcaacactttgggaggccaaggtgggaggatcacttcagaccaggagtttgagaccagcctgggcaacacagcaagaccccatctctacaaaaaaaatgtaaaaattatccaggtgtgatggcacatgcctgtagtcccagctattcaggaggctgagtcgggagggtcccttgagcccaggtcaaggcttcagtgagctatgatctcaccactgcatgccagcctgggtgacagcagagagagaccctgtctctaaaaaaataaaaaaattaagactgggaaactgaggcacaaagaagcaacttgttcaatgacttatcttggagtgcacgctaggcgcccacagtagttcccaagctgagagggctgaggggttggccttggcgcagaggaaagagatgggcttaggggcaggccagcccctctgtagcctgtggtggcctcgggactggtgccaatgaatgaggcctcggctctgtccctggggtgggtgggatgactgaggtcacagctctgccaagcggggtcaggccttggcttccccactgcagcctgtggtggtggtgacccctgtggggttccggcctccctgccccacttctgcactcggctacagctttgacacctcctggggcctcggcagggaacccagaggtgctgttgccccatatcttcccccagccttctggaggatgcgcaggggctgccgggagccttgggagggtgccagggaagagggaaacgcactgtgagcagctgtgggagaacatgaaagcggcaccaccaggcgcggtgcctcacacctataatcccagcactttgggaggccaaggtgggaggatagcttgagctcaggggtttcaggctgcagtgagctacgatcacaccattgcactccagcctgagcaacagagcaagaccctgtctctaaataaataaataaataaataaataataaataataaataaagagggaggggcagtgtaccagtgaaccccaacctttggcactgggccccttccacctgtcagacacactcacagccccccagctctggtgactcaagccctcctggcctctctcccacccctctggctgcggattcctctcctctgtccctttataagtcaaggtccctcagatcccacaccttggtcctggtcctctctctacacccactccctgctccatctcatacaccatccatcatcctcccttacctagctccagcccgcaggtcagctccagaactgcatgcccagaagtcccctggacatcaccctgtgaagccccacaggcacctcaggctccaggtgtccacagaggcctgatttcctacttcctatgcgcatcctcaggaaagctgccaaaactctctttgcctcaggcgagtcatctataaaactggtgcaagaggatccacctcaaacagttattgtgaggactaaattagcacagcacctggctaatgggtaaatacatgctcaataaatgtgagctattttcatcatctctttctccaagaaaacctgctcccaggccactgcactaatgtcagctgtccctgcctgccagccaccagcctggcacctccaaggcattctccacaaggcaaccaaagtgacaggactgtgaccacttcccaatggctccccatcaccctcaggacagagttggccctctgcctgcccacagagcctttctgtagtctagccagacacagagaggagccacaaatctttgagaatgagatgggggtgggggaggaagaagaaagagggagggagagagggagggagagagggagggagagagggagggagggagggagggagagagggagggaggaagggagggagggagggagggagggagggagggaggggaaatagagaagagagaaagaaagaagaaagagaagagaagaaagaagagagagaaaaaaaggagagaaagaaaaaggaaaaagaaaggaaagagaaagaaagaaagaaagaagaaagaaaggagagagaaggaaagaaaagaaaattctgtcattctgttccatcttgagctttaagagagatctggtggctgactctgtctcctgtcacttctgcaggtttagagcaagtgacttcactctcggtctcttcatctggtggaaggggtaaccactgctctcctcccacagtggggtgtgaggtagatgagatcatagagattgagcacagcaggtgctcatgagtgccagttcctcttcctccctctcccagagcctgtcaaggggcagtgaacttggagtgatgttaaataatgaaccaaggtatcggggtaaacaggaggtttcagcttatgtgaagtgggaagcagggcttccggagtcctggactatttggatctgtgccgacagggaagtcaggagagaagggaaaagaagggatttgggaagttcaaatgggagtggcgggtgcgggtttctttccagctgtctctcaggagctctgcccagctggatgtctcaggtttggggtctgagcaccttagggcagcctcagttttcccaagatgctcccctctgggaagtccaagaaaaagcagcccaagaagaaagggtagatagcagtttgctccagctctaacagccctcagcgctgcccacccagtcactcctctcaggtccaggaagcagccctgactttccccagggatccctgtgtgacaggcacacctgctgccctgcaggtggaaccctccctgaacccaaaaacccttccctggcaatgctggctggtggggcgaaggggtacctggcacccaagcccagcagccctggttcaacttccagtctcaccttgttgctgtgtgctgttgtcttttcttagtttctttcctaagttcttccaaaaattctgtctctcagctggtgccctgaacaggagaaacaaatggcatttcagctccttttttacagcatatgttattgacttcatttctcctagtagaaaagtaatgtgtgttcattatagaaaaccttaaaaatatagacaatataagaaaagaaatataaagaaataaataggccaggcgcggtggctcacgcctgtaatcccagcactttgggaggccgaggcgggcagatcacgaggtcaggagattgaggccatcctggctaacacggtgaaacccggtctctactaaaaatacaaaaaatgagccgggcgtggtggcgggtgcctgtagtcccagctactcgggaggctgaggcaggagaatggcgtggaccccggaggcggagcttgcagtgagctgagatcgcgccactgcactccagcctgggcgacagtgagagactccgtctcaaaaaaaaaaaaaaagaaagaaaagaaaaaaagaaaaagaaataagggtcatgatcctctgtcatctggacagggccaccatcaacgtgtttggaatattttcttctgagagctttctcggtgtcggtatataaccctgggattggaattgtacctgcagatagagtttcatatccagattcttccactcactattatatgaagagtgggaaaaagagtttaggggagtgggaagagcagtctttggggttatacagagtgcataaattacaactccatgcttcaccacgtatgtgaccctgagtatcagcttccttgtctgtagaatggggatggcaactgcgccactcacagcagagaaaggttatagctccgcccctgatgccaagccccacccccagaggggaggaggcacctgggagccctggactgaggagacctcgtgtctcagccacctttgcagctcccactgttcccatccaggacgatacatgtcagaaactgggctgtagagagcttagcaaggaggagccaagacatccagctgccctctggcccaaccactcactgtgtgttgtcctccagcaagtcaccgggcctcccagaacctcagctgtggaatgagaggattgtgctccagcagcatttcctaaacagtgttactaggtctaagaaaggaagattctgaggtcgaatgctggacaggcacagttaaatgtgttttttagctgcaggacttttcagagcctttgatgtcctggtgcatggtaaaaaatgcagaggagaatgcagtgtggggagctgccagactcatcatagaagcccctttttttccccaagatacctaaagggcagtgagtgtgggagggctgatcccagagttctctgaagccctcattccttgctactctccaccgcattttccatgcccagcccaactccacagctcaaagctccctgttcacaccacactcttctttcttatctccctccttggaaagctattcagttccctcctcccggccttcccctcttcccctggttaaatcctagacaagactcagctgtagcagcccctcctccaggaagccctccctgacttccagactggtcaggcctgcctttactcccacagtcccagtaggacctctaccaaagctcatgacacactgcctagtgccaggttatccccaaagcaggctgccaccaccttgggagctggccaggacagggccagctctgcttcctctctgtatccccatgcccaacacgacaatggcacccacattctggagctgtcactgatggatgaaggcagctgtgcttggtgaggagaggagtggtcaggtggggaatcagagcctccatggccccaggtagacctacagacccataaggaccatccctggatcctggtctgaggcccaggccggtggtctgttccctgcagtgtcggacgagcacacatacagccgctcaagccgcaggatgcgctatgcctgcagctcctcagaggactggcccccacccttggacatcagctctgacggggacgtggatgccacggtgctcagggagctgtacccagattctccaccagggtaaggaggcctcatggggaagggggcatcagaggatggggccctggacacaaagaccccccaactccatcatgggaaagagtggcacctctgcatgtcgtataaatgcagaaaacatctgctcagtgggcatggccacctcctccccactcctgaccaagtaggtcccactgaggcagtgtgacttagcagatatcacctggaagtgctaggaaaggaagagacaagcccacctcctcaggctgttgagtaggcatgccgggaatgcccctgcagtttcaggggaggttccgtggcagctgttctgaattccctggggatctgctcctccgggtgtctccctcagggtgggagggaaggccagaggagtatctggctatttccgtggctgtgggatcaacttccccctagggaaaaaaaactgtattgtgtttctataaataacaccagggactggggggtaaagaggggacaagcccatatgctgacatctgatggccccaggtgcactcgctctggaaattgtttcttgtatgatcatgagcaagttacttaatcccgctgtgcctgcttctccattgtggaaatgtccatgtaataatacctgccccagccgggcgtgggggctcacgcctgtaatcccagcactttgggaggctgaggtgggggatcacgaggtcaggagatcgagaccatcctggctaacacggtgaaaccccatctctactaaaaatacaaaaaattcgccgggcgtggtggcgggcgcctgtagtcccagctacttgggaggctgaggcaggagaatcgcttgaacccgggaggcggaggttgtagtgagctgagatcgcaccactgcactccagccttagcgacagagtgagacttcgtctcaaaaaaataataataaaataataataataatatctgccccacaggatactcatgaaaatgacacagaagtgccagtaaaatgctcagcaaggcactggctcttcccaccagtggtgtcgttactatttcgaggccacaggtgataactatcatgctgaggaggacgaggggaggggatcagggaggatgggctgacacaggaaatcggcctttgtcaagggtgtgtggtgcttgggttgggaggaactgggaccttcagagatacagaggagggtgtgaccagcagagggcacagatgagcaaaggcccagaggcaggcgagcacgcgtgtgccacgctacagagggcacagtggggtttgacctcctctccccttcccctgccctggctttccagtcatacccacctgggtttgagcccatcctggacgccgcccaggttgatgctctcaggcatgtcactgtggctctcaggggctccatttctttgtttatgaaataaggacaaataaccctgcttcctgggttttcctgggaaggaagatactgtgggtatctggggatgtggctcagggttagacctgagcccttggttcctgaggccatagcctgaggacacaggcacctcccccatccccagctgcctctgcccggtgcagctcatctaaaggacaggaacaggtggggctgcttctgatggaggtggaggtgcacagatgccctgggggtgcctgggagccaacttctccctgagtcagagcagagggttgggttggcctcaggcacgaggggatgccccagctgcaggcctccattgtggtcaggcacccccaaggctggttgggtccagtgcctggacagggctgggtaggcatgaggcaggggtggagaggggtggggaaggtgggggcacgactacgaagacagaggtgattccccctccaaacacacacacacacatacatgcacacacgaacacatacacgcacacaccttccgagacctcccaggcaacaagggtctggctgagcctggggtctctgtggcctcacctgtagccactgaggcagagactggccttagggatcaagacgggttcctctcagagaagtggggggtcatggagccagaaggagggagttatgccctcagctcctgaggaccccagagacagtggcagtgggaagagaaaggacaggtggagcttgtggccaggagggccctgtgcctgtgatcatgcccacaggagtggctgtgtccaaactgccctcagggccctcaagcagccccctccccatggggagctcttctctggagggcttttgttcctctcctgccagcccccctcaggcagatcacccatcagtactcgaagagggaaaggggtcagggcctccaccattccctgctaggagacccctccagccctggatgaatggcccgtgtcctcctccttggccttccaccttcacccctgccccaggggctcgagcaggggtggtgctgccagtcctttcggggcaatgggtgctcttttgctctgcatctgtgggttcagaggggcccaggggactctttcctaaactgagaaggggaactttggagtggctggagaccagggtgtctggtagcctgaggttggtcctacccagcctctgcacacccagtgcgctgcggggagatgctccctagacagtggccactgctgtttcgaggcaccgcagacccaggcagctcagtgttcatgcgttgagctcacaccgcatatgagggctgagtcaggtcccaaatccaggtcccagggttctgaggtccccctctggagatggagggaagtagcagggtttcattggagccagcgtggacaaggcccaccctggtccacagccaggacagcttgtcactgcagatagacccccaggcctttgggagagacccagccctaaggcctaggtggggcactgagggagcctcttctctcgtagctacgaggagtgtgtggggccaggggccactcagctgtatgtccccacggacgcaccaccaccctactcgctgactgattcctgccccacgctggatggcacctccgactcaggcagcggccacagccctggccgacaccagcaggagcagaggaccccggcccaaggtggccttcacacggtctccatggacacccttcccccctacgaggctgtgtgcggggctggccccccatcaggcctgctgccactgccgggcccagacccagggccaaggggctcccagggctcacccaccccaacccgggccccagcctctggcccagagaggattgtgtgagggacccagccagccgggtcctgctggtccctacaggctgaaccacattctttaggcacacaaaggcgtgcacacacacacagagatgcacacgtgactcataacacacacatagaccaaacttgtatacacacagacatctacactgacataccccatgtacacacacagatctagacgtgctccacatatgtgtgaatatgcgcacatacaggcctaccacaaacacaaaacccacctgcaaaggtttcacggaacgtggagctctcctggcctcccgtccctcctcccggcctgtttgttgtgcctctgtagagagcgcttcggagagagaggcgaagtaggaagtgggattttctcttccctctcctgggcccgtttgcccctaccctcgcccagcaagctgcgcccaaattctattctgcctctggaaactgctggaccatccaaggtcagctgcctgccctgacccctaccccagggccagcttgtcctcctgggaggcgggacaggccccagtgaggttccgttgtgcgctgtgcctatctctcgattccagggcagatgagccacaacatcaccaccctgccacttacaaggtgggggacctgggtctggggtctcaggcgcaaactggaggccctcacagcccactaggccccctcccaaccccagtaccctcagtccctcagtcaggtggtgctagtagagctatctctgacgctgcaggccccaggtagatgggcagggccctccgtgggtgtgcagcggcggttccctcatcagtccagccactgcccaggactaagggtcttcaaggaagatgaggccattgcccttctccaggtggcttcaccacagtgctgcctgggcacctctctgaggcagagaagtggcccctccctcagtccctgcctggccgaccactgtggcctgcacgcgaatgggtcagagccagaccccggagctggtgctgtccttctaggtggctgctcatagctggggatggtgagtggctgtgttctggccttgcccacgtgggtgtttgcagagacaaaatgaaggggatatgctccccataaataccaccttgccaccacaagaggaccagaaggctactcagccttgctgccacagaaggggatttgtagggtcagcctggctgcagaaaggctggctcagatcttgaccaagaaaccccagcgatttccatcaaagaccacgcaggtaacagaggtgattcctgaagacccagcccacagagggtggcagccaagcatctctgagcagtgtccctgctagcatcgccagcggccatcactctgcctccctcccacctcttgtccctcgtcgttaaaaaacagcaccctatcctgcttccccacatttctgttcctccaatgaagggctaagactatttagtaatctctttcttaagcagaggagtggcaaggatggcaatcttgaattttattttctgtagagatagcatttcttctggtgcggagctgaaaggaatccacccagaagttctgtagcatcctgcgtgcagcctcctggagccccagactccatctgggggagggacttgtttacaagcagttctgaccaccttagtggtgtactgttttctaggcaaaaaatatctgtctgttgtactgtatagcctttaaaatgcagtccaggaatgagactcttttaagaaacacatcctgcttctgcaattccagagagtgctgggggaaaaaaagggataaaaattcctacctactcatcagtgtttgaaagatggagctgaatagcttttcttgttcctggactaggcaatgaataagcaacaatgtatcttttctgtgttcaaaataaatacataatatcaataaaatgtagcaagaagtaacactttcagagagtgcataaggttcctttttttcttttctttttttcttcagacagggtctcactcagtcgcctacgctggagtgcaatggtatgaacatagctcactgtagccttgaactcctgggctcaagtgatcctcccacctcagcctcctaagcagctgggactacaggcatgcaccaccatacccagctaatttttgattttgaatttttgtaaacacagggtctcactatgttgcccaggctagttgaaactcctggtctcaagcgatcctctcacctcagcctcccgagtagggtttataccttctgaaacttgtaagaaaaggaaacactaaatagcaacaaaatgaaaatacacctccggctagcaatctctacccattcattacctctcaagattaagcaccattgaagccttgtcattttcctgttgatgtggatatttggatagtcagtgccttacaggagttgcttttttttttttaacctcactgaaacttggcatcatttctctgagacatggctggtgtaacgtcatgaggatgggccatcaacttcaggacctgactctaggaacttcagagactacacgttttactctaacaggagttggcttgtagcaccctgatggcttgtaccaccaggaaagagaggaaagtggcaatgaaactgaaatgagctgttgtctcaccctctgcaggaattcccctcttcctttccatgccctccacaacaccatggcttgggctattgatctcttagcggacagagcctgggccccttcctctgtcacatttccctcccaccagaactccaatagagcccactaacatagtcctagatgcccccaagtgccttgaaagtggggtgcaatccaaaattcgaatagtccattaatatagtcttagaccccaagtgccttgaaagtggggtgcaatcctgaaggagggtgcagcggggggaaagaccacgagataggctcatccttctggttctccagcccacgtccctgctggacaggccaaggctggctctgctgcgcctatcacccccaccctgagcccacactgccacctgccggctcgctgctgccactgctcaaagtgaacaagtcaggccctgaagaatgaggaagcccctcctctcaccttgaaacacaatacccaccagcactcataattgcagacaaaacccgtcattttaaccctgggcttttcttccacccttgagatgttctatgaggttgaacccattcaagtattccatttttggggctcacccccgccccgccagcatcactctctggacaaagcctgacacttatgtccccctctctgtaagcaaaataatcattttgcatgccctctgttctgaacatcactaggcatggctctggtgccacctcagtgctctggggctccacctcctgggaatgaatgcagaaacttccacagtgatggtgtccagccatgtgctgcccccaaccgaaaccaccccacaccgacacccagctcccaccacaaagacttaggatcccacaggcctttgggactgtcacgctcttggcttttcctgctcctccatccacgacatgccctatgctgtggtgtgtcacatatggcaccacattcaaggtcctttgcacattcctaaggagatgccgcctgtctgtgccaggggccaaggagaacaccccaggtacctgggctcatcagaggcccaaggagatggaaggtgaagctgcatcacaggacgatggagacaggggccccagggccagaccctgggatgaggatgtgggtgagagtttggttagggaagtgttcccaggagtaccagatggagtgaggcaggaaacaagaaaggcaaggaagccagtgagggggtcaccaagcaggtcaccactgcaggccactgagcgcagtcccactggtgactctgagacacagagtagaacgcacctcaaagtgacgcccgccctcaggtgggagagacgggttgtttgtaccctgatgctcagcagacatttttggaggctgccctttggagaatgttcattcctgccccttgtggaggccaaatgggctcctctggccagaaaaaagtcttcaggggagtcaccgtgctggcgatgacgccatcgtgatagtccacaagagccatcattgggtccccgtgtatgggtgtggtgaggtcccaggtctctgcaaagggctccagcagctgctgccacacacaagcaacaggcatcgcccagaagagggcggaaggagggttgatacagagtaaggctgttcacagccaccacgaggaacatccattgtcacactggccaagcccacatgcacatacacacactggggcccctcccaagttcctagagatacccctggcacacactcacatgtagcatccctcagctccacctcctgtggtttcgtggacatttgctcagacagctttggtgcacacacactagtgcccttctcacttagagcttgtgcacgtacacacttggtgttgcatactccagtgccactgacactcccactcagctgttcctatccatgcccacctgcatgtccaggctcttggcatgagcggtggagagacagtaagcttcatcgtctgaggaagtgaatcttctgtcctggtctctgctttgcttcaccccacattgcacgtcctcggggccagaggaactctctggagcccaggactggttgcctagatcaggccgggtatctctgggcttgggggctgggcagatctttacccccagggtggcagcccagttgtgccagcccaacatgtctccaagaaatccaaggttgcaggtcctcaggccctgccgtccccacctcagccatgccaccactgaccatctcaccagcatgactcctgggggcctggggctgcctgtctctcttccactgccagtggctgcctggtccacagcccaccccaaggctggcaccatctgaactgtgtggtggagtagaagagcatcccttgaaaaggaccctccactccctgccactctgagcctcattatccaactgcaagagtcagaaacccaacttgaatcttcatgagcaaggaagaatacttactgaattgtccaagtcaggcatggctggatccagaaagtccgggaatatgggcaggtatgtcatctctctctggattctgctgtccaccacagtgccttcattctcccatcagaacaaaagtatggaagccccaagtctactttggttggttcataatccaaaacaaagagatcctctctctcccagagagcaaataccaagtctcagagaaaactggcccagacatgtcctcatccctgactctctgaatggctgggattagggtctctgttgtttgtttgtttgtttgttgtttgtttttgagtcaaagtctcaccctgtcgcccacactggagtgcagtggtacgatctcggctcactgcaacctccgtctcccaggttcaagcgattagcctgcctcagcctcctgagtagctgggattacgggcattctgagtagctgggattacgggcacatgtcactgcgcccagctaaatttttgtatttttagtagagacggggtctcaccatgttggccaggctggtcttgaactcctgacctcaggtgatctgcctgccttggccacccaaagtcctgggattacaggtgtgagccaccgcacccagccaggattacggtctctggctgactgagcctgggtcatgccaaagcagcccttgcacatctcccatgcctccatctcccctccctgcctgccactctgtggagggtggaagaggaggagccacattcatctctcctggaatgggttctgcaaagaaaagaggggaggaggctgggaggactggagacacacagacgagcagcctctgccatgttcccttgacagggacaggccctacccctcagatctcagtctgagcgatgaccccaagccacagatagacaatgagctgggcagtgagtcagggcaggtgctggggcagggtcaggcggagagtggttgctaagcagggcccatagcaaagaaaggaggaaagagcaacagcctccagccaggcctgagggctccaggctcactggacaccatcttgaatctgtgccagctctttctcatggttgccatagcagggagggggcttggaccagagaggcccagatccactgcccactgggaggggccccagccagctgcagggagccagctgagctccacactgagggcagtctgtgacttgtggacttacaagactcttccaaggaatacactcacccacagtgcatggttacacagttttgttcctgaagaggaacataaatttgggcaaaaggccaaggtatgaatctatgcaactgggcctgagactccactccaggcactgacttctccctaggacaatcgcaccatgggctcctgcctcttctcctccttacagcccttcccttcctgggctgtcctcaagggcctgagttatgcctcccagactaggggcctggaattgtggcccaagctgactcctgtccaggtggtgggcccagcacagagcccaggagggtttatggggtaatcagcaggaactcccagctcaattatgagagaaacagtgcttcctgccagtcacacagacttgatgacagtaagtgctgagttccagacctgggaccctctgcccagccagcatccccatccagctcctcctcctcaccctctgcagagtaggcacatgactcaggctcagcccgccagagaccctgtggcctctgagcaactaagctctgcaaggaacctgggagctgctgtgagtgaaggctgagtatggggacccagaggtctggcttctctgcttctgtcatcagctcactatgtgaacttgaaccaggcctcaggacccccatgccccatcagcccacctaggccaaagcagcccctgcagatctcccatgcctccacctcccctccctgcctgcactgttcccaaagtcagtcacactgacgggcagagagagcaggttctcacgaaatcagtcactcccccaaggacccagaaaatgtgaacaatgcaattaacaccaaatccaactgttgaaggaggctgcagcgagccaatggggagaagcaaggctgactccagcatgagagggcagggaaggggtgattttaggcaccatgcccagcgttctcaccctcactgtctcagccaccctgggaaagatgagagtggctggcagttcacaggcatgacaggttccccatgaggggaatggaggactaagatgtccagaatgaatgtagttagtaagcaaccaaaagcaatagaagaatcacagtggtggggcaggggggtgggggccttggaatgtaccaatatgtggaattttagctattaacaagaaaaaaacaaaggccattctaggcctctccctagggaacaaaactgcctggggtcgaagaatgagagaaaaagagagaaccttggcctggtgactatactcttcaacacaactcagggaggccaggtgtggtggctcacacctataaccccagcactttgggaggcagaggtgggaggctagcttgagctcaggagttggaaaccagcctgggcaacatagtgagaccttatcactaccaaaaaaaaaaaaaaaaaaaaaactgttttaattagccagatgctatggggtgtgcctgtagtcccagctacaggggagggtgggacaggaggattgtttgagcccaggaggtcaaggctgcagtgagctgactgtgccactgtactccagcctgggcaacagggtgagatcatatctcaaaaaacaaaaaacaaaaacaaacaaacagaaaactacactgctggcttttaagatggaggaaggggccctgagccaaggaatgtaggtggcctctaggaactggaaaaagcaaggaaatgaattctccccaaaggaacaagcccagtgagactgattttggacctcggtctgacctttaaaagtataaaataggccaggcaaggtggctcacacctgtaagcccagcactttgagaggccgaggcaggtggattgcctgaggtcaggagttcgagaccagcctgggcaacatggtgaaaccctgtctctactaaaaatacaaaaattagctgggcgtggtggcgggcacctgtaattccagctacttgggagtctgagacaggagaatcacttgaacccaggaggtggaggtagcagtgagccgagactgcactgttgtacttcagcctgggcaagaagagcgaaactccatctcaaaaaaaaacaaaaaaaaaagtataagttaataaatacttcttcttttaaaccactaaacccgtagaaattcactgcagcatcaataggaaacgaatacacttgggttccaatcccagctcttgctctccctgcctcaatctcttggttcataagatgagaggaaggcagatttggacaagtgatgggcaaaggcctctccaaccctctttgaccccaggctgtgatcatgccaactcttagcattctctcacatgaatctgccctgggccttacctgtgtcttcatttcagagggaggtagacagggaagccaaggggtggccacgtttgaccctggacctaacatttctgatgttcaggatcagatgagcccatgtgtgtgaatgagtagcacccacagtgttgtgggtagtgactatctggagccagtagtgtgggtggtaaaggaatctaccaagacagttgtggatacagaaaggcagatttattagagaaggtaggaaagagagaaaatatgttgcaaggttgcaacgggcagcacagcagagacagggctgtctgcacagaggcagaggctggagggaagttttataggatcatgctggagggggctacatacagaaaggggttgtgctgctgaactatcacggtgctactccagggggatctattttcgagtagaactccaactgggatgcagtttctcaatcaaagggatatgaactgccctggccactgaattcagagaacattgtagggggcaggggagttgggagcagggagcagagatcccagctgtgacgagcccaggtctgaggcagctccaagaccaagcacccaggtggctgtccttcctggcgactggagaggcaggagcccagcagagtctcatagaaagcaaatgacaatcaagacccaggtcctcagccagatgcggtggctcatgcctgtaatctcagcactttgggaggccaaagtgggcagatcacctcaggtcaggagtttgagatcagcctggccaacatggtgaaatcccatctctactaaaaaaaaaaaaaaaaaaaaaaaaaaaaattagccaggcatagtggcacatgcatgtagtcccaactacttgggaggctgaggcaggagaatcgcttgaacccagaaggtggaaattgcagtgggccaagatcacgtcactgcactccagcctgggcaacaaaacaagactctgtttcaataaaataaaataaaataaaataaaataaaataaaataaaataaaataaaataaaataaaataaaataataaaataaaaagaaacctctaaattgattgagatctgcctccgacacttttcaatttacaaaaacatacctaagaattggccacccaggggcaggaagctggggtttctatccagtaactctcaccccgctggcccttggttggttgagggtcgccaccttcctggcgcttccagcctgtcccgcacactagcagagtatgcctctgcagccagcagcactcaaggcatgaggcattactggggatatctggatgggatggtagtgtggaaagatgcagatgctgatgtgcctggtcttcattttttgtggggcagggggacaaagaaaggacaaatcctgacctaggccctgctccactgggaggggcccggtcaccctccaatctcagcctttcagagtgacaagcagtggcagggcctggctgcacatagctttatctcttgctagcacaacttcctcctttgcttccagattgggctttggagcaggagaggcaggacccatccattcctccaagtgcccagcctgagcctggcctgggacaggactctatcctccatatccagcccccccgaagccaccatgagcaggtcccaatccccaggcccaggcgaagctgctctgggtgagaccctcctgggcaacatcatcagctactaccaggagagagcaggggagggccggctcgatgtctgcaggcaagcagccctcacccacagggccaggtggctcctgggcaggagggcccctccatggctctgtctgccagaggaagtggcccttgctctgggtggctgctgttgtggggatcccagccctgtcccaaaagtcagccctgagctggtgcatgcactagagttcctggagctgatctctgtcaacctgcttctgtttccctggaggaaggaaatcaggtccctaaaggtaggcactgccacatgtctgagcaagggggattcagccaggggttggggctctgcctctgggagaaacagcatgcccatcatatccattgacttcagtcccatttcagtttaagaaattgagggctaaagagacagatgcaacttatccatggtcaacagctagcaagtggtacaactgctcctaaccacgagaccagcggtccccaacctttttggcaccaggggccagtttcacagaagacaatttttccacagacagggtggagggatgggggcgggggttagtttcag

SEQ ID NO: 469 - DNA, 264 bp, Homo sapiens
tagcacgatacaaccgcaccagctacttctaccccacattctcagagagctcggagcacagccatctgctcgtgtcccccgtgctggtggcgagtgccgtcataggtgtggtcatcatcctctcctgcatcaccatcattgtgggcagcatccgcagggacaggcaggcccggcttcagcggcaccgccaccgccaccaccgccaccaccaccaccatcatcaccaccgccggcgtcgacaccgagagtacgagcacggctacg

SEQ ID NO: 470 - protein, 88 aa, Homo sapiens
  VARIANT (1)...(88): Xaa = Any Amino Acid
STIQPHQLLLPHILRELGAQPSARVPRAGGECRHRCGHHPLLHHHHCGQHPQGQAGPASAAPPPPPPPPPPPSSPPPASTPRVRARLX

SEQ ID NO: 471 - DNA, 1515 bp, Homo sapiens
tagcacgatacaaccgcaccagctacttctaccccacattctcagagagctcggagcacagccatctgctcgtgtcccccgtgctggtggcgagtgccgtcataggtgtggtcatcatcctctcctgcatcaccatcattgtgggcagcatccgcagggacaggcaggcccggcttcagcggcaccgccaccgccaccaccgccaccaccaccaccatcatcaccaccgccggcgtcgacaccgagagtacgagcacggctacgtgtcggacgagcacacatacagccgctcaagccgcaggatgcgctatgcctgcagctcctcagaggactggcccccacccttggacatcagctctgacggggacgtggatgccacggtgctcagggagctgtacccagattctccaccaggctacgaggagtgtgtggggccaggggccactcagctgtatgtccccacggacgcaccaccaccctactcgctgactgattcctgccccacgctggatggcacctccgactcaggcagcggccacagccctggccgacaccagcaggagcagaggaccccggcccaaggtggccttcacacggtctccatggacacccttcccccctacgaggctgtgtgcggggctggccccccatcaggcctgctgccactgccgggcccagacccagggccaaggggctcccagggctcacccaccccaacccgggccccagcctctggcccagagaggattgtgtgagggacccagccagccgggtcctgctggtccctacaggctgaaccacattctttaggcacacaaaggcgtgcacacacacacagagatgcacacgtgactcataacacacacatagaccaaacttgtatacacacagacatctacactgacataccccatgtacacacacagatctagacgtgctccacatatgtgtgaatatgcgcacatacaggcctaccacaaacacaaaacccacctgcaaaggtttcacggaacgtggagctctcctggcctcccgtccctcctcccggcctgtttgttgtgcctctgtagagagcgcttcggagagagaggcgaagtaggaagtgggattttctcttccctctcctgggcccgtttgcccctaccctcgcccagcaagctgcgcccaaattctattctgcctctggaaactgctggaccatccaaggtcagctgcctgccctgacccctaccccagggccagcttgtcctcctgggaggcgggacaggccccagtgaggttccgttgtgcgctgtgcctatctctcgattccagggcagatgagccacaacatcaccaccctgccacttacaaggtgggggacctgggtctggggtctcaggcgcaaactggaggccctcacagcccactaggccccctcccaaccccagtaccctcagtccctcagtcaggtggtgctagtagagctatctctgacgctgcaggccccaggtagatgggcagggccctccgtgg

SEQ ID NO: 472 - protein, 150 aa, Homo sapiens
MRYACSSSEDWPPPLDISSDGDVDATVLRELYPDSPPGYEECVGPGATQLYVPTDAPPPYSLTDSCPTLDGTSDSGSGHSPGRHQQEQRTPAQGGLHTVSMDTLPPYEAVCGAGPPSGLLPLPGPDPGPRGSQGSPTPTRAPASGPERIV

SEQ ID NO: 473 - DNA, 51955 bp, Mus musculus
  misc_feature (1)...(51955): n = A, C, G or T/U
cttgctgtctcgggaggaagaggatggaggaaaggaacagggtcaagtcagtctgagaagctggcattaccacagacagggaagcctgaggagtcctgagggacggaccaagtgctgtgatacggagacagggaagggaccgtggctgggacacagatgactcggaagccccacagcgttgagaaagcattcttgaatcagagccgaggggcagaagctgagcggggtggaggtggagtggagagaagatgctgatggtgttggtgagagcgtgaaggacacacaacacagggcctcatgtgtaagcagggcagggagaggatggggtacccacagtgtggaaggagggggtacccacagtgtgttagaggatggggtacccacagtgtgttagaggatggggcacccacagtgtgttagaggatagtgcacccacagtgtgttagaggatagtgtacctacagtgtgttagaggatagtgcacccacagtgtgttagaggatggggcacccacagtgtgttaaaggatagtgcacccacagtgtgttagaggatagtgtacccacagtgtgttagaggatggggtacccacagtgtgttagaggatggggtacccacagtgtgctagaggatggggtacccgcagtgtgttagaggatggggtacccacagtgtgttagaggatagtgtacccacaatgtgttagaggatgggttacccacagtgtgttagaggatagtgtacccacagtgtgttagaggatggggcacccacaatgtgttagaggattgtgtacccacagtgtgttagagggtggggcacccacagtgtgagaggatggggcacccgcagtgggtttgggaagtgctcagagcactgtgctgttccagatgggcacagcccagcctgctgagtggagggcttgtctgtcacacaggagccaccccctcctgagtagccatctgcctctgccctgtgccacacagcgacggctccattagtgaaacccgctcacatggctcagttcttatcacccatctggagaagggatcactccagcctcagcgcccatctccgaggcttgtttcctcctctttgccccaggcgatgagctgtggcctcagcaggcccgggccccatcctatcgcaggacccccaggccatggccatccccggggagcacaaccagcccccttgatatcctgggccttcccccatgcggcccctcccccagaagcgcaggccatggcttcccggagtgaaacaatcttgtgtaatctatcagtggctatcgggcccatcgaggggagggacgggagtggctgggcctagagatggcgccaacctttagcgttgataaagtttccgagttcagctgtgatgaatgttgagtaagcgcaggccgcagataggatgtggacttggcaggcccgaggctccggctgaaaccaatctccctctatcagccaggctgggctttctcaggcccccggccctcttccctcctcctagcctccctttctctaggccttgccccacccaggcccctgcccctggggacagggtaaaggaccagcttactggttggatctgtcctgacagaggaaccaggcttaagccaaagggaagatactgagggagctcacagaggtagctgttgaaacggagtgagggcccagcgcaccccgaccctccacaggtcctgcatcttcaggcttgtcgcttggtggtgctgcttgctgtaccctgattaaacctcagctccgtcctgggcctttagacttaggagctcagcctggactttctgtgcccctccccatcctaggtcttcctacatgcagtacctgagctcattttagtttaaatgcccgccccattcaacaaaccccagaaccccgacatcccatggactgaactagccctctgaggtacataggcccacatctgtctccatctcagactgatcccctctcttgactgcacagtgagtccccagcttggaccctgcctggaacttcctggtccccccagggcctctccgtccactcctcaccagaactctgtaaggtcggatgtgggtccctggaccttgcagcccagctaggtctccattctgtatgtccctgaagagcaggccgggtggtggctaggagggctgccttccacctcagtttccgttcatggcttccacattcctgcatgctggtgctagccaggctctgacagactccagcaagtggttgtgggcagcgtacatgtacctgcagggatctgggctgaaggagccatagtttctaaagactacaggtacaccaggagggggcaggggtcacccccacaaaacagaggggtgtcctgactccaactgagccaggagcagctagcagagcctagggtctggttccaggagcagacatagggggccaggggtggccagaaacagaggtggaaagggagatacggggattatggagagaaacgaggcctcacaagggcaacagcgaggccttagttctcatctactgtgaataaggatgggtccagagaccttgttactttctgtctcagtttctcatacttagagcagggtagtaccaaattggaacgctagtaagtgtcatgcgtcaatgacatgctcagctctccattgtgttcagtggccctttctcagccccagggctgaggtctgcctctgaccactggtacagtgtgaagcacatggctggggtgcctgggtcctcagaggcttccagagggccacgcagctacacacggactagccagagcagcagcagcagctcagggcagggaagcccaccatattctggccattaagtcggagttggcttttgtgtaagggttggaaacgggagcggaatacatttccaggaggggggggggagctcggtgctgcccacggcccagccaggatcacagctgtgtgaagccttgcttcctctggggataggcaagggaaggtgactgatggcagattttcagtgactccttttaaagtttctggaaccaatttgaccccaggtcgccagcgtgtgtttcttttcacaagacagcgccatgcagagctctgcattttatctgggctgcatgtcacccacacatacctttttttcctcagtaaagattcttgcctttaaacgtcaagcatcaggaaaagcctgtatttactgtgtgtgaatcatatctcaataagatcttcttagtgtttgaatgctgaggtctgtatagacgcatgtttactaggatgtgggtcctgactctgtcagacccactgctcggtgcctctgtagtgactgaggaaggtatgcgtcaccttctaggatgtcctgagttccaaacccacgtgacctggggtggaccctcgtgatgctcacagccaggcacagaagcagtcagcaggtcaaccatcaaagaccacacgggatagagaggaccaggcaagacagagaaggacgtagggctcagactccttgggaagggacatgagctccccacagagggtctgtggggacaccctctgtgacacactgggtgagaaacatctcctgtcccatcctgtgtctgttcaggccccgggccacccatgctgtgaacagtccatagactcaaagatggcagcccctggctccagctccagcttgactgtcatcattgggaaccccagggggcagacacacttccccttctagggtggggtgtgtgcactcaagtgaacaagcagtgctatatggccagctcttttgtggccagcctagtgtgggcagcgtccctcctgggctctgtgagatctgttcctccaatagtgtcctcatctctaccaccagtttggctgtctctttagcgcccacttgagtttgaggtcaaggttgagaccaccctgagcttcaagtggcccttcactcttcccggggacactggacacctgctaagccttaagggccacaagggtgtctgaacttgttgtgtacaactgtgataaggtggtggtcccagaggacccaaatgaccacactgagtgtgggaccctgaaggaggagagtccttaaataggccgaaggggtacactggggaattcagcggccactcaaggacaagtttggggcactggtgacagacatttacacaggacatatgcttgggggacctggccctttcctggctggcaagacaatttgggctatgtccaaggagtatggccagaggtgaaagagactctaccctgagagccctgccccactgcagtgtgggtaacatgcctgagatgatcttgtggcactggggtcagagttatcgtcaaggttcttcaccgcgtccctgtcggtacttcctgactgagccattagaactgaaagcgaaggcaagtctgaggagcttaaactgtgctccgggctgcagctctgggtccatgtgcctctgactccttagcattgctcagatcagaacccccgctcagatggggcctagatgaggacctactgtcagaggtcatggtgccgctagccaagaagtaaggctttagaacttagacctgagatgcaggcgcgagcccttagactgtttggccatagtccccactgggctgagtcctgtgatgctaaactcggcccctgagggagggcagggctatcttgccgcctgtgcgtccccgccgtggccctcactgcctgctgcccagtggtgggaacgtctgtatctgtttctattttctctctgctctcagggccttatctgacagctggtcctgctggaggccagggtctccctcctggcagtgccaagccattccagtgaagtgaggagactctataagcaaggtggggggcttcctatacctcctgatggcctccccagccctgcaagaaacagcaagttgtcacagtaacaccaggctgtgatcccagccattgtcccatttggctgtgtggactccagcctccacaagagtttccgtgagtcctgcctttgagtgtgctctgtcccccactccacttctttttctcctggcccaactgggaggagcctcctctgtcatcagtccttgccacctcctccaggaagccccccccccctctcttaacacctctccctcttggccattcacacaggtacctgtgctcctttggggaaagaagtttagttgtgccgtatctccggctcctggtccttactaaatctggcacaagggaatgtggggaggtttgaggagtgtgggagcagatgaagtggctgtggttaggaatgtggctgcctgctctctgggttctacctggcatctgtctgcgagatccagggcccaaggatgggcaacagctgttgcaggtcgcctttgtcccattataggaagagaggaaagaatctctgggtgaccctaaaggaaggaccctgtgccaggcaggctcctgtgggccttggtctgatgaccaagggtttggagcactgggtgctgctctggtattaacggtggttcccatcccacatggtagtctgcagagggctcatccatgacagaatcctgtctggaccaaggagcccccttcatgctgcctgggtgacacagatggggtttagtcccccttccaggacctgtagtggtctccatgtggtggtttcaaaatgaccaccaccacccttcgttgcgactcctcaaagccaggagaaggctgcagtcacctcacttacaaggacttggaaagcactgggcatcagcctgctgtacagagcccgtctccataattcagttttaaagcatgaaaaagggagttgatgaaattccgctatcagctccgagccaatatgcaaaatatctcacccccaatcaaatagctattatgttttcattcccaagcggcgtccggcttaatgagcaggagacggatgggcgcttgggcgtctgctccctgtgataaccaaggggctcggggcactgtgggggctgttcccagtgctgccctggctgtgggtggccatcatggtggcctgtggatgccgctgagaaatgtcgtcttgcactcggacctctccaacctgagcagtagtagccaggcagcagggacagcatctgcctcactatgggtaacaggagctgtggttcaagactgtacgaagggaggagcacctgtctggtcaggtttgaatgaggtccaagttcctttctctccttgcagcatacccttgaggatcatgagcgagttgttctgccttagttgaatgggcctcagtttgcccatccataaagtgggtgtaacccagacttccctcttgaggtgtgtgtagcaggtaatgactggctacttatggaaatgacatttagataggactggcctcaggttcccttactcttctttgcccccactccatggcacccagtctggctcacattacatattctgtatgacctttccatgccaagatctaacatgaaccctctgtgccttaggttccccactgagacaggcctggaagatgacctcactaggctatgtcagtgggagaggttaaggagggacatcgtgaagggctgggctgaggcttcttgtacacagttggtgcttaataaccactttccacatctcctagccctgtcgggttattggtggcaggaaccagtgacagctggtgtttgcaaagcactggcccccagctccctacgctgctgcagtctgatagtgcgggccagcagtcctgggaggctgcagctgtgatagtttccattggtagctcaggagaaggagtacagagaggtagagccgcttgcccaaggtcacacagcaaggacacagttttgatctgtcattgtacctggttgggaacagtgaggttccccaaaaggaccctagcatagggcatgctggggaggaacagtatccagccatggatcacagattcccctgacctacaggaccagtctcccctcagccccccgcaacccccttcctactctccacaaccttcacgggcctaggtgtggcagagggcccagtaccagctccactggagccgacttgggaagccatagaggccccaggcaggaatgccgcgtccggctgcgggcccacaccgtctgcggtggtgattgtctcctgcagtatcagagccacgttaattgttctggaactaaattaacagcatcagaatgagccgcttgcagccccgcttctttctccacgctcctccacgcagctttgtgaggagcggtcgcctttgttcctgtaaatggaggaacagccctgctccaggcgcctgggtgtgggagatccacctgggtgggcaccaggctgggctccatgacattactgaagaaggatgcttcagcttgtgccccctcattgacccagctcagtggcagtcccagagggcaggcttcatcccattgactggagtaggcaactgagactccagggacttcccaggcctggagacgcacgaagctccagcagaggggtaggtccatgcacctaggcagaacagtctccagcatcctgaagggaggctctgctcagggtgggcctccaccacagcgggtgtccagccctggtacaaggtcatagcggccaacacacgtatccagcctaccttgagtctgctactgtgagcctcagccctctcctgcctgtcaccctgctatagcaatgcagctggaacagattgggaggctgggtttaggactagcaccacagaactgcagccaggaaaccagcctcatttccccttcctgggacttgtgttggtaccccagtgccccgggttggggttccacctgtgcgagttcactcacactcagtacacagcgttgctggtgcagataacttcccccacaggtcctagtctgagcctcaccccctgtccttgctcatgttcctgacttagaaaccactgtggctctttggtccccaggagtgacatgagacccctgcaccctagaatggtgtcaggccatctgaggccagtgtgagcagaatggcactgacccctgtagtgtggttgggattgtctggaaacctggtcgcagcctggtgtctcttccgtcttgtgggtccccatgccattgacatgaccaatagatactatggctctcacagtagcttcagcatgggtgcaggctgacccacgttgggagctgtgagtctggggagaggcaggtttcattagcagggaaccctcaagcatccaagcggtgcctcctagtccacccctgcctggagacgtgggcccgcctccagaaaggctctgaagtggtgagcactgctgctcagcttgtagagagcacttgtcaactgtacacaaagccctgggccggatccctgacacttgtatacctggtgtgctgatgggtgcctcgaatgccccccccccaggaggtggaggcaggagcctctaccacacagtaccccagttctcagccttcctaacactgcaaccctttaatacagttcttatgttgtggacccccaaccataaaatagtttctgtgctacctcaccactgaaatctgctgctgttacaaattgtactgtaaatctgtgttttatgatggtcttaggagaccactatggaagggtccttcaaccgccaaagggatggcaacccacannnnnnnnnnnnnnnnnnnnnnnnnnnnnnnnnnnnnnnnnnnnnnnnnnnnnnnnnnnnnnnnnnnnnnnnnnnnnnnnnnnnnnnnnnnnnnnnnnnnnnnnnnnnnnnnnnnnnnnnnnnnnnnnnnnnnnnnnnnnnnnnnnnnnnnnnnnnnnnnnnnnnnnnnnnnnnnnnnnnnnnnnnnnnnnnnnnnnnnnnnnnnnnnnnnnnnnnnnnnnnnnnnnnnnnnnnnnnnnnnnnnnnnnnnnnnnnnnnnnnnnnnnnnnnnnnnnnnnnnnnnnnnnnnnnnnnnnnnnnnnnnnnnnnnnnnnnnnnnnnnnnnnnnnnnnnnnnnnnnnnnnnnnnnnnnnnnnnnnnnnnnnnnnnnnnnnnnnnnnnnnnntggaagctgtggctaaacagcacaaactgggggcggggtggggcggggctatgggctaaagaacacgaactaggggaggggctatggctaaagagcatgaactggggccggggctgtggctaaagagaacgaactaggggtggggctaggtgaaagctgtagctaaagggcttgagctggggaccccaggctaggtgaggatttcagtagtgcctctattctctgttcctgttgcccataccctggagtaacttcatagattgtatcctttggatcccctgagagtcaccgaagaacgatggggggcttattccagcctgccatctccactgcaaggtggatgccccccgactcgtctggagggagggagaggaaagctccccagcccccactgtgaaagacacctgcattctgagccaggtcacgcgtctgccatgtttgtgtccagcatggttttgctcaaatgtagtaagcacaagaactcacccttggagagccctggaccaaacccccagggcagggtggctcgacagatggggcctgcggggccataagagacagcagacatgtcgactgtgtggccctacgagtttgtgtgtgacctgtgaggcaggaaggcctgcagtgcccatctgagcccagaaggatcatcctgtgttggtttctgttagttgtgagtggttgggaaggttgggactcttgtcctagcaaggagggtgtccattgcctggggagggacagacaacaggaagggcaagaacagaaaatgcataaaatgaccccaaagcttaggaattgctgtgggccgggagtacatggggtggagttcacatggttgtcaccaggggacccagaaggtgtcgtagccttcgcctctgtgggtagctggccctgctgtgtcctgatacccactctacccaggcaccaaagctcagcctgtacagccattaggaaaccagggtgaccttatttggaaacacatcatgatatccaggggctcatgtccacaggttccctcagagacatggaggccggagaagaagccaaggccatggacagcagccccaaggagcaggaagccccagacccagaggccccagccatagaggagcccccaagtccacccagagaaggtaagtgtgcagacccagagaggttaagaggtttgtctggggtcacacagcccccatgccaacagggatccgacgacctaggtcggatgacctagactcatcccattatcatgtcgcccctttcctcagccccctgacctcctcagattctcctgggcctcctggttgcagtttgctgggtctgcatttctgaatctgaggacaggccgcagaaggaagccccacagaccccctacactacccaaactctaggaggacagttcaggccaggtctggaggtagggcagtaagacttcaagggccccaaaggcctgagaagagggactcacggtggcagagtactcgggagattagcactgctgtgttctggtggccactgagctcaagggagatggtagcgagctctggggtatctaagggacacctgcatcccgacccaggtatctgggctctgcctggctgtgagtctagagccctgccacctctctctgcagctctgagcttcaggagtgcttcgcttcttacccatgagcctttcttccccctgcagcccccagctgcatgagcgggaacggcatggggaaaaggcccggggaagtggctgagtcaggaaagagctttccacataggcttgaggacctcagcatctctgtgaaatccagatgtgtgctgcaggcctatgacctcaacaccgggaaggtagacacagtgtccctggggctcactagcccgacaggtcgactctcagaaaacaaggtagagagcggctaaggaattgatgtttggccaccacacatgaagaggaaggcaaagggaatgacagaggagacagacagggacatcagagagtctcacagcttgagtggggagcagaggtcccacacaggtcccacagcctttcatccctagggctcctcatcgtgcacgtcaccagtgtgccagagtccctgactgagtggatgcaggccagggacccttcctttcccctttccctttccattctaagcccagtccccagcctgaggttctggcctttctgtggctctgactcccctcaccctcagctcccggggaacccctgcctctggagtgaggaagccagtgccaggcctggtacacagtcctgagaagtgaagctatggctgcctcagtttctcctgggtggcctccaggagagcaggtgccgtgctcagaggctgctgcagtatctccctcaccatcggtgccaccatcaggagacacactagtgcagccgtggccgggctgccaaagggcaagtggctggcggctgctggactctgacccatggcttcccggggagctggcctttatctgattggggagctggggctgctgaaggggtaggcgggtggggccgggaaggatctgggacaaacagcccggcctgcacctggcaccagcggcagtgataacacagtgatgggcgcgataacgggcactagagcatatctgacgttcaggcgggtccaacgcggctccgctcgcttggtggctggagctcagatgccagccactttgatttatagccaaaaataataggacttttataccatgggattgatttatttgatgttaatcacagcccttatcgcggtattaataatctgctggtcccatgacgtcaccaagggggctttacaggagctcatcgatcgggggccacactggttatctggcccgccaggaaagcaaacatgccctttgggctagaattgggtgcggggctggtggagggacccagctgttgcaaaaaccagagagccagaagtcatgggccttggtgcactgggtgggcactgggttgtgacagcagctaaagaacaattattactgctgtgatcagcaggggctgagagctttacaagaccaagaggaatcctggagtgctagataaggagagaggcaggtgactgtgcgccctgaggcctcagtttccctcctggtcataggctagcactgcaaggatgtgacaatgctttcctctctacagatgtgagcccacctgcagtgccggcacctccggagtccccagaagatcctgaggacatggaggggcaggagttggagatgaggccccaggatgaagagaaagaggaaaaggaagaagaggcagccatggctagtccctggagtgggccaggtaaccaggctgactagccccgtatagtagtagtggccttgttatagccttctgggctagctagggctaggctatcctgggatcgtgggtcctccgacaccacccgtgcccgggtctgtgtagctggcccaagcaatgtgttctgagataatctcgagagttcgcatgcccagagcctgtgctctgggcatttgaagggtctggtgtggctggctatggggcctgagagacgatagccggagcaagagcctggagggcgtgtagctgacatgtaggaactgctgagcacagcttccctgcagcagatggttgggattcggagctggctagtgcccaggtgggcttgcgcttgtgtgaggacagctgctctttctggggggcccagtccgtctgaggttcctggttaccatctgccccacaaaccagtcaggcctgtacctttgcacagacagtgtgtgccagttgtcacattggcggctggagctcagactgcacaggtcccagagtatgacagtcatggtacccttgctgccaagaaaccgtgggcatcagtgatttccagggctcttattgaggaccaagagccactgtgcagagcaggtgcacatacacctatggtcctcaacaagggaggtgtcggatgcttgagcacgtgggtgtgtggggcggcacatgcacacacggttattgtctgtcggctgtgtatgaacatgcaggtatgacacagccgactcctgtctgtggctagaaggcatgtcaaaggggtctgagaaggctttgccagggcagagactgctcctcctctggaaaacttgggaaccaaattgggaaggggtagaaatgaactcttaactgaacacatggatgatttggtggggtgctaaggcattagaagagtgcaggagtcgatttgtgatctctgccgccagtgtcaaggatgagtggcaggtgtggctaagggccacacaatggaacatcagcctgaggccttagagggaggactgacctagaagaccgcagccagaatggggacctgcactcttgggaaattgagtccacccatagaatgtcccatggctagttgtcccagagcactgtctcctgccacatgtacatcaggtgcttggcacatccctcgaggctctaggtgacctggcagaggtaatatggcgatgatgtccgctcctgctggagtgcctgggatgggcactgatgcaatcaatgtcctatctcagttgaggcttgtgtccccagatctcggtaccatggtgggaataattgcaccaggtcacatgggtgccagaccctttccactcacaggtcagtgtctaaagccatggaattgggcagagccctgtatgcaggctgtccagcttcttaccagccctatgccgactcagtctctccagctcgaagggggtccctgagcccctctgaaggcatggatgccccttacatcagcctcctgcggccagcacagtgtcatacccactttggtgtagggcagagaacggcataccacagcactggctgagaactgcgccttgctccagaggcccagatgtgaagtcacctacagcagtatggaacgttgcccacggtcctcatccacataagggttattattttcttagatggagaaacaaggcccctttagtttgtagcctgtcttgccccctgtgaaggccctgctccatgggctgtggtttggggtcagggtgcaccccagcttcccgagttatttgcatcctccggggccaggcagtgcactatcggctcccacagataggaatttctgtgcagtgggcagcgatggggttgataagtggctgctggccaaccgccgtggtagccatcgcctatcagctcccgcacaggctctgcttatcaccggtggggaagctgctgcagaggccccgggggctcttatctccagggccgcccaagcctctgatggggttggaggcttaaggcctgaaggcagtgcccagtctggtgacagaccaagtgccacttttaccttgcggggttgcccgagactcttcctgacctccggcccatggctgctttctgacaggtccctgcacccaccctgtttgtcccaggcatcctgcctaagaggtatctttcatagttccaggcagagacagggattcccagtgcaagctagctagcagcgctgggccatgttaatgacctctgtctgcttgagagacacccccctcccacctcagtgaatgaggtggacaagcaatgaaggatgacttccagcatcagccttaggcccacatattcacgcacgcatgcacacactcaaaatgggaaaaagaaaaaaggcacccccccctcaaggaaccccgacttggccccgagttccaatgctgtggtgatgcccaggagcagttggctgactgctgcagacccaactatagtcttccttgctttacccacactagagtgtaccccaaggttgccaatatcaccatcactgtcatgatctcctatcatctcctgcttctgtctctgcccctggctccctgctgcctctgcctggtactcagtgatggtagcactccacagtctgggtcattcacagtggagttttcacccactgtcaagagttctgtatcttgccgggtactggccactcttctttgatgctgctgctgtgagaggcaggagcctagctttgtggagtgtctaggaatggactactgacctcaggaccttggtttcatggtctgtaaaatagagatggggagagacattgtggcctccaacttgtcagccactagacagcctggttttcctcacagggaggtatgagcaagttcataagccccctaagtggctgattttctattacatctgcatcagacaggcaatgctatgtttgcagctctgatagccacacactgcccagggtccagctttgcagtgaccccacggtgtggtctcagtactctcctctgggcagagggaatgttgtagccctatgtagattataaaacccaaggagcatgccaggaaagtgtcttcagagagcatgtgaccaaagcccgtaagtgcacaaaacaggtggccctgctcggggctctgcaggctgagggtgaccacgatgggcctgaggtgccagagaggggagcccacaagaaaggaatgcatgcaaggtccagaggacttggagccagaacagtccatgagtctaaggaggcgggagtagagaggtggtagcccagggcctgtggatttgggcccagcaggtgaggggattgagccgggagggcttatgtgtccctgaggcacagcagggacacaccctgggcctgatgggccacagaccactctggtccagagctgaactctacacaaactttccccaggttgagccccaagctgggcttccctcagctcgcggctgaattctaactgggaggaaggatagattagaaggagagagtcggagttgtcatctttgaaatgactttgtttgcaagagtgatggctgtttcaaatccagctatggcctggaagtcaatctgtaaccttgcatggccaccttgctatggcatgtggagacttgtcccaggagcttggtgcccccagtgtcatacgcctcctatcaccagcccttaaagtcaggagacttgcaaacacaccagccctgtcaccttcccccagcccccaccctgcctggtcttgagcaagtggctcaaaggagcaaaagtaaacagggctggagggctggagactgctgtcaggtatcacagtgggtcctctttctagggattcctccagggccagcttcagcaaaggaatcgatagaccacccagttccttccaaaggactacatagaactggggaggtttgggacacagagggactgtaaccttcccaggtgcccccaaaggcttcatgcatgccatcagtacaccaactgtgtgctgtttgcctgtgccagtattccatctgtaatgagtctctccagcctcctctgagggtctgtctggaagggcaactgagtcactatggtggccccaacccatccctgaggtgtgctttcctataaaatgagtgcagaggcccagagtgttccactagctgtcagtaggaatgctagcagtggggacaagggtcagcgggacttcagcagccttcttctgtcctatgggtgtcttgagcccagagcttattctagtcactgctgtctgagagcagggtccaggggcagagcctgaacttgaggcagactataaaggggaaggcagaggggagcaagaggccatcagagtgacttgggaaggctaccccaagcacattagccccatgtgaccgtgctaggtgacccaagaccatccatgtccaggcaggacccaggtctcagttctggaagccctggaggtgaagcaggggcatcaggtgaagcaggggcatcaggagagccacctgaagccctccaggtgaagcaggggcatcaggtgaagcaggggcatcaggagagccacctgaagccctccaggtgaagcaggggcatcaggtgaagcaggggcatcaggagagccacctgaagccctccaggtgaagcaggggcatcaggtgaagcaggggcatcaggagagccacctgaagccctccaggctcactgccccgaatccatgtgaggatacacaggctagatgaacagccccatcctggccttctgggagggtctagacagacagacagacagacagatagatgggcaggcaggcaggcaggccttccagcctcttccagggacagagagaatagacaggcatgccatgggagtgtcgaggcgcttaggtggagatctggccaaatcctgaggaggctgtggaaggggagagcactggctaggaatggggcagcaccttcccatgcacacttttggaaaagacgtgactggagcacatggcccttaggaagagttaggacctgtaagtctgccacctccaagctccacagacaaagcagagcagggaaggggagccctgtggctcctgacagttgaaaccaaggctcctggctgaccccacagtcctggcctgagggagcccagctagggtgggaagaactgttgtctcttccgcccaggagtttcttggagcccagaactctttccaggagctgctatgatctgagcaagagccaatcagcccatcccaactcctagaggcagggccaagaagcctggccctggatcaggccagtatgtccctgaacagtgtcagccagtacagggggtgccagggtgtcaaggccaagtgggagagcaaggggcagcactggagaggaccccatctctaggctgacggctgaaaggcacattaggatacagggaggtattcaggcaaggagctgggtgtgcagaggtcctgaggcactggggtcatggcataatggagccttagggttatggtaatggggggaggggacacgggggtaagagttcagggcacagacagtcagggtccaggttatgagccatagaccttgtggacaaccagccctcacagccttgtcttgtggtgctggggatgggatcccagctctcaagctagccaggaaagcacttcacctccaagccacaccgaggcccagaattcttggctgcaccgtgaagatgctgaaaggcactggtcggctttgatcacctgcctgggagaacggatcagtggtagagcatcctggggtctcggggtgcaaggggctgctgctagggccacaggaggtggtggtggccatttcctgtcggaggctccagccagatatcctgcctagggtcccagggaaccaggagacaggacccctccctcccgtggagcggtaacttgttatctagactgtgtccggctgactaatcttgcaggcccggggtttctgtgtgaacctcaaggcctgttatctggcggccgaggcaggactgctcgtcctgatggacagcctgggagatgggccgatagctggccatgctcccctccccacaaccgactggcttgcatgtgtgggtgggaaaaatcattccagctattttgcgttatcatggggcctggcgtggcaagtgataggcctgtttgtctaagattagtcagcaggggagggggcactggtagatgataggggtcactctggggtcagcttcagagcccagcctactaccttggaacccctttgaagactcctgtttttctgagaccccagggttgctatgaacaatctgaagctagaacatggtgaaaagacctaaggaaattgtatctttactgtcgggcatgttcatcgggcatgttcttcctgaatagtcactgagtaccttgggggtgggggacaggcaccctcagggcctggaaagacacaaggatggccttgacctcctggaatgtataggaaatacaaccaccctccgagtccaaggccagagatgattctagatggcgtcggagtgagactccctaagccaacacaccaccagccacccagtgatagtgtgttggagcaaaagacaccatgataagtctcagctgagtgtacacagctggatctcactgcagggtgaggaggaagggggctcagaggtaggggaccccatcaaggggggggcactatggtggtatgcaagtgattgttctgcaaacaagggttagaggtcatagcctaaggtcagcatgggccatggggggatggctggcaggtggggatgggcaccctggctgcctgctggctctatccacctgagtcctaggctagccataacaactgttcttgagccttgggcctcagacactgcaaaggaggggactctcacaaactgccctcctccccatgctgcctccccctcctcctttcttctcatacagtgagcatctggcccatgacacatgctatgtgtcctgccacacatcttggggttgaggacctcatctgagtgagcagcagctacaatggcagccaatcaccaagggacagaaaagtggccaagacatggggatgtagctatgtggtccagtgcccaggactctcgcagagttctttctgactcctgatgaatggtccaaaggcacagctggtgtaacagcatcaggagaagtaggagaccaggtgtgacagatgggtctgctctgggagcaggtcccattggctgttgtgtgggtaaaaacagagcccagacgaattctcaaaagacacgagagtatactctccaggcagcaggaggcactgtggtaccccattacagatgtggaaactgaggcagacaagatggacagctctggggagaactgagcaggcctcttgggagagtccattgcctaccacaaagtctcatcccaaggagctctcagtagacactgtaggcagtggacagacaacaggacatccagtgggaagtgcaggtggagcccgagaggggccccaggcctggctgcccaccacgtgtggcccactgacctcacccccttccggacttgctgtctgtggccagggcaggctatctcggtggcggcactaatcaagtcacttccttctccgccctcccaccagcttcctgcctagctagcagccccacagccggccccgacatcagccaggcaggtcccagccttgccaggggagctacaaccattgtcttccagcagtgtccctcctgtcccctccctggttataaggtcgacatgggctgtgtgttcggtgaggaacagctgttgtcactgaggccgtggttaatggtgccacctgtgtcaccagtgctgctgctctgagccccagcgtgtgactgactttaacactgccgctggcttactggccacaggtaccctaactgtggccattgctggtaaattgttcttgctagcaacatcaccacaggtgtgagagccagctctgactgccacctcacttgctattttctggctgtcatgccccatcctggctagagttacatttgccccagccatttctaccatgaccagagtacctagtagaaataagatggggtggccctggcttctatccccattcctctcattttgactggtagccgtgatttcctcatccagagagcttccgtttctcagggtgactgctgtaaggcggagcaggcaaagtgggtaaacttgcacttccctgtgcccacggctaggatccatacaggtccagggtccagccacggtgctgagtcgcacgggtactgggacgcacgggtactgagacatacaggtactgggacatactccctcctctctcttgctgtcccacaagggaaactgaggcaattctgcttacttgtgggtagcactgcccttgtgtgagcagcatttatgagaccctcctgtgagacccaagatgggagccaggaagcaacccccacccaccccctgccagccctgtgacattgctgttctttgagaggcaccccttccccatagccacaatggctccttatttatttatttatttattacctctctatctctgtgcgtaacttttgatttcctcgctgcgttttttccattatggaggcggtggacgcagccgataagatcggtccccagagatgggacaaaggggccgccgtcggctcgagggctggtcatatcctgcacgcaagggcccagcgcggcctgagatgaggcgagatgctatcataccttattgtgtctcatgggggctctgcccacccggccctgcccccagctgggctatctgggtcctctggaatcaccacaggccttggattcgtccttcaagccaccaagcccccgtgtcctctacacatatctggtgctatggggtgacttggggaccactagccaaggcctatcatagtcctttgctgcctaagcagagacttgacagagctctgggaatttatccagaaagccaggagtgtggacagcagatcggtgaggatggccattgtagtgaagccagaggacacttctgaccttaaaaattttctacaagagctgggcagtggtggcacatgcctttaatcccagcacttgacaggcaaaggcaggtggatctttgagttagaggccagtctggtctacagagtgagttccaggacagccagggttacacagagaaacctgatcctggggcaaaaagagttacagaagagagcagaagtcgttctaacagatgcagaccccacaggatgctgtaagaagtccctgagcccagcaggcttgaccaacatgctccactgacactcacagagccaccaaactgcagagtctcccaaacccaggtcacgatgtattctaggtcacttgtagattgtgggaaggtgggacaggtgccccgggacaagctccaatgcccagccaccgctggctgcccagttccaggccagcagggagctgccgcaggagacatggatgtaggtcaggaccagcctgctttgtgctcccctttcctgaatgcctaccagcccctcacaatgtcatccctcttcctttccccgtcagggaacttaaggaaggacagagccaggtcagaggcttgggtttgaacttccagtgtcctgatgtgattccggcctccaagctgacagaagccttgaaggcagaggctattgcagatggctcttccgaggaaaagctaacaagtccctaaacctgtttgtctcccatcccccacagagcctaactcaccctgaggcagaggcttgaaactcagagtgtctgggagtcttgtacatcctttgtaggggcctttggtctgtgtgctcaggccctgaaaggccagtgtgctctaagtggtagctgtgccctgacacactggctccccagctcccacctcactgtcagcttggcaactgccaccacttcccagaccctcatacccaccctgaccgctcagaccagcacctgtggccccagagagcaatggaatgaagataaggcaggtgggtgcactgagctggagccaggtgaagccaagctctgggcaagaccaggttgtccgtgccatcataagtaggcagggagatgtgggggctctaagctgagagcttagagctctgtccctatgctagggggaggaaaccatgcctcagcctcctcagggatgccggctgcgtagaaaagagctccttgccttggcatggtacacaatcctccaagggattggtgtgtcctttgaggggtgagtgggtgcacaggtcaccgttgccatggttcctcctgctagtctggctgctttggttgtgccctaaagggacaaaggtggtgtctccctccaagaacctagaattctggctctgaaccatacagggtcctgggatgagcaagagatgccttccacctggcatcccttgacctattacacgctatcgatgcaccttctgtgagagccaacccttccccagaacaagccccaggcggagagaggccccctgggaggaaaagccccaccctccatagcaggctcttcccagatgaacccagatctgccattagtaagggccagggtccagccgataaaggctggctgttgctccatgtcaaaaaatcaatactcaacaagcacagtcccagagaccagggaggggctgcggagtcgctggaggggcaggacttcagcaccttggaccagccctcctccacctggcaccagtgtttggggttctcagtgacttaatcctaggccagactgaccacacacacacacacataccctaccctgctcccttctgatggacaggaagcttgaggttggcttcttcctccccagggccaccagagtggtggcaggacttgaggaggaggggctggatggctacggagagaagtgcataggggacagaagcaggggtactctcccactcctgaggtcagctgccccgtctcccaggcatgataccctcctgggtctggggcacatgatgcccagaatatccctcagggctggcagtctacgaagctagacacctctttcctctgaggtttgagccactgagaacagtgacactggcgagagggaggggactgggcggagtgaggagagaaatacaggctctggtgcagcacccctgggagcagcccaccctaaggcgttgtggaccctgctctgcaccagctgcaccagcacctttgctgctgccacaagtggacagagtggttcagagcagggctgcttcctggtgtgagtggatcgcattcttacaggtcctgaacccagctttctggtggcctccatccagcttactgatccccattttcctagtgactggcagctataggcactctgcaaagtcagaatctacctcccgaggggcggggtggggcggggcggggcagagaccccccccccatttcccttggatctcaccccagccctccgtgccactgcttctgaaggtggtggtcaagcttgtgtccatggcgcctgtcactctgcagcttatctgcctggtgccatcctctccctctgcagaatgccgggaagaaagcagagatggctgaactctccttactggccatgtcacctctggaaagtcccttgacctctccaagcttgctttcaatgcctcccccacccccatcccatcttccttaaaaactgtttagcagacagtgaccctgagcaagggcaggtataacacacacgccccttctcacagcagatttccctttcagtgtggcttgatccaggaacacattccagcagctctctgacccctccatcccctgctgtgtgactctagggcatcttttgcccttccgggtccttggtttagtgggaactgatgtcctctgggctacacagtttgcctacactgttctgtgttcacacctgcagaattttctagaccccaccagactggggctgccctccctccctccctccccattcatgcctttttctttcctttactgtgacttttatcaaaagcaaacagggtgatccttgcgataggggccgcgccccagctgccccgtgggagccacagggcgggttggcgggaacgatgggctgattagataagtaggtactggtggtgagccggtgggcacccacacaccaaccacagaccccacagggcatggtgggggctttgggtggctggtttggtgcttcagaggccctggtctttggcacaaggggcctggcccatttgagctggggaagctttttgctgacgttcctacacaccacaggctcctgttgtagatttgcaacccagccgcgctgctcacatgggaaaaccggggtgactgtcctatcagaagggtactctgaggtcagggcttaagagaggccatagttagccaggtggcggtaatgcacgcctttaatcccaggtggaggtaggcggatctatcttagtgtgtacaagtcaactggtctacagagcaagttccaggacagtggaggctacacagagaaaccctgtctggagaaaccaaaagagaaagaggcagggtgggatgggggggcaggccatacttggggaggaggagggacggctcagtggttaagagcacttaattacttttctagagaacccaagtttggtcttcagctcttgtgtcaggaagctccagccacaaggaatctgcccccatcttctgttctctatgagcccctagacacacatatggcatacatatatacagatcttaggcatcccagggctttctccgcctccatagagagaggccaacaccagcactaggcagtgctgtgcgtgctgatggaaacctctgcgtttcaaggtaaagcgtttctagtcaggtctgaggggctccaggggcaagggtgccacctgggaagctagtctctgccctgtagcaaacacagccgcttagccgacagactatatatacaccccttctacaacatagtaaactgaggccccggcaggacaggaacacagacactagggtaatggcaggacttggcttgttggtttgaacaccagttctgccccccagagcaccctaccaatggccagctccacccacccccaccccagccaggctccaggtgaggaagtggatgggggtggggggtttctttctgttcctgggagatgaatgcggtgaaggccatgcatgactaacgttgtaaacagataaatattcattaggttccttgaagatgctgctggggaatgcaattaagtcccagcacgtgtcctgggaagcagtgtgtaccattgtttacctgaataagtgagcccttgacccagtgcctgaaatgtcagcctggttcctgtcaagggcttaccagggaagcatagggaagcccaggccaaaggcaccaaatttcagacctggaagaagccagctgctccctcccaccatccctcagatgggtaccaaggttgtaaagtgtgggatcccacccaccatgcagactccagactctctgagcctcagcttcccaagtatgcctggagggatcctgcaagtcacgtctggtgctgggctgtgacgcagaaatgggaccagggttcacggtcggattgcaaggtttctaacagacaaaagcacattatccatcctccagctgagggaacaggtggccagggccggaatcaggttggaagccaccatgacagcccactgtggagccgcctgtgcccatgagggcatctagacacttgtttctagaatccccaggagagagactgtgaccccaatccctgcccccagatacccttcagagctctgtgatagtgagtgtgtgccacaaacccagagactagattatgtcacatccagcccaggttttctgtcactactgtggagccccagtggcaacccatccctaaaccctgggctttcctccgtgtgctgtccgtctcggggtccttggtgaaagaacagctcctccaaaccccacttttcctgtgctgttttacccgctaggagcgcatctgctgggtactagccttctctccgctgcaaggggttggggcaggaactaggttatctatgtaactgactgttgactgtcaccagagctgcgggcacaattgcagaggtcaccttgaacaaggtgctggggtgagccgaggttgagatcagctgccctccccttaccaatctgtccctctaactggctgacctgggccctgaaccagagaggcatgttaccatagtgattgttgtacactgccacctatcccagacgtcccccagtccctgagtgcagagtgtgctgcttcccccctgggagagggaccacagcccttatcagcaaccagccctctctggcggtgcatgatacccagaggatgggatggctgccgtgggaaatgccagccgtgctcttatctggaagcctgggccatggccgtgaactctgattagggtgcggggccgtttgccggtgggtgagcgaggcgatggcacccgactgcctccttccccatagggggactggaagcaagctgggagcccaggctgtccatgaggccctggccaccacaggtagcatcatggccaggtgtgtcttgtggaactgcccgtgtcataccacaccctcagaccaacctgcatggacttcctccctaccaggtaccccaatttatgaggacacagcctcagatgaaggtaccgctgtaacagggagctcctgcaaggggccaggccccatcccgaggactgttctagacacagaatggaagtgggactaggtgacttaactgtctgtctcaaggtccagggacacccatctcaggatggaggatccgcgtctcctttttgacaccagggtgggactctgggtggctgagccgtaagcacagactctcaagagaactctttaattccatttctgtcctgggggccattatgtgcggaacgtagacataggcaaaaaagccaggggaggctggcaggtcactgtcccaacaacagataaacagccctgtagtagtgccaggtttggatcctgacacctcctgccagcagtggacctcttggggcctcgattttcttacccacactgggaataaacgtcacaggggccattctctgcatcccttaggacagtactgcccaggccttggccctgctcctacagatggtaccgaccatcccggtgtcagctttgggccatgccctgtgaggcaagggaaggtgagggagggggagccagtgggtcagccctttaccaggacagtgtcctgggtgagctgcagaggaagtgcagagccttttggcctctcagcccctctcccactcccaggctgataaaggggcacaggcctccttggcctccagtcctggcccactgccttcttatcagccccgggaagacaaaggcccagttacagctctccacggggcctcctggcgtatttacaccttatctccaccattagctggccagttatctgatgatcgcgcccattaaggccacagcctgcctgatgggctccaggaagtggggccgccacagtgctctggccaggggaccaggccaggccatgtgaggcctccatcggctggcagcccgggtagcaggcagacggggcagagggtgtgtggcccggggaagtaccaccctttgaggaaatgaccatgtcatttaaagaaatagaggctcaagtagggacagcggctggccaggtgtccctgtgtccctcagctaacactgatcactataaccaaggagttctttacccctgcctgtgctctgcagaccacaacctaccaaaagttctagaagcctcacgtgccacaccttctggctgtcttgtccacctccctttcttaaggacacggtcttttatttagaactacctgttaatccagggtgatcttatctcatgatctttaatctagtcatgcctgcagaccttttcccacatgcaaaggacattcacagtcatgggtgatgtcttgtgaaaggccattcagcctagcacacaaggtcctgcacgcagagtgtggctcacacacagattctgcagactgtgaccaagccatggtgtagcctgcctgtcctggtcttcatggtgtctctacaacccagcatggggttggctccccaggaaccaggccggaagtgggggctgtgggacagaagtgtcctgggggtcaccaagcagccactcacccatttgtttcccctcagaggagctggagctggcactgcaggatgggcagaggtgcgtgcgcgcccggctgagcctcactgagggcctatcctggggcccattctacgggagcatccagaccagagccttatcccctgagagagaagaaccggtaaggagctgagccctagttggccaagcaaacctcgtgcctttccagcagggaactttgatggaacccaaagaggcaagggtaaaagggagggacttcctggggagcgtctgcaatgagtagcactgtgcttcgggatcccagggggacttcctagaggagcagtagtggagctcagcagagaaaagaaggtccaaaggaagtgagctgtaaggaacaggcacccactgagttgggagggaaggggaggctgtagaaggaagcctggccttctgtccccgggagctggtgctgggtgggcgtggcttctgacggggtggggggagcaggtgctgggtgggcgtggcttctgacggggtggggggagcaggtgctgggtgggcgtggcttctgacggggtggggggagcaggtgctgggtgggcgtggcttcccagctctgcagccgcctgctcaccacagcagccctggctggcagagagttcctaaggcagcctccttccccacacagccatgcggccgtttgtcttggccttgcttctgaggccgcttctgttgtggcaagtcaggccggcttcctcctgctggaatgtgtgggttccttttgaaatcatttcagttggaaaaggacagcaggacacagagacctgggtacaaacatagggcagccatgtaggcagcaaatgagcagggattggagaggtttgtacaatgtccacagcctatgatggcaaaggccagggccagccctaggcttcctggctagtcctgtcaatcctaggatgaaatgtctccctgccagatactgtcgggtaggccctgtttcctgatttagagtgtggactgatcacagatattcactggctggccagtgtcacatgcttctgggctccttggtctgagggcacatggctgccttctgagggcccttgttgggaaggctgagacttccctagcacccagaggccaggatgctgcacacacattcacactcgcagactcaccttcagaaatatctcagaagcacagactgatgcagtccacagacaggcaggtagggagcagtagaccaccaccactcaaaaccctttgtggtgagtcagaatctgtgctcactgggtccaaacacaccaccgactgaggcctgtggcctggccatacagtcttccagccaccaggagaggtaacttgtcccagactgtccagtaagagcaggagctagctcagaccaaacatgtccaccttggggtttctgcttgctatatcccaggcagatccttcctgctcagggccactctttcctcagtccttggggtcccaggcaggtcacatggaacacagaggcttgctttaggcctaggcctataaagagaatgtagagccaggctgtactgtgaggtgggagttgatccccttgcctgctggcagcatcatgaattaagagggagagatctggagtggtgcttgaccctgtacatacttggtagagcctgagaatggagaggggcccaaggtccagggaggaatgtcatagaacagctagttaaggtcctgtaggaaggaagccagggctttcaaagtggctgtgccgggtgggtgtgtcatgtgggctgtggacagcaagagacttggagaccgttgccactggtcagtcagtatgcaagcatgaacctggagcccctgtctccagacttcagtcaggaaaacccacatgtggcaaaaggagcaaaggcaggtctgcccaggcctgggaaccaggtcctggtatgccctgtgtctgtctcttccagtcctaggaggcaggctgctgtctctaagtttttaaattcattctcattcatattctctctccctccctccctctctctctctctctctctctctcctcctccctccctccttccctccctctccatctgtctgtccatccacacatgcccacacacacatgtagatctcagaggacagctcagaggagttgctttgctctttctaccttatgaatcctagggattgaactcatattgccaggcttagcaccacaacctctttacccactgaaccatctcgctagcctgcaaagtccccattttatagatgacaaagctaggactctgaggctctggcccaagtcactgggctccagagacctaaggaagatgcagccccagctccgctcaaacacttctcccgccatctgcaagccccccccctgtccacaggagccccaggccttgctacctcagctcctggattttgtcccaggcggctcagcctgggaaggcaggaaggagaatcctcactaaggtgtaagacgccgccaaagcagtgcagcccctgcctctgaggctctcagacggggaggaagctcctccctctctcccctctcccctctatctcacagaattaaatccttgattaacccttatctccccagcaaggcactatctccgctttggcgccaagcgtccagacacacgctacagatgattgatttctgaaagatatgggcgcctttgcgatacttcgtttattgtctaaatatttttgctaacattcagcgggctcttatcaagttcggctgatgggtcccagttctccctgcagcctaaggaagaagtcgcctcctgccccatggccctatcagccaccaggcagttcctcctctccccttagagaagaaggagggggcgcatgtagatatggggcctgtttcccgggcttctcttaggctgggggctgctcaccatggggacaaattggaagggaaatgccccctaacactcccacccacaccagatgtccagggttagtatccaggaaggaaactgagtcacacagccctgagtggatttggtagtcctgtctttatcgctcgctatggtttgcatgcctgtaagagggcagttgaaaagcctccttagggtcacagctcacagtggataatgatgagagggagtcaaggatgttaaagtgggtgagtgggtgggtgggtgagtaggtatgggatgtatacatggtatacagatggatagaaagatgagtagattttaggtaggtggataaatgaatagcgggtgggttggtagataagtgaatgtgtacatgtgtattcataaatgggcacatgtgtggatggacaggtgatcagatagagggtgggggggtgagtggatgaatggatgggtggaagagtcgatgagcagatacagaagtgtggtcgtggagggatgcataggtggatgtgagtgcacagcccttcaccccagcctgcctatgttggtctgcctgctcagcttgcttactttggccaggggccaccatagcatcagtgaggccaggggagggtccgtgactgctgagcggggtggcagatgcattaagaaaagatgctaggaaccgggcgtggtggtgcacacctttaatcccggcacttgggaggcagaggcaggcaaatttctgagttcaaggccagcctggtctacagcgtgagttccaggacagccagggctacacaaagaaaccctggctcgaaaaaccaaaagaaaaaaaaaaaaaagaaaagaaaagaaaagaaaaaagaaaaagaaaagatgctagaaaggctgaagtgggcccagactgcgtgacttcatgtggaccagcctttaggtcagtccctaatggcctgaggtcctctcatctggggatggagtgagggagcctaggctagcccaaactcaccttactgggacttgagggagtgctggggaagtttggtttccatccccatctttgtgtaacaagggagggagggtacccaggaaaggcatctcctctccagggcatgcagcccagctgtgcccactgctgttctacccagatgtgaaatatagtttgagccctgcttcactggcctggggaagcattccaagccccgccttaaagagacagcagcccagcctgagaaacctcagctggaaagtggctgtctgctgtaacctgacagcaggcatagatgtaccccgagtgccacaccctgtacactctgtcatagctgaagacagaggccactatcctaaggggcagagtaggtcctgtgctctttgaggcagagctgcctgaggcgtctggtggccccaggactcttggtcttcatgtggctccatctccccttgtaccttctcttttttatgtcatttgttatttgggctaccctgttccaggtgatttcatattttcatatgaaatatgcaaagaccctttctctaaataagatcactctcacaattctggtgacatctgtgaagccaccattctgcccagtccatagagactgggacagtcaggagtgtcatttggctcagtcaccaggcccagtctaggtttgctcttggctttgtgggggcctgagcccccttcttctccatctttggtttccccgtcagctaagggagaagcttaaaaaatatcctaggctcccacccctcctcaggctcctccatctgctcctgagctgcagcagctatggcctcagacctgcctgcagctagctccatctttgggccccaaagccaccctgaggtaaaaggctggggccaggaggtgagcagcagggcccaccctacacagagggatggctggcagggatggcatgagccatgcgcctgtgactctccccgcaggtgatctctgccctcatttctctgcctgagatggccagcatcgtccttgctctcctcccaacacgaaatgcagttaacatgaacccaagctcactcttgctggtcccttgtcccctgttgtccctggcccttcaaaggccctgctccttcccctttactatgtactgtgtctctagcccttggcacagagctggccttcagggactgaggggcgagtacatggatgagcagtgacagtggggtgggcagagcttcttagactttggttctaatcctgtgtacacagcgtgtattctcggtgagcctcaaccctacacctatgaagtgggcgatgggcatctggggaaaagagaggagccataggctgttatcactgtggaaggagggtggatcagcaggagagagggcctaattagagtcaccctgtgaccacaggccccagcactagtccccagcatatggggacctgaagcccaggcagcagtgtgggataccatttttggagcaagctgcccacctgagagggctcaccttccctgaaaacggctttatgagcagcaagatttgggaacagccgcagataaagtcgtctcagagatggtttctgatggtttctgatggttatcagcccgcagagtcggacactgacctctttgttgggggaacaggagcaggctcagatccacaggagaatttaaagtggctgatgtcatccagggctggggggagggagagttggagccaggagggagagacaaatgatggctggaggggcagcgagtgggacagatgccagggctcttctctgacctagacacacctgaacagaggagccgggggccgggagctgaactcctcctccgaggcctacctgagagacccagacagggagaagagtgaccacaaagccctgtcccaagccccaacctatcctgatgcagggcaatgacattcacacacacacacacacacacacacacacacacacacacacacacacacacacacggaaacagagaagggacctgcatggaggcgcaggacctctgttttggggcagccaggaactcatggcccatttccctggggacttgatgtgctggacagcaaccactgctccctcctagcactgctccccaaggttgcatgcaccccatgccacagtgctgcaagggggtgcggtatggtgttccatgcactgggactgccacagaaagagcagcttgtgcagcgtcagcaaagtggcgtgcgtgtgcgcgctcgtgtttttatcatgcggtgaacacgctgctccggagagcgataagcgttaaaccgaccgcgaggctgtcagtctcagtttgagggtttagaaatattgggacgaataattagatttcatatcgttaccacagcacccatcagaggatcaggcagattaattttctcaccctcctccgctcattaatattcattagagtagtggaaggctgaggcagggagggccagacccagccacctcactgacagccatctgctggggccaggaacagctagcctgtgagagtcagaggccccctgtgtggctgcccacacccgtctgctgcttactctgtgctatccaactgtgaccttgaaagctcacctaccccctgcatccctgggagccacctcctgacggaagccagccgatctgaagcaggctcttgggtagaatgcactccctcagtggacgtgtggcaactgccagcaaggtccagggtgcaaggcaatacctaggtccagagatgccttactgttcatgttatccttcaagcagagcataagtaagcagccgtggccagtatacacagctctagggcttcctgtatcctcacattcatctgtgcccagggcagaaaggcccacagagaagggcacagcctccctagcccccagctctcccaccgccctgagatggtggcaggacaaggaaggggattccttcccctatcctgacagcaactttgtcatgtgggcctcaccgtgctggcatacaggaaactgaagccagaggtgcaggtgttacctgctaggactccagggctccccttcagaaccagcttatctccactccctgctccatggcaagccacgtggcagcaggcaggtgacgtggaagccaccgggctgggctgtcatgacctcatgggtcactgggagttcccagctagtaggccttatcttgttggctctgtatatgccatgtgaatgcgatctgtaaagagttggtccacaggggtcacaggagaaaggtcagacctgaaccctgacgtttggccccagagcctatgtgggcatcacacacaaggggacccaggagtgccaagcactgtcctggcagttccccttacagtcagcagcctgtttctcctcctgttccagcctgttggtcatcttccttacccagtgagctcattgccatgaccaccgcagcggttcttaggagccgggagtgagcaggggctctaagctttgggttaagagttcctggggtgcaggtttctgagtgaaaggcatttatttgaatcaaacagcgaatggccgacaggatgatacacaggcctgctctgcctttacacatagtgcccgagtggcttagtccaggggctaagtaagctcagcgaacagggaggtgcccaagtggcagcagtcacccaccccaccctccaaggatagacaggactgggcctctgctgtccctgccttccactggctgtgtctcatcctccaccggagaccaaatcccagcccagccttccagcctgggctgcacagagacatggccacgtacacttacttcctctgctgctgggctgagagccagggtgcagggggcaggaagcaagcagctttggtggccctggggggctgagcccagagctcttcccttccaggttcagatggagctgcagaggaagtgtgtggcacagccctaggctggaacttctaaccccaaccccctcccctttattctgtctcagttccctggcccatatgatggggaagagggcacagagcctcagctacccactacccctcgctccctggcaacacagctgtcttgggttggggcagccaatctcaggagaaggacagtgctctcaatgaacggacagggccaaaagttccaccctgcaccagaaaggaaagctctactgtacagagacatgggctcgtgctctccctctctccctctctccctctctccctccctctctccctctctccctccctccctccctttctcagttccttgcaggaatctagcagttgcgtggtatgggccatacccttggtgccagcagctctgctgtcacagaaagagaacacacatcagcaggctctatagattcagtgcttgacagctctagacctttgttcccaacagagaccaatgcatagcctgggaatgcacagctccctgccatgcctccagttatcatagtgtttgaactacacaagtcctactgctatgagctaccaggctgctgaccaccactacacaacagagcaaagccccccactcggcatcctatatagactgagcctttcccatctccactcttctctagggcccagctgtgaccctgatggtggatgagagctgctggctaaggatgctgccccaggtcctaactgaagaagccgccaactcagagatctacaggaagggtctgtatctcatgcctgcctccctccccgctaaggtctttcagaaggcagggtcacttggttctgactggtccagctcttaaagggacaccagcttatctgggtaacaatcaaactgcctgagagagcaccctgaaccccatctgagaggatgatggacaacctttggagctgcaatcccatgcgaatcataaccactgacacaagagctagagggaccaccctgggccctctacagccagcccctgaacacaagagctagagggaccaccctgggccctccacagccactgaacacaagagctagagggaccaccctgggccctccacagccactgaacacaagggctagaggggccaccctgggccctccacagccactgaacacaagggctagaggggccaccctgggccctccacagccactgaacacaagggctagaggggccaccctgggccctccacagccactgaacacaagggctagaggggccaccctgggccctccacagccactgaacacaagagctagagggaccaccctgggccctccacagccactgaacacaagggctagaggggccaccctgggccctccacagccactgagagctctgcttctctacgtgggcttagggggagactgagcaagaagagcttccggggaccactgaaggcagcctgcactagaaaggaacacgccccaacaccagattggatgttggcaagccgtcagccatgtgcttgcaccaccaggactgacctgcccataggcttctacaacacagttctgcccaagtgtgccatccacagaagacagaggcccttatagggatgatactgataaacatgacctgatctgggtggggcctgcagacagggtcacagtgaccacaggaatcctgtggacattgtcgcttgatttttcctgtatcacttggcccataatgggacttacacaggctctaccctgcagctcagctcctactgccaccttagaacatacatactcccttttcttttcccactttctgctgggagtggccactggcttgagactgaggccagaagtgtccctactcacagctcacagggttccaggccatgtggcagaactgctggcccaggacacctgggtttttgtggattgaggctgccctctacaggctactgtgggaacagcaccaggcccatgcccaacagattgaaaacctgcctgttctggagcccaatgcgttaggacacccctctaccccagccaagtgatagtgattacatacaaccccctcatatatccctgcccatgtctacccttttactggagatgtaagctcccccaatccttgcctcagacacaggatagcacaccacaaatccagccagccacgaacgtgagcctgaatgcagccacttcctgccttttgcccagactcagtcatccctggccatacagcagggccccagggtgggagacaaagggaagcacccccattaaaggcccaggatcatcacaagtgcctgtaccctacagatgacgccctctggtgcagggttaccaaagtggtgccttctggtggactgctatatgtgcgccttgtcaccgagccccatggtgctcccagacaccctgtgcaggaaccagtagaacctggaggcttggccccagtgcacaccgacatccagctgctgccccagcaggctggcatggcatccatccttgctaccgcagtcatcaacagtaagtatgtgactcccaggggcagactttggttgacactcaagtcaaaggttagggcagatcctgggggggggggtggtcagcatgcaaaaggtccagtttacacacacggggaggggggggcaggggataaattatgctccagtaagacactgaactgaaggacagtacccagctgatgcagagtgacccgagtgctagattgtacatggcctgctaccataggaagggctcagccccaagggacctggtgcgggccccctgagaagtagaaagagaaggtggtggcaggcatgggtgtaatatatgcctaaaggcagcagtaggagctgagtcctcatgtcccctgtgcagggacaggagaatccccagtgcctgggtgggtcctacgattagacggggccttcagggacacaatgaaaggagagctaagccaccaaaagccagtacctcagcctggagctgtcaaggccaggcccttcctcatccagtcagtacctcacccccacttgtacccctaccagaggacgtcttcccctgcaaagactgcgggatctggtaccgtagtgagcggaacctgcaagcccacctgctctactactgtgccagccgccagcgtgcaggctctcctgtctcggcgacggaagagaaacccaaagagacctaccccaatgagcgtgtctgccccttcccccagtgccgaaagagctgccccagcgccagctcgctggagatccacatgcgcagccacagtggtgagtgccccgtgcctgccctggccaagccaggccctgcactggactggtggtcaggaaagcttgctctgccaccatgtgctatgcagttccccgtccctccacagcctagcgcaaggcttacctgtggctatatgcacacttaataaaaggctgggtgtgtacttgacgctgggcggcatatgactgatgcgaactaaaagggccagtgttccttccttgtcactgggatccatctctgtgttccaggagagcgccccttcgtgtgcctcatctgcctgtcggccttcaccaccaaggccaactgtgaacgccatctcaaggtgcacacagacacgctcagcggtaggtgtgctggagggggccgggatggggtctctggggctaaacctgagccccaggaacctgaccacaacagtgtggcctacaggtgtctgtcacaactgtggcttcatatccaccacaagggacatcctctacagtcacctggtgacaaaccacatggtgtgccagccaggctccaagggtgagatctactcaccaggggctggacacccagcagccaaacttcctccaggtaagcagccatactggagcctcactggcccttggataagtgaaggggggaggggcctgtccataggcatcacatggtgtccttgtcaaccctagaaccccaatcccttctgcctaccacatcctacctagggcctgccctgggcctgacatgcagccctgtgttcttgtagacagcctggcaggctttcaacagcactcgctgatgcacagccccctggttcccgctgacaaggcacccaccccatcctcaggactggacagtaaggccgaagtcaccaacggagagaccagagtgcccccccaaaatgggggcagcagtgagtcccctgcagcccccaggaccatcaaggtggaggctgcagaggagcctgaagccacccgtgcctccggtccgggagagccaggtccccaggctccgtctcggacaccttcaccacacagccccaatccagtcagggtgaagacagaactgtccagccccacgcctggctctagcccagggccgggagagctaacaatggccgggacactctttctgccacaatatgtgttcagtccggacgcgggcacaaccaccgtccctacggcgccacaggcctcggagatcctggccaagatgtccgagttggtgcacaaccggctacagcagggtgcagggagctccggcgcagcgggaacacccactggcctcttctcggggactaagggtgccacgtgctttgagtgcgagatcacctttaacaatatcaacaacttctatgtgcacaagcgcctctactgctcgggccgccgcgcgcccgaggacccgcccactgtgcgcagacccaaagcggccaccggcccggcccgcgcgcccgcaggtgccgccgcagagccagacccgtcacgctcgtcgccggggcccgggccacgagaggaagaggcgagtggcacgactactccggaggccgaggccgcgggccggggcagcgagggcagccagagcccgggcagctccgtagacgacgcagaggacgatccgagccgcacgctgtgcgaggcctgcaacatccggtttagccgccacgaaacctacactgtgcacaagcgctactactgcgcctcgcgccacgacccgccgccgcgccggccacccgcacccacgaccgcaccgggacccgcggctcctgcgctgacagcgccacccgtgcgcacgcgccggcgtcgcaagctgtacgagctgcccgcagctggcgccccgcccccagccgcaggccccgcccctgtgccagttgtaccctcccccactgcggagctgccctcttctccgagacctgggagcgccagcgccggccctgcccccgcgctctctccgagcccggtccccgacggccccatagacctgagcaagcggccgcgtcgccagagcccggatgcaccaacagctctgcccgcgctggccgactaccacgagtgtaccgcatgtcgcgtaagcttccacagcctcgaagcttacctggctcacaagaagtactcatgccccgccgcgcctttgcgcaccactgccctctgcccctactgcccgcccaacgggcgcgttcgcggcgacctggttgagcatttgcgccaggcacacggcctgcaggtggccaagccagcggccagcccgggcgctgagccccgcacacctgccgagcgtgctccgcgcgacagccccgacggccgcgcaccacgctctccttcccctgctcccgagaatacgccttctgacccagcagatcaaggcgctcggacacccagcaagggcccgccagctcctgctcctgcgccgggtggtggtggcggccaccgctactgccgcctgtgcaacatcaggttcagcagcctgtccactttcatcgcgcacaagaagtattactgctcttctcacgccgccgagcacgtaaagtgagcctgtggggccgcaccaccaggacccttgacacttaataaagacattcggtgtgataaattcgctggaggcccagcctgttgtcttagatctagtgggcctcattccataccccagcttgtgcggccctgcaaagggcaccccaccgtttcctccaggacttagcccgctccagggattcaaccgcccctgcagagttcttttcctctgcctctagctcacccgctgccctgccagaaagtgcatccaattgcagactactagagagagtgaaaccttgttcttgctgagtcttcgagaaagaggaccaagtcccaaagtgcccctcccgtcacaacaggggtgggtacttatgactacagagttgggcctgggtataccccctgtagtccgtggctggccggctgtaggccacgtctggcagaaccaaagcaatggcagtctagccattgctttggcctctctgcttggtcccctgagaaggtgtgaacatggctgttctccaactctgtaagtcttaaccggcagctgtagaagctgacagagagccctgaaaataccataccccaaggacccgggccctgtcggccagtccacctctcctgcagccttctgaggcggcctgctgatggacctgggtttacacaagaataaatgttcctgagagtccattcacaggcctgcccagtctggagcatccctcctggtctcctcttaagggcccttcccagaatgccatgcatccttccaccttcctgatgctcatgcccaaggcctggcctctggcctcagtcactccataaactcctttctccaccttggcagagcagtctgccctcccttgcctttaccatgcaggagggacagggtctttccctggtcccactgtcggaagcccaaccctgctcagtctaccctgttccttagctatagggctctacagatcaccagctcttgcctaaccctcctgcccctcactctatggcctgcagttggtccctagtcacagaccccaaggtcagtcactatgagcctctgcctgtgtctccaaagtaaaccacccatgtcagctcctcgtgtgcagccgacaccatagcactgcttcagtcaccatcacgtgcccaggagcctgcttgctaagccactccggctccattcaaccctgcctggcacattcctcccttcaagatagcctcaggtcaccatggtctgcctcctcaccccggtgccctgcaggcaggacacccttcatctctccctctggtccctcttccaactctccactccgttgtatacttctgcttgccaagctgctgccgctgcggcttgatggaacccatctgcccttgtaccacctcacgatgcttggcccatgagcatccatgagaacagggaataacactgcccccagccactcacctctgccaggtgtacatcttccccacgcactgggattggtccatgggtaggaacatcaaggctcagtggtaccgagcccctgccagagcaccttggatagagttgggctttagcggagttggctgggctgccccctgccctggagatcttaagcatgacctccccaggccctgcatagggctcagctctgtccaaatccacccaaactgaccagggaacggttggaatgggggtcccatgcttcaggcaatggttcccctctgaagacttcatatacatgtcttattggggcaatatataccatccattgggccttttggggacccccatttagacctttctcccttccccagcagactgtgaccccacccaccccacccatcaaatcctgctcttgatttcaacactagtggagactcgggacagtagagggcagtatggctcacagaagcacctggtgggcctgccaccgtgcttagctagggtggcctgcccaccaccaagggtatgctacaatccctgaggaagagaaaggagtcatgagaaccccaagtgcaccgatgcctcccggacttctggagaagccctgcaggcctgagaagaaagctggaagccggaagccgagcatttgggctggaggcagaggtgggcaggtcctcagagcatgcttctgtatcacctgcctcagcatcacctgcagagcacactttctaggcactgggatttaacactctttcctaaagctttaatgtctgcacccctccatgacaggaacctcaacatcaccagagtgagccacactgtcaagttcctgttctcggtctgacggctttgaccgtaagctgcatgcttttgttaatgctgctgctgctgctgctgctgctgctgctgctgctgctgctgctgctgctgttttgagaggaggcagagttttgttctgtagctcaggctgacctagaactcacgacccccacacctcagcctcctgagaactggcattgctccttgatgctttattgctgttttagcatctaggtttccatggcagcatctagctgccttccctgagagcccagccttgtctctgcctgggctccagtggtccttctacagtgtggctcccactccggagacactcttctattcttgggactatgaggacacacaggtcctttgacctcttgctcccataggaaagatgtccccactctgcctcccacaggcagatcgtctgaatgtcactccaactctgccacgttttaatgtcatgcagagttttgcagggatgaacttgtatcatgtctgttctctctctctgccatttgtcttgcttccctggtctcccacgtctcctcttccacacctatcacattctctgggtggctcaggagcaaagcacccacagtgagttttcttctctgcctgttctgagtatttaattttactacactcctgcagcccctgcagacttttgtacctgcactctggatgccagaggccctctgtcgctgctgtagtatgggctcctgtggaaggctcctgtggctatttaaacagaggcctcaggctagtggcttaaacggtccatgtggattctatcatagtcatgatgtacaggagccctgggctgtcacagggagctgaaggacaagggtcggtggagcggttcctgccaaagactccaaggagaaacctgaccttgatttctgtagcctctagaatagcagttctcaacctgtggtttgacccttaaggggtcaaacgaccctttcactggagtccctaaggccatcagaaaacacagctatttacatgacaatttatcacagtagcaaaattacagttacaaagcagcaacaaaaatatttgttttggttgggggccaccacaacgcgaaaaactgtaggttttttattctcctgttgtaactgttgtctctgaggctcactaggcctaccctggaagtttctagcctccacacaatcttatctaggcctagaatgttttcagcctcggagacttgctgctgaataagctcacccttctagttctttctgggttctagctggctgatttaactcagctgttctgctcagaactcttttccaagctgactgactcagtctggcttctctctgagtctcctgaagtgctctgcttgggctcatactaactctggcaatttgtccaaatcttctgactcctcctcattctctggctccttctggcttcactggtgtctggcttgttccctttctgcaacctgtctctctataactgtctcagtaaacctgcctcttctctgcactgccccttaggtagcttccctttcctgtctctcctgagttgggggcagagcctattctgtcagatcttcctctgattcgtcactttttctgccactcaattagacatcactttcaaacattagtgcttccttctacaaactaactttaccttcactgtttgggattaaaggtgggtactaagggcgtgtctgtcttcctgtcggagagattaaaggtgtgtgctaagggatgagccacaccacagccagaaccaggtttttttcagtaaatacacaatttgggggttcacaatgtgatgaaatatcctgcaatatcgcagtattaggaaggttgagaaccactaccctagaagtttctacatgacttagctcgtggctcctccctcttcagagccagactctgctgtctctctcgctcccgctactgatcagccttgtcacccctcactagagagtctaggacagtttatcccaaagtcagctagggaggaacagctactctatgtcaacccagttcttacttgagatgggctatagacatcttcaaggtcactctgccaccccaccccaccccctctgaatgcatttgctgcattgtctgaggtggtgtcttagggttttactgctgtgaagagacaccatgaccaaggcaactctgataaggacaccatttaattggggctggcttacaggcgcggaggatcagtccattatcatcaaggtgggagcatgacagtgttcaggcagatatggggctggagaaggagccaagaaggcagctaggaggaggctttaacacacaaacacacacacagcgacacacttacctactccaaccaggccacacctcctaataacaccacttcctaacccaagcatagtcaaaccatcacagtgggcattggcgaacctagatgccctgtgcattgccattgctaaggctcactgtgctgggctgcagtccaggctgcacagtggggaaggggactgagctagagcacactgtgaagcccgggcactgtacaggactatacacccacactactggaggacactgcagtcacatatagagtccccattgccccatagggataaggccagtgtccccttcggtgtgtccattacagctacaggcaggcatgatgtgcagtgtgtgtgtactgacatctcttgccctactcagcattaggtcagactcatgcagcaaggccgtgacagaagtggacaggggtgtagctggcttgctgtggacagtgactttccacctaagctcgccgggacagagtcccagcagagtctgtgtacctagctgagtgtctctgctcttcctacccttgtcacagacactgtggctctcttcatccctcccagaatactcactggacaggacagggagggcatcaagggccaccttcctttttccaccctttatgccctggtttcaccccctaacactaaataggagagaaacaaggatagaagggagagaggaattgggaaaatccctgagtctgagatttttttcctttttttttttttttccttctttcagcacgactactaacaaacctcaaccaacctcaactcttggaacccaagcctgtatatacccttggaaaagttcccagaattccaaacatcacacggtcacagaatctatctgcagctggcaaaaccacgcccctgccagagctccaggtgaatcacagtcagctgctgtggatgatccgaagcagcctcataccccacacctgggattaaaataaaagcgagttcttaggatatttctctgctttttaaaataaccaaaattccagaattaaaaaaaaaaaaagtccctctagtctctcttccctgagtagaagcggggacagagaatccaaatccatccaggcagctgagctcacattaaacagtgttcagagtcaccgaggacaaccccagagacagctgcatttcttctgtgggtctaatcaaacacattaatcacagaatcccaagacatagaagccagctgggggctcccgtgagacaccctacttcctagaggaaattactgggtgtgttaaggacagacgtccccagaactccagggatggtggatgggcgtggccccttgagatgagggctgggtctccacagatactgatgtctccctgttcctcgacaggatgtgggtggcgagtgagaaacgggagctaagagcttgatctcacagagacagacctgcctcctgttcgtctgttgctgaatcatgtaccacagtgcaggacctggttcccagcccgtcctcacccattgtctaacacagactccagctcccgttctgaaagactcccctgggaaccctcttccctagtggagccctcactggcactgagagtcctgtcctcgccgtcatcagggtgacctgcattttcaggggaattctgccacattctctaaatcctctttcaggaccgatgctcacctcactgctgtgcaaatgacacgggtacccagcacccgattctctagcctagcacacctcgtctaccccagctctgcccatttgcacggtgcagtctccagatggagccccattctccaagagccacagcgtcttgaagcatcattcttccatctgcacagggtcccaagagtgccagcctcccagctgagagctcgattctcttggttgcatggggttccgccacacacaccccactccaaaatcataaagatggttgtgttctgatatagtaagttttagcatattccagaaattagccagcatctaaagttttccagggaacagagaacgtcggtccagtgttgtacaggggagcacgagctagggactccattagcgacagaaatacacagggaggtgaggcaggcttaggtcagtgacttggctctctacacacagtcctaagttccctgaggcacctataaaaatgactaaaaactgaggtgcttctctgcagatatgaaaactctaagtgtggtagatctgtgtcccgccccggagtcctccccagggacgcggatggggggagcagagcggggcgagggaggaggcggggcggaagcggttctccatcctgcctctctcggctcccagaagaccgggtttccttggtcctcgaccacatcactcctgtctctccctgtgagtctctggctctccatttccaactctcccctttataaggacatcagtactgaattaggttcagtacttaaagtccttaagcccacgactttctcagagactaaattcctggggtgggggatctgtccctcctcgccgacctccctcccctcccccgcccannnnnnnnnnnnnnnnnnnnnnnnnnnnnnnnnnnnnnnnnnnnnnnnnnnnnnnnnnnnnnnnnnnnnnnnnnnnnnnnnnnnnnnnnnnnnnnnnnnacccccgggccccacctgtgtggactcgcccaggcagcagtctgccttcatccccgcaggctctctcctgtgcctctcctggcctgcctcctccctgcctgcctcagattaggtcccacccactctgctccaccttcactcctgccttcattacacctgctgagcccttgttgtcaagaaagcagtagcctggggaagtgggtgaacgtggttcccgcaggacactacccaaggctctctgtgagccaggactacatgacccctgcaaatggacacttggcatgtcagctcagcccagcccacagcatggccaggccaaaagccagactatcacaagacctggggggggtggggggaggttggacattctccactccataccccagatcccagacaaggatatagacactaattcctcccctagcacagaaagccctcatgggacagagcctcagaatggtggtgagaacccagggggagcactgtgccctgaggacccacagtccctggaggtacaatggactgtgctgtggggatggggggtggtcccacaataacaggatcagaccggaccgctttgtctagtgggcatctagaaggaggtttcaccagctgctcaaggtctggctaagccagacatattaggctattgggggggggggtgataaactgtgcctgttcatggccccttacttcagtctcatcagggtgagaaacccagcatgcagaactgttagggttaatcttgacttgtttagtctccatttcccaggttcaggaggaaaaaatagaaaagaggctccaaaaaaggagggtcagggcagaaatcgggagaagaaagagtaaggaggtggggggggggtgaaaaaggtagaggatgaaggaggggcagggagagagggggaagggggtgcacacacagaattacagctgctccctggagcgctatctttagctctgtccccagaggcaagtgagcccctgcctacacaggggcaagcgggtcgcctgactgctggttcctcctcacttgtacttaatggagcttgtgtctgactggcagccaccctgtgccatctcctcagtgggtggaggcaggagagagggaggcgggcaggctggatgtggctctgtgaaggaaaatggggtcctttctcccctgcgattcacagtggaatagagtagggtgtggtgccccagggaaaggctaggctgggggcccctcactctccagtgatctgtagagcagcagagctgtaccccaaacacctgactgcaccccagaccgtctcagggcctcagccacctcaggtcccaggaagctgtactcagcctcagctctcaggcacacaggcacccagctgactcacagttaattggctaccagtggtttcacagcggtggatcggtcaccatgttcaacttcaaaacaaagtcaccaccccaaaaagaaatctgacattgaacatctctcccagctttctaaacatctgctagtcaaccctctggccccggaaagtttggggatccagacaatttactgcatgcagagtggtctcttgggtctggctttttcccctgagctccaaaggttcctgtcatgtgtgctgtggtcgatctcagtgcttcctgtttgtgactgaacaccactgcgctctggaatcttggttggcttcatcttagcaataaggacacagtctgtgtggccctgtgttgtcatctttcttggctattagtctgtgtattagtcagggttttactgctgtgaacagacaccatgaccaaggcaactcttaaggacaacagctaattggggctggcttacaagttcagagatccagtccgttatcatcaaggcaggagcatggaagcatccaggcagacatggtgctataggaactagaagttctatatcttcatccaaaggcagtcaggagaagactggcttccagacagctaggatgagggatttaaaacccatattggggctggcgagatggttagctcagtggttaagagctccgactgctcttccaaaggtcccaagttcaaatcccagcaaccacatggtggctcacaaccatctgtaatgaaatctgatgccctcttctggagtatctgaggatagctacagagtacttacatataataaataaatctttaaaaaaaaaacatatttacagtgacacacctactataactgaagtgcaggacctggagatggggcccatgatcttagctggtctagctgactttggtgatctgcaggctcagtgaaagactgtttcagagaatgaggagcgatggacagggtccaagtttactatacaccagtatgaatctctcaaaatatacatagaaaaaaaataaataaggctgggtgtggtagcacacactcaaggtacagatgtccacagagaactggaggccaacctgatctactttacaagttccagaccagtcagggctacaaaatgagactccaccacccccaatctcaatagacaaataagtagatgggcaagatggctcagtgggtaaatgcacttgctacagaagtctgccagcctgaggtcaatccctggaacccacagaagagggaaagataaaaaaagtgaccccaccgagttctctttgtgtgcctatgcacaacacacataggcacaacacatacacacacaaacacacaagaaacaaacttatacgtaaaataaatagcaagactttgaaaccttcgccatcggggaacgttggaggtgttgaggcctcactcccttagacacaaggaaagtctttagtggggacctgagttaagagccaagccagcccaccacatccccctcttctatataagtgtgcaagaagggtctgagcgtgttgaagcttgtggtgctgatcctggatccctagtcccta

SEQ ID NO: 474 - DNA, 3010 bp, Mus musculus
aggttccctcagagacatggaggccggagaagaagccaaggccatggacagcagccccaaggagcaggaagccccagacccagaggccccagccatagaggagcccccaagtccacccagagaagatgtgagcccacctgcagtgccggcacctccggagtccccagaagatcctgaggacatggaggggcaggagttggagatgaggccccaggatgaagagaaagaggaaaaggaagaagaggcagccatggctagtccctggagtgggccagaggagctggagctggcactgcaggatgggcagaggtgcgtgcgcgcccggctgagcctcactgagggcctatcctggggcccattctacgggagcatccagaccagagccttatcccctgagagagaagaaccgggcccagctgtgaccctgatggtggatgagagctgctggctaaggatgctgccccaggtcctaactgaagaagccgccaactcagagatctacaggaaggatgacgccctctggtgcagggttaccaaagtggtgccttctggtggactgctatatgtgcgccttgtcaccgagccccatggtgctcccagacaccctgtgcaggaaccagtagaacctggaggcttggccccagtgcacaccgacatccagctgctgccccagcaggctggcatggcatccatccttgctaccgcagtcatcaacaaggacgtcttcccctgcaaagactgcgggatctggtaccgtagtgagcggaacctgcaagcccacctgctctactactgtgccagccgccagcgtgcaggctctcctgtctcggcgacggaagagaaacccaaagagacctaccccaatgagcgtgtctgccccttcccccagtgccgaaagagctgccccagcgccagctcgctggagatccacatgcgcagccacagtggagagcgccccttcgtgtgcctcatctgcctgtcggccttcaccaccaaggccaactgtgaacgccatctcaaggtgcacacagacacgctcagcggtgtctgtcacaactgtggcttcatatccaccacaagggacatcctctacagtcacctggtgacaaaccacatggtgtgccagccaggctccaagggtgagatctactcaccaggggctggacacccagcagccaaacttcctccagacagcctggcaggctttcaacagcactcgctgatgcacagccccctggttcccgctgacaaggcacccaccccatcctcaggactggacagtaaggccgaagtcaccaacggagagaccagagtgcccccccaaaatgggggcagcagtgagtcccctgcagcccccaggaccatcaaggtggaggctgcagaggagcctgaagccacccgtgcctccggtccgggagagccaggtccccaggctccgtctcggacaccttcaccacacagccccaatccagtcagggtgaagacagaactgtccagccccacgcctggctctagcccagggccgggagagctaacaatggccgggacactctttctgccacaatatgtgttcagtccggacgcgggcacaaccaccgtccctacggcgccacaggcctcggagatcctggccaagatgtccgagttggtgcacaaccggctacagcagggtgcagggagctccggcgcagcgggaacacccactggcctcttctcggggactaagggtgccacgtgctttgagtgcgagatcacctttaacaatatcaacaacttctatgtgcacaagcgcctctactgctcgggccgccgcgcgcccgaggacccgcccactgtgcgcagacccaaagcggccaccggcccggcccgcgcgcccgcaggtgccgccgcagagccagacccgtcacgctcgtcgccggggcccgggccacgagaggaagaggcgagtggcacgactactccggaggccgaggccgcgggccggggcagcgagggcagccagagcccgggcagctccgtagacgacgcagaggacgatccgagccgcacgctgtgcgaggcctgcaacatccggtttagccgccacgaaacctacactgtgcacaagcgctactactgcgcctcgcgccacgacccgccgccgcgccggccacccgcacccacgaccgcaccgggacccgcggctcctgcgctgacagcgccacccgtgcgcacgcgccggcgtcgcaagctgtacgagctgcccgcagctggcgccccgcccccagccgcaggccccgcccctgtgccagttgtaccctcccccactgcggagctgccctcttctccgagacctgggagcgccagcgccggccctgcccccgcgctctctccgagcccggtccccgacggccccatagacctgagcaagcggccgcgtcgccagagcccggatgcaccaacagctctgcccgcgctggccgactaccacgagtgtaccgcatgtcgcgtaagcttccacagcctcgaagcttacctggctcacaagaagtactcatgccccgccgcgcctttgcgcaccactgccctctgcccctactgcccgcccaacgggcgcgttcgcggcgacctggttgagcatttgcgccaggcacacggcctgcaggtggccaagccagcggccagcccgggcgctgagccccgcacacctgccgagcgtgctccgcgcgacagccccgacggccgcgcaccacgctctccttcccctgctcccgagaatacgccttctgacccagcagatcaaggcgctcggacacccagcaagggcccgccagctcctgctcctgcgccgggtggtggtggcggccaccgctactgccgcctgtgcaacatcaggttcagcagcctgtccactttcatcgcgcacaagaagtattactgctcttctcacgccgccgagcacgtaaagtgagcctgtggggccgcaccaccaggacccttgacacttaataaagacattcggtgtgataaa

SEQ ID NO: 475 - protein, 972 aa, Mus musculus
GSLRDMEAGEEAKAMDSSPKEQEAPDPEAPAIEEPPSPPREDVSPPAVPAPPESPEDPEDMEGQELEMRPQDEEKEEKEEEAAMDWSGPEELELALQDGQRCVRARLSLTEGLSWGPFYGSIQTRALSPEREEPGPAVTLMVDESCWLRMLPQVLTEEAANSEIYRKDDALWCRVTKVVPSGGLLYVRLVTEPHGAPRHPVQEPVEPGGLAPVHTDIQLLPQQAGMASILATAVINKDVFPCKDCGIWYRSNLQAHLLYYCASRQRAGSPVSATEEKPKETYPNERVCPFPQCRKSCPSASSLEIHMRSHSGERPFVCLICLSAFTTKANCERHLKVHTDTLSGVCHNCGFISTTRDIKHLVTNHMVCQPGSKGEIYSPGAGHPAAKLPPDSLAGFQQHSLMHSPLVPADKAPTPSSGLDSKAEVTNGETRVPPQNGGSSESPAAPRTIKVEAAEEPEATRASGPGEPGPQAPSRTPSPHSPNPVRVKTELSSPTPGSSPGPGELTMAGTLFLPQYVFSPDAGTTTVPTAPQASEILAKMSELVHNRLQQGAGSSGAAGTPTGLFSGTKGATCFECEITFNNINNFYVHKRLYCSGRRAPEDPPTVRRPKAATGPARAPAGAAAEPDPSRSSPGPGPREEEASGTTTPEAEAAGRGSEGSQSPGSSVDDAEDDPSRTLCEACNIRFSRHETYTVHKRYYCASRHDPPPRRPPAPTTAPGPAAPALTAPPVRTRRRRKLYELPAAGAPPPAAGPAPVPVVPSPTAELPSSPRPGSASAGPAPALSPSPVPDGPIDLSKRPRRQSPDAPTALPADYHECTACRVSFHSLEAYLAHKKYSCPAAPLRTTALCPYCPPNGRVRGDLVEHLRQAHGLQVAKPADGAEPRTPAERAPRDSPDGRAPRSPSPAPENTPSDPADQGARTPSKGPPAPAPAPGGGGGHRYCRLCNIRFSSLSTFIAHKKYYCSSHAAEHVK

SEQ ID NO: 476 - DNA, 57019 bp, Homo sapiens
  misc_feature (1)...(57019): n = A, C, G or T/U
tggtgcctcaggccttcgctgcggagtcagcatgacagggaggccttttcacttgcagggcagcactgtggggtcgggaggggccgccctgactgcctcagtgtcccctgctgtagaatagggtagcgggtagcagggagggcgcccacaggcccccctcgggcccgcagagctcccacactctatcagtggagaccacccacgcagtggcagggaccattgtgtacctgtgggacccagttggccactgggcaaacagggtgctgggcagtcctcacaccagccccaagaggggccgagatggtgacccaagtctctggaggaggagacccagcccggggatgcaggacgcatccaccgtcatgcggctgggaggtggtggagctgggtttaggcctggagttcatagacactggtttgatcgccaccccaagggtccctgtccatccctgcggtgttgagaggggttagatcatcctcctgttctccagacggagaaggccctgggggatggagcctggcgccgggaagggccgggcccctgaggccggccgtggtttggggctggggcacacccccgagcttcctgtgctgtgtgcatcctcaggaccaggcggtgccctatcggctcccgcagatatgaatttctgtgcagtgggcggtgatgggctgatacgcggccgctggccaaccgctgcagtggctacggcctatcagacccacacaggctgagctatcacccgcggggaagccaaggaggctctgtgggctgttatctctcggggcggcccgtgcgtcgatggccagcagggtcagtggccccaagggcagtgcccagccaggtgaccggtccagtggccagggcacaataggggatcagccacatttgccctgctcctcctgagcatctctgccttctgtctccagaccctctctctgatgctccatcttgtgtgagcccctctctctctccccatccctcctcgccttctccctctctcccttcctctctccctctctctttgccgttctccttctctcttcctccctccctgcctctctttctctctctctctctctgtctctctccatgcctctctccctcacccgtctctgcccctttctctcccaatttctgttttatggtctctggcccacagctgctccccaccccacccaatcccaagggtgggaaacagtgcaggccccagcccttctgaacctgccccagcccctctgaacctggcctggggccctgttcttgaggcggcctgggaggtgccgtcctcctttcctatctggggtggagggagcaccagctcggaccaaggggcactctgcaccttgtggctttggggaggtgactgggccctgagtctgtttcccatctgtcctgcatgtggatgggacccggtcacgctgcagagcccagagcccagggccctcatctgctggctggacccggactcacaggtatcctgggaaaccccccaaccccgaccccggttagacccatttcccagggaaagcgactgggacttgtggacatccagaaggtggacggtgttagcccggcggagaggcccggccttggtgcctctcccaacagctccaccatgggtccagccaggctgccctgtccctggtggtcccagactccctggaggcactcatgtaacatcaggcagagaggaggcctcccagcccctctccttctcccaagggacacccaagaggcccccaacacccgctgcacacataagtgagttcctgggcacacaaggactttgtaagcaccggagagctgtcccggggagcagagacctgtcccagggtgtggggagctgtcccagggagcagagagctgtcccagggtgtggggagctgtcccggggtatggagagctgtcccggggtatggagagctatcccggggtgcggagagctgtcccggggtgcggggagctgtcccggggtgcggggagctgtcccggggtggggggagctgtcccggggtggggagagctgtcccggggtgaggagagctgtcccggagtgaggagagctgtcccagggtgcggggagctgtcccggggtggggagagctgtcccacggtgaggagagctgtcctggggtgcggggagctgtcccggagtgaggagagctgttccggggtggagaaagctgtcctggggtgtgggaaattgtcccggggtggggagacctgtcccggggtggggagagctgtcccggggtggggagagctgtcccagggtgcaggaagctgtcccggggtgcggggagctgtcccggggtacggagagctgtcccgggctgcggggagctgtcccggggtggggagagctgtcccggggtggggagagctgtcccagggtgcggggagctgtcccggggtggggagagctgtcccggggtggggagagctgtcccggggtgtggtgagctgtcccggggtagggagagctgtcccggggtacagagagctgtcccggggtgcggtgagctgtcccggggtgcggggagctgtcccgggttgcggagagctgtcctggcatgcacatggccattgtcttgacttcccatgatctcctggccctgttactgcccccaccccagccccttcctggccctacctgatacctggtggtcccagagccctaaaaaggatcagggaggcactcagtgggtgctggtttttgttttcaaaagttctgagctctgtctgctgcgagcggctttgctctcgagcgccacggcttcaaaggagggcaccttgagctgttctgagacgggagcacaggccctatagtccagcctcgctgagtgacagcaggcaggccgcctgacccctccaggcctcagtttccgcatctgtaaaatggacataaggaaagccacagccgcaggaagcctccacgaggagggggactgcggagtgtgtagcgcagagtgtggctggagtcacttcccagacctcggctgcaggccttgagcttgtcggctgccccggggcggcctgggttatctcggattggggggtgcgggcaggttctacggggagaagccgccatctgcaacctggaactcccctttccgcggccaagaggcggccgagcaggggccgggagcagccaccttgcgctcccccgtcggtggcagtcaccatggcctcatggcaggaggagctcaccccccaaaccccgttaccctctcagcaccagggaggcttccaggtggaagccggaagggatccaccagtggggttgttgcagtgcggccccgctgtccaaagcaggacgcccggccggggtgagaggccgcgggcagagcctcccgtcacagggaccaatcacaacacaccaaaccccgccgtcaccacccacagcaaacccaggaagcgagggggaaacagggagggggctgattccaggagggggtgtccgcgggcctccagggtgagtcggggccctgcagtagggagcagagggtgcagtagagggcgcagccctgcacgggcaggaggccgcagggcctgagtggggggcgaggcgggcgtggacaggcaggagtgcggcccggtcactgggcctgtggccttggactccagtgaggcagcaggaggagccggcaggaggagagaagggctggggtctgagcgtgatcccagaagtggccacagagaagggacctcgggtggaggccaccagggcctggactccctcctcctccctggagccaccagcccggatgcgaagggaaggatgggcggcaggaggcggagagctcctattttatctttgaaatgaccttgtttgccggaggggcggctgcttaagattctgctatgcaaatggctaagccataatctataatccctgcacgcgctcgggagcagctcggccgtggctcatcctgcaggcccgtcccatcgtgggatgtggggctgagtcctgggcatcccactcctgcctcggaaaatggaggcgctcagacgtgccagccccactaggacttggaggggtggagccggggtcccattcgactccctggggtcctgggctggcccatttcacgggccctgtgtggtcgtctgcccagagagtaatcgtgtaggctgggccacaaggaaacaggtgcaggaaaaggccgaagagcgtgggggctggaccctggagtgtggaatcccctcccctggaacaggcctccgccacctccctctgtgaggctgggcagaactgaggggaactgggctcagaggaaagcttctcgcccagggctacctggggcaccgaggaggcctcacttgtccgtccttcctctggccccctacctgcccacctgtgccagtgcagaggaggtgcctggtctgctgggtgggcagagagcgagtctcccccagctctgcctgtgtctgtctgggaggcagcgtggtgcaggcaccgagggtgggaaggatggcctgagacctgacgctaagggcaggaccgtgccaagggtgccatgctaggcggggagtgaggaggcggcctcagaggcccacaggacttgcccaccactctgtgtgtgtgaagtaacatgagggaagccggggctctatggccccggatggaaggtgagtggccaggagcccacttgggggccagggtggtggggttcccttcaccaggaggcgtctcggggcctagagctttttcctggtaaccaaatgtatgaaacaaaatgcaactgggccatggggaggggggcatgctaaggcaagaggagcacaggggtccgcctgtgaggtgggagctggggtggtccagggcaaagcgtggccgcattgcccacaggctccggggcaggctcccagcagtgactcctgcggctctcacctgagcctgggctccatgtggccccacggccatccttgggcagggcaggacactccatcccagagtcctctggagccgaaggaggaggcttccagagggcacctggcagtggcatccactgcccttgggtgtcagggagaattttcctggtgggctcagcacacatcccctgcctggcctcctggaagggttttccatgaggagggaccagcctgggcagaggtgagaggcccaggatgtgacagcggcggggctggctttatcctgagagcacagggctgggggttccaggctggagcctggccttggagacaggctggataggagagggagggcagagtggggctgggttggtgcttggggacctgacccaggtgcaccactgaggctcagccctggcctgtgcagttcccgggcaagcaatcctcatgaagcccagaccccgccccacccccactgactccaggggcaaagtggggcctgggaagctgggcctttggtggaggagaggcctggggtaccctgcggctgagattgaacaggggggctcccctggaccctgaagcccccacctgggggcttcaggctgtggaacaaaagtccccacctgccctggcccagggtgggccacaggggagagaaagcaacagagagggggcttggggtggggacggggaccctcacccacacactgctgggcatcagagcacaccagcactggtcatgtacacggggcttgaggagatcgcctctcactgggcgtttcctgtgaggggggctctcgactcctggtatacagggtctctcacgtctggcagccagtcctgcaggggaggtctgagttggatcccactctacagttagggaaacgggggctcagcaaggtgaggtggcttcgccacagcggtccaaccctgagtggacatggggctgggacttgggcagcgctgcctgtgggtggggggctgccaggcctgcccctgcccaggagccgcacacacctgctcctggctcgctccacccgtaagtgcctcaggacctggagctctcccaggaccactatggacaaggtgaattccagctgatcacacaagtcgtgacttttccatccccactccatcctgggctctgatggcagagatgggaaggctggccatgtccccagggcactgctggccagtagaagggatgcccgagtgtcaggctgggtgtgagagatgggaggggcggcaggtggacggccccagccccagccccagccccagccccattccaaggtgtgacagacacagtagagtggggtcgggtgtgcacaaggagctggctcagggcctgagtttcaagtggtcagtggtggctggaacatcagggcccgggcggggatggggttcagaggggtcagggtggggctcagggcctgggcggggatggggttcagaggggtcagggtggggctcagggcccgggcggggatggggttcagaggggtcagggtggggctcagggcccgggcggggatggggttcagcggggtcagggcgggggctcagtgccagggactgcaaggagctgcctcggttttcttggctgtaaaatgggtatcctgaagggttttgtggggggtgttcgtgccgtgagcgatccggtccagcatcccggcgctgggagccggcagctgctgtgaggcgggaggagggctctgtccactatttcctgcctgaggcccacgaagggtcccccgccccagggtcccgacagggcccgcccgaggctgggaatcctcacccgagtgtgtgagggcgtcgggctggttatctgggccgagctccatctgactaatctcgccggcggagcgtctacgcaaacctcaaggcctgctatcgggtggaggctgaggcgggggcccggcctgatggacagcagggagatgggccgataggcgactggctccctccccacccggtgtgcgtgggtgggaaatcattccagctattctgccttatcagcggccctgtgctgcccccgatagcactattagtcttagattaacggcggaggagggggccctggcggatggcaggggtcagcctggggtcagctccagagaccagacccagtgctgggtcaggagccacctcctctggctgtcctggggaacacggacccacctggggggtccccagagggagcctcagaccccgccccacttcacagctgggcagagggggccctggggagcccgagacagaacccgaggaggggctgtgtgtctcgcagccacgccccttccccggaggtttgctgagcactttggggccaggcgcatatcaggtgctggatagacagggatgggcctgccctggacgtgtatggtggagggacacgggccctggaaccagaaagaacatgggtgtcctgcccgggagcagttaagagaaggaggtggcatgttcattcaaccagcgtgtgtatgagggacgtgctcaggccagcatagcccaggccctccgggatctgctccttggtgagggagacaccccaaatcatgacgaggtaggaaccccacatgtccgaggggcaggcagagccggcctcgctgagccgacgtttgagttccaaatgaacgaggggcgtctggaaacggtgtcccaggccgagggcgcagtcccggagccgggggcacccctctaatctggagtgatcgcaggggtgaggcagcagtcagctcagagcctgaggccccatcacattgggcctgcggctgcagagggtggttatcttggaaactgagttcagaggtcgcaggctctggctggcctgaccctgggtcgttggcgtggacaccttggctgcccctggccctgagccttcccatgacacccttccctcccctctcccaagcactggccccaggcctgggtgggggctgcacccgggtcctgcctgcaccaccagaccccaggcctgcctctccacgcaaggccctgtgggcggagcccctggacagggttgagcttggggccagagccatctgcagcccccgaggccggctccccttccttcatccccagctccccaacggcccccgtggctcccccatgaccaggctgccggcaccctggggcctggctgacctcccgcacccaccccagccctggccatacagaagccgcctcctgaacctggccctgacttcagcctccaccccgggaaagtcacctgggcctcgaagtcccgaaatcgcaggcagagccggcactcactcactcccttgtacttccatttattgagcacaagctatgtgccagccctgtgatagacagggggatgcagcgtgaggaaaacagacctcctccagagcagccgcggaggagaagagagcagtcgtgggggccgcgcagcgggtgggagacgcaggccagggcagaggaagccgggtacagaggcctggggtggggccggcccagctgactttgggagcagcgaaggggccagggggcaggcaggaccgcgcacgtggacagggcggagcctggtgcctagcaggctggacacggagcaggtctgcgtgcagtgtgggggaccccacctgggtggcccctgaatcccgctggctgggtggaggacggctcaggggcagacagagggagatctgagaaagggcttggctgaagtgggcagtgtccccattcacagatgggaaactgaggccaggagaggtgaggtagccaccccacccccatgctggggaggggccgagtgggcacagagcccacaggcctgcctcccagggaagggcccaggcccacccatccagcctctccgggtccagcccccaagtcccgtgggctccccggcccctcctcggccccatgccagcagagggtgagcggacagtggatgccccatgaggagcgcagccggagccctgggtctccagccatcctggtggttggggggcgggggccgggcctggctgcctgccgtgctgccctctggcctcaccaccttccgggagaggctatctgtggccagggcagcctatctcggccgcaggcgctaatcaagctggcttcctcctccgccctcccacccggcttcctgccccggccatcccccaccaccagcccccacccaggccccgccgttgccctaccggcccctcccagacatctcgggggcaggcccaccagagtcacctgggcgagcccctggagccccggctactgcccagaagcttccctccttgcccctcctgggcctgccgcatggccggggacacagccagctccccccatgagctggtggcctcgtcaggaagacggccacagggcgctcttgggaggacccttgggacagtgggcaggcgctgggcaagccacaagcgtgtcgctggcagctgctgccccagctgcccttgttcccaccactacacccgtgtcaccaccagcgtgggcaccgtgactgtcactagcacagaaacagcgctattagagagtgctgctgctggcctggccgctgtcaccttgctggtgctgtcgctgtcactctgggtcattctgtcaccttgctaggactgttgctgccagcagtgctgttgccgttactggcaccaaccctcccgctggcacaacggcagactcagcttccaggtgtcacctctctcaccgcagacctggggcctgttgtgccctgttctgggctcagggtcctcatctgtgagacgtggacaggacagttcaggctccctggggctgctggggcagggcagggcccacagtttctctttcccagcaagtctgcgtggtcagctcggatcttggccaccctgggctgagccaggtcctgggcacagtgctgggtccctagacggcacctcggtgtcctcacctgaccgacaggtacagcgggccctccctgtgggggtgcagccttggctggggatatgtcagggtctctaaggctggcccctccccacactggcctgacttctccacctcctcctgcccaggagggaaactgagacaccactgctggtgatggaggtagcggtcatggatgcgggggccctcccgcaggtgctggtgatgatggagatagcagacatggatgcgggggccatcccgcaggtgctggtgatgatggagatagcagacatgggtgcgggggccctcccgcaggtgctggtgatgatggagatagcgggtgtgggtgcatgggctctcccgcaggtactggtgatgatggagatagtgggcctgggtgcgggggccctcccgcaggtgctggtgatgatggagatagcagacatgggtgcggggccctcccgcaggtgctggtgatgatggagatagcagacatgggtgcggggccctcccgcaggtgctggtgatgatggagatagcagacatggatgcgggggccatcccgcaggtgctggtgatgatagagatagcagacatgggtgcgtgggccctcccgcaggtgctggtgatgatagagatagcagacatgggtgcgtgggccatcccgcaggtgctggtgatgatggagatagcgggtgtgggtgcatgggctctcccgcaggtactggtgatgatggagatagtgggcctgggtgcgtgggccatcgcgcaggtgctggtgatgatagagatagcgggtgtgggtgcagggcctctcccgcaggtgctcttgatgatggaggtaacgggtgtgggtgccgggccctcccgctggtgctgatgataatggagatagcgggcatgggtgcagggccctgccgctggtgctggtgatggaggtagtgggcgtgggtgcagggccctcctgccactgctgtttgccatgggatcaaccccagcccgcgagggggctcctgggccgatgagcaaactgaggcccagtgagttcacgtggttcatccgaggtggagaccaggccggtgagccctgacctcctgaccccagccctgcaaacgccccaacccatggtttaacactcctagtagctcctccacccccgacgcggctccacccgcccccccccatttatttatttatttatttatttatttatttatttatttatttatctctcctccttctctgcgtgtaactttttatttcctcactgcgcttttccattacagcggccgtggacgcagctgataagatcggtccccggagatgggacaaaggggccgccatcggctcgagggctggtcatatcctgcccgaaagggccgagcagggcctgagatgcggcaagatgctatctcgggtttattgcgtctcgtgagggtgcctcccaccccggccccccgccctctcccgccctgcccaggggcccgggcgccgggcactcaggacccacctctgccccataggcctgacgcctctgtgcttgcccctccatgtcccccaaccccgtccctgtgccctgtgggccgcccggggccatggacagggtctttggccccaggttcccatctggatccaccctggagtcactgtaggtcttgggcttgtccccagcctcccagagccccactgtcccttcccgtccagtgctgctggaggcagtggccttggtgaccccccctagccgagggtccccacctcgcaggtcggagccacccggtccgggctgccccagcgccagcagctgctgcttcccttgactcagcagttggctcctgggaatttatcccagaaaaatcatcccggcatgggcgggctcaggtcagcatgtcaaagatggcaagccatttatttttttaaatttttgctgtcttgccacgtttcttccagagaaggatgttctaagggcagcagaggccacgtggatgcccgtttgtgggtctctgcacacacggtggccggacggcagatccggggctgccctcagagcgctcgccacccccacccgcctttagctgtcgttcctccaaccccaccagccatgaaggcccctcagggctggaaggctgtgtgcggtctcttcggcaggtgggaggtggcaggggcgctgctccgcggggcagggtgggtggatgagcacggcgcccctgggacaggaacccccactgtagcacagtgcttgattcaggggccagtggggacccccgtgggtcctgagcagcggcacaggggagggagctgtgtctggggggccacggttcctgagtggagggatctgtgtctggggaggggcccacggttcctgagtggagggatctgtgtctggggggcccacggttcctgagtggagggatctgtgtctggggaggggcccacggttcctgagtggagggatctgtgtctggggggcccacggttcctgagtggagggatctgtgtctggggggccacggttcctgagtgcagggatctgtgtctggggggcccacggttccggagtggagggatctgtgtctggggggcccacggttcctgagtggagggatctgtgtctggggaggggccggcctgttctgcctccagggctcctcctgcttcctggtctttcccaccctctgcctggcctgcatctgactcacagccagctgcctctctgtggagccaggtcctctctgacctcggtcttctcatctgtgttggggtgatcggtgccatggcagcaccctctgtggcttcccataaaatcacacgtgacttttagaagaggagacacattcacagttcacggaagcaccttctgcctccgggactcacatggggctgggctcaccccggggcacaggccctgtaccccagttagcgcctcgggctgccaggcagatcttgggctcccgaggcctcagtctccccctggttagcacctcctctgtggaggtgacgagcctgaagggtcagtgagggctcagggcagcagccttttctggaagggacttttccattcttgggggtagcagtgtcctgacactctcggtgggtaccagcgtcctcaccagcacctgcctgggtgtccatggctgccctcagtgggggtgggtgcctgccaggctgggtagatggtctcgcccagggctgaggcagtaccctgggccctcactcaccctctcccatttatgaagcacagacagagtccccagggggcaaatgaacaggctgagcagggacctggtaggaagaaagggccctcagcggcatccagaccctggaaaaacggggcagaggccagggcgcccaggccgataggacacagataaggtaaagaaaatatgttctgtgcaaacagcttatctgacatcctgttttcagccaccaataggacaaggcaaggctggggagagccagggacccccaccccagttctcaggcctcagggtccccaaagaccagactactaggacctggaggcaaatcagctccctctccccacttcccaggcgggaagaccaaggcccaggacccagggtgtttagccttccagaagcccagagaggccgccaatctcccagcttggaggtgacatgaggctgtggctttcagactcctcagccctggggaggtgccgcagagtggcagagacaccgcccagggtgcatggagaaagagcacctcgctgggccccgtgcacagaccccttaagggtacatggagggacatggcccccctgtgtaccgtggcgctctgcctgccagtccagctgccccagacggggccaaggtagtggtgtctgagaccacagtccccagagagcaccatggaaggggttcagacaggcaagacctggctccgagctgtcctcaaggcctctgaaagggcagttctgggcctgagcactgccccactgcccctgtggggccagggccttgccctttcccttagagacaccccctccccaggacaggccactgggcctgcaggtgcgagggcccccaggtccctgcaggagagctgggccccaccctgccctccttgctattcccaggcggtcccagctctgccattagctggggccagggttcagcccgataaagatgggctgttgttctgtgtcaaaaaatcaataattgcagcgatgttccaggcgataggaagacaagttcacaggcaccagctggcgggtgggcggggcgaggctgggggctgcagcacctggggccggcccttcctgcctctccctcgcccggtggctgacgcagctgctctacagtggacgccaggcccaggcttggccaagccaagccatggcccctgagcctgctgctccttactgcccgtttgtggaagggcagcccagagccagctagggcctcggcgaggaggccagtccctccccagggtcctctggctgggtcttctcccaggcggtggtgccctcctcctccaaacacaggcactcaggtccacggtgtcccagtgccttggggacacagccgttcaacagccggccctgaggggctgacagtccagcaggaagacagagttaatgaaatcaagacctctgccccctggtgccctcaggaggtggtgagcactctggggacctgggaggcagggaggaggtgggaggggccggcatcgccctccgcacgacggcttcctggggtcctggcacggtgccatgtgggctggccctgaggcatcaccatacctggcatctaccattccctggagccagcaccccctgccgtcagctcccgggaacgcagcccatgccgcctgtctgctgaccccacccaggccccctgcgatgtgggtcctgagcacatcttggcaaggagaccaccgtgctggtgggcgggtgcttggaggatgggcacatagggcacgaggcccacctctagcagagagagagcctcggcaggtgcagccgccggcagggcccccccatggggctttccaaccacgtgctcaccccaaggacaggcaccccccgcacccccagccccccacagccatccacagtgagtgcagggtctgagggtctcaggaaggcaggttctgtggttcgaagccctttgttaacctctggcctggggtgagaagaaaaccctcatccaggaggcctggggctctaggccaaccccaccctgggctctccactggcctccagggtgctctgaggtttgtggcccagcagaggccaggcatcatggccaggaggccaacaggggccatgccaggcagaaggcagaggagaccagggcaggaggtggggagaccaggggcaggggcagggagaccagggtagggttggggggcaccagggtcagggggcagggagaccagggcaggggtgggggggcaccagggcagggggaccagggtagaggagctggaaccctcccaggaggtgatgggcctggggtcttctagggcagggcgctggggggccttaggcaggcccctcctttgtttcccctcagtgaaatagactcaggtcttgtgctggggcttaactgcaatgctgggcacacaataacacagaataatccagaaaggactgaatgggggcgggcgggcagggcaggttgtgcactgagtgtgcgtccgcagagtggtggccatcactgggtgtgcacggggcacagctctgaggagcagagccatttccccagtgtggccagagggcccagacgtatgtgacatctggtttttcaacagcaaagctgatccatttctctacccatcctgggtgtgcagctcccaggctcctctgcgcctctcccagacccagccctcctgcaaggacctggaccctctgaggggcgctggggggacccaggaggaggcagggtgggagccctcatcaggcccccagaagccaggctaatctgcagagccctcgagtggctttgtctccaagctctggtgcatccatggctcccgtcacccgcgtctcatccgcctgcggctccgtctcccttctcgctagcgcatgtcacgttgttccttccatctcggctgtcccgagtgccacagccggggccactgctgcgagtgagggctacggtcctgctggcctttccaggtggccttctgcctgctccgctcggcgactcctatctgtgaacggggaaggggcttcacggagggcccactacccaaggggtgggattcactgcaagtgggggtatggcctgggctgcagacatgggtttgcgatcagaggacctgggctcgactctcccatgccacttgctggctgtgtaacctccgacgtggcccccagcttctcaggccttgcttttcacagacgagagcaggagaaacggtccccatcatcccccgagctcttggcctcaccccctcagcaccatgtccccgcctccagagctcagagatgggaagctgaggtctgcccagaggtgccatggccatcagtgacccagccagggctggagtcaagcctgggtccctttatgtttcttgacttggcattcaggtgtggcttgatccagggaacacactgactgactagtgccccatggctctggtctcctggtcctagacctgggctgcctgggtgtgtcagccttctccatgccctggcaggttggctggacggggtatgactcagaggacggtgctcagccactgtccatagcctgggttgggtcttgtggattctacaggcctgagaacaccagcccccatgggagatgccatccagctccggcagatgtgggcctcggggagaagtggcagccctgaggggcccgcatggctgtgggaaaggccccctgcagagagccagctgcccagtgtaccctgacctcacccatgcacccaggcattcggatgctcacaagggacccttgtgaggcccctctgcagatgggcccagccccacagccctcctgggaggatacccttccccaggccatcctgggctccactcgggggcctccagcagccactccctcctctgggccttggttgccccatctgtaaacaggaacctaaaaaggggatcacaggaaggggcccagtgggtcgaggatgtgtgaagaagttgctggtgggccgggcacggtggctcacacctgtaatcccagcacttggggaggctgaggtgggcagatcatttgaggtcaggagttcaagacacgcctggccaacatggcgaaaccccttctttactaaaaatacaaaaattaaccgggtgcggtggcgcgcacctgtactcccagctactcaggaggctgagatgggagaatcgcttgaacccgggaggcggaggctgcagtgagccgagattgcaccgctgcactccaggctgggtgacagtgcaagattctgtctcaaaaaaaaagaaagaaaagaagttgttggacccccagcctcgtcccccatgcatttctcaccaggcttgggtttgttcccagccagatcttgggaggatcacatgtgaaggaggccatgacatccacacaggaccaccctttctactgcccaagaggcttccgtggctgcagagcaggccacagagtccaaccacaggccttgggctccacgtgggttcccctggtctctcctgggcacaggcccatcccgacgctcactctgaacctctcccagatgtggccttcggtgcctgccgtgggccctggttggtgaatcctgggaaccagggctctgcctcccgtaggtggctgcagcacacagagccagggcctgctactgaggctgcagaggggacacagagtttgcgcggaggtcacggggtgggggaggagctacttagcctcccccctccccttctgtcgcctctctctgtcctggggcctcagctgccacccagattacgggcttttccccccaggagggtctgactttggagccggtgaccttgggcaggtcacctcaccccctgttaaatgggctccaggtcctcaggggccccgcggggtttgcctgcgtgggaaccaagcacaggtgatcagcaagcgaatccgcacgcggcgcgtcatcgtggacagaggggccggcttgccccgccccacgcagctgacccctggccaccccggtctgcctcccgtgtgaccctggggagccgctcgcccctctggcctcggtttctgtgtctgtacaggatgtgttggaagctggtgttctcggggcccacgtggtctgtgcaccagcctcaccgccagtccgctgacccacagaggcttccagaaccccgtcagcctggggtttttccttccctccccctcactcctttttctttccttttttgtgacttttatcaaaagcaaacagcatgatccctgagacagggccgctcccaacaaagctggacccagctggcctatgggagccacagggcggggccgggcggagcgatggggccgattagataagtgggtgctggggtgaccccacggtgggcaccaaccacagagcccaccatctggggtggctggactttgcactcccgagactaccagccattaggcacacagggaggctggcccctggaaggcgggaaggccagctgtgtgcaggaggggccccggttcccggacgtccgcagactcacagggtgacgccttcacctgcctcctcaagtcagagctgtgagccagcctgccagggccagggctcaggtggagaaacaggcctggggaggcgggcggctgagcagagtgggttcaggagcaggtggagaaacaggcccagggaggcgggcgactgagcagagtgggttcaggaggcagaagaccctgggtgtagccttggatcctctgtcagagagcagcttcagggtctggtctcgggagcaactgccctccctgctatgtgacccccagctgcttgctggagtctctgggcctgtgggatgggagcagacgctcctctaccggcttgctgccacacgcgcgtcacggagggggccacggttcctgcgctgggcactgttggccacgttgttgagggaggcgacaggggcctctggggcctcgggggcagagccagagcccaggggtgaaggccaagtcccagggggcagccctgggctgggccccaggccttaggatgcccacctggtgcagcttctcagcccatctgggcagctaggagagagagaatagtgctggctgcaccggcagacacaccccctaacctcacggcacgagcccgagggaacgtcatgctggcacccccttctccatatgggtaaactgaggctcagagcacacacaaccgctggcaagctgggcagaggcaggacttggccccaggcctgtggattccaaaccccagctctccctccccaggcacccccaaaaggccctggaccctggccagacccaccgggctcccctcagccaggttccccactctgtggggttggctcagccagcagcgccaagctctgcctggtcctcggtcccccactgcttccatccccatggggtgtaatcggagggctttaagacccatgtggacctttcaatcatataaatatgcaatggctggaacttctcatttggttcctcgcagatgcctgggggtgaaattgaatcccagcacagcgtgtttgttctggaaatggcgtgtgcagtcttgtttgcctgaataaattagtccttgtcccagtgctgtgcctgtagtggcggccccattcccctggctgggctcacccatgcggcctaggtcccgccccctcctcaggagacccgtctagagatggggaaactgaggtcagagcaggaagagtcagccacggggccaccagccgctgcctcccacctcagctcagaagagccctggggctctggttcaaacccacccacccactgcctacccttgggccagttgcttaacctctcggatctgtctcccccatgtacgttgggaggagtaacttgagcacagctggaaagaatcctcacaagtcctgctgggcctggctgaggctcggtccgtggggcaggtactcagttgggtccgtggggcgggcactcatgttgggttcgtgggtttttgggagccacagctagcgtccccattcttcagctgcagagacaacctggccggagctggcatctctgctgggctcacccagttgttctggagctggggaagaggaggcagaaagaccagtcacaggaggctggcagggaaggacaccaccccctggaagcccaccctgacaggcccgccctcagagctgtcggtgccggtgggggtgtctggccactgcctgtgttttctgggagccccaaggccaaggctgtggcatgcctgttgctgccccaggtgccccacagggttttgtggcgggacaagcactgagctcacggtgggttctggtcccacctccagccacagctcccagtgtggcttgggcactcctcagcctcgccgggccccaggcttcctggtggtggggttgggtgctgaccatctccatgggtgccactgtctggatcccccagccatttcagaggccatttaaaaaaacaactgcctgtgtcttcctgcccattcccacccagctcagcatcccccggccctaggctccaggcccctcaccctcactcacggacacttccatccattctcagccttgagccaagtcctcaggaggcaccccatctgccaggagtaggaggcctcacccacccccactttccaatgcgattttacttccggttgggagagggtctctgcaggaacagggctggaaataggttatgtgagcagaagagcgttgagaaccaccacggcctctatgttcagttgcacaggtcgaatgctgcacaagggcacctggggtgagctggggctaagatcagccatgctccccttaccaatccaggcacctgcatccacccccaagaggcacctttcccgtgcacagccccttggagacgcatcctgaaccctggtccagggagatgggttgtcatggtgaccattgccctggtccccagccccacacccctccgatccctggactccttggaggcccctcgcccagcccccggccatccctgagtggtgggttctgcccctgggcgagtggaacggccacctttatcagagccagccctctctggcagtgtgtgatacccatacccagaaggggcggccgccacgggaaatgccagccacgctcttatctgggaggcttggccggctggccctggagctccgattagggagcaggaccgtttgcctgtgggtgcctcgtgggccgggtagggtgggcaccagttctgccctcccacttccccatgagggcaggggacaagtgagagcccagggctgccaggacagggacctcagcacccttgaggtgtgatacgcggcaggtgtggacgctgcaggcccaagctcctcctacccctggaaaggtgggcaccagccccaggtgcacagcagtgtctcaggaacagcagggactctggtcaggaatgttctggaacccgaggggaaggcatgccaccccttccctctctgaaaggaagtcgcagccactcctgggtccagacgtgccctcaggggcttctcggacaaggggtcctcttggccccccaccccgccctgccccccaggccccagcaggagagcagaggcctgcatgcagggcccaccccacgaagctccaagcgtttctgacagtccggatgggattccacatgcttccctgtggccccagccctgactcgggggtgacacacaggctcacttgatggtggcactgaggacccgccggaggccagacagagggacagatgagcacacaccaggagctcccatcgggggagtctcttctctcccgtgcccacccccgaggcctggccaggtgggccagagtcgcaggtacagccaggacatgaggggccgggccccccaccactgtcacacgcaggggtgcccctggagccaggcctctgggtttggaccccggtgccccactgctagcctgctagccgcagagcctccaggggcctcgatgtccttgtctgtgcagggggatgaccgtcacaggaatgggtgttcccggtcccccatagggccgcggggtgctagctggcccgtgtgactgtgatgctgggaccccgctcacactggtcaccctcttggtgccaagccctgcaggggcaggggagggggcggcctagtggtcagagccctgggctgggacccaggcattctgggtgggctggcagccctgaagctgagacggcagaaccgctcctgctgcccccagtccgctcttcccttcctgggggctgataaaggggcgcgggcctcctcggcctctcggtcctggttcgctgccatcttatctgccctggggaagacaaagacccagttaaaacgttttagcagggcctcccggcgtatttacatgttatctctgccattaggcaagcagctatctgatcatcaggcccattaagaccacagcctgcccaatcggggctccaggaagtggggccgccacagcactgcggccaggggaccaggccaggccacgtgaggcctctgtgggcccaggcagccctggccacaggagaggtagaggtggcccggccttcctgggcagagggtgtgtggcctgggaggagccacgtccctgttgtccaccaaggaggctgaggctccaggaggcaggtgagggccaggtgtggccaggtgtgtgtgtgtcctcggctgggtgctaagttagcgtgacctggggcttcaggcagcagagtgtgtccttgcacagcccggaggctccaagtcccaagtccaagtgtcggcagcaccaggctccttccagaggctccctcctgccactctcagcttctgggggcttcaggcgaccctcatggctgcctcccatctccacctccatcttcccatggtcttttctgtctccttttctgtgtctcttagaaagatacttgtcattggttttagggcccacctgataatcccattgatctcaagagccttaatctaattgcatttgcaaagaccctttttccaaatatcagcacgttcatagactgcaggctgatgtatcttttgggggcccccagtcagccatgacataaactcaggccagcgttgcactgtgcggccgggctctgtgggcctgtcccacccgcagcccttgctctggagaacgaccatcgcagggctcacagctcgctcaaacccagccacaggcatcctcctggctgcgtccctacaccccacagtgccctagagatcttgctgcagggctgcccaggcccctgggacccagcacctgcccggcccctgccattcaccccaggcccccaggactgccaccctccactgccccttgggccaaccctagcgggaggtgggctggacaggccccagaccgggcacgcctcatgcctgcgatgtctctctgcagacgagctggagccggtggtgcaggatgggcagaggcgcatacgggcccgactcagcctcgccacgggcctgtcctggggcccgttccatgggagtgtccagaccagagcctcatcccccaggcaggcggagccggtaagaagcccccatccccgcccctgcccgcccaccccaatgcagggcaacatggacccaggggacaggcccagcttagatgccagctccggggctctggccacttgaagatgtgggcctgagatattgggacctggaggatagggagggattcgctgccttggggcccagggagggcttcctgtaggaggtgatatggggcctttggtgccccagggaggacttcctggaggaggggttctttaagcaggaccttgacagatgactgggcattgaagcagaggagaagagcattcaaggggagggaggaacaaaccaatggcccaggccttggggtactgggacggtggggatgctacagcagagagcgagagggtagttctgtgtctgtccccgcggactcttctgacgacaggcacggccgtcaggcccatggtctccatggcctcggcacgtgtgctcatctccttggtgacagcccctgcctggcagagccttccaaggcagccccttgctgctagacacaaaggcctgtgtcgtttgtcttggatgtacttctggggctacctccaacttatgacaagtcagttcggtttcctccgaagagggtataatggtttcttttaaaccacgtctcagctaagaaagggcactggtatatagaaacctgtaagtacgtgtggggctgcatcatgggcggcatagggtctggggcctcctgggccattcacacagccttttgcagctgagcgggcagacgcatgtcccaggccgctcagggagtcactgggaagctggcccaggacagagggcgtccccctttgccaggccctggagtctcctgcctttatgccatttccttgctgtgcatccccaggcaggcccctgcccactgtgagcctccacttcctcagcctttgggaccttgggtgagacacaggggcgcctaaagcttccttttacgtctgagcctgcagaccctgagagggggcgtgggcagggctgcaagcttatctgtggtgcagggaagcccagggcacccctgtctgccagggcagctgggcgggtcacgtgagatggtcaggagtggtgcttgacacagggcatggctcagtgggcactgcggccagcagccctgcaggaggggtggctgcctggccccgtggcctggagcagggaggtggaagaacggcagcggaagctcagtggtggtcagttttctccatggaaggagccacatttcagctccaccacaggaaggaagccatggtgtttagagctggttctgtggggcgtgagctccccatcactgtacgcgtgtgagcggcagttgatccttctggggtgctgggatgtggggatcttggcaggcatttatggttgccaggaggaatgagtggatgggctaggagctccgtggctctcatctctgaactctcaaagtgtcaagaaaacccataggtagagaccaagggcaaagaccgtaggggctgagattggagggctctgtgagttccagacacaccacacgcccatcctcacttcctcctccccgcaccctacgaggagggtcctgccactccattttacagatgagaaaactgaggctccaagatgttaagtcaattgcccaaatacccaggatcaaacagcagagggagaaatagaacccacatctgcctatccccggagaccctcgcaagctccttaatggtagggctgaggggctggcaccggcccaggagtcatccccacgggctgccctttgccctagctgcagtcacccctccctgtccgcctgcctccgcatttagtcctgctctggcctagggcacaggccatcctggggatacgggcacggggttagaaacgctcccaagtggggagataacgtctgggggcacaaggggagccaaggccagaggagccgctggggctctgtggggagcccggggaggaaggagcccccgctccactcttccctcctctgctttatctcctgcagaattaaatccttgattaacccttatctccccagcgaggcgctatctccgccttggcgccgagtgtccagacacaccgtacaagatgattgatttcttcaagatatgcacgcctttccgatacttcatttattgtctaaatatttttgcgtctcagcgggcccctgtcgctcttggctgataggtcccagttctctccccgacccctccctgaggaggacgttgcctcctgcccggatcgccccagctgctgccagtttttcttctctctttgtagaaggagaagggggaggggtgcagatgcgatgctgtgaccctccccgctggcctccacaggcctggggcttgctcacaggccgggatgaacagggacagggtggcttccccctcggttccccacctctggacatggggggcgggcacccacagaggaaaatgagtgcacaagtccccagccgagtcaggagcgtggactctggcaccgacttgccgtgtgacctggggcaggtcgcttccctgatgcagcaacagctcccacccctgccacgccaggggttggaggaaaggggcctgaggggcccagccagcttcagaatttatagtcagatacagaagaaacactcgtggtggatgggtaggtggacggatggatgggtagatggatggatggatggatggatggatggatggatggatggatggatgggtgggtgggttgggtggatggatggatggatggatggatgtgtaggttggagggcttggttggaatgagttgggtgggatgggacagatgtgatgagttgggtccggtggggtgggtaaggtttgtttggattcgattgagtggagtgggataataggggtggaatgaatgggttggattgggatggtatgccttggggtaggatgggatggggtggggattgggtttgcgttgaagagggatgtggtagcattgtaccagatgtgttgggctaaaaatggattggactatcctggggtggggcttgcggcggtaagtgatggtttggactgggactcgtaggcatgggattagcttcgccatactcggtttcggtatgctatgatatagtcgtcaagggttggcaggtaagcgggtctttttatctatactcggtgtgtgtacatccaatggggcgtaatgatgcgtgcatcactggtatggactaatgcgtctcggatagtacctcttccactaatataatgggttatcgtggcgtgaacacttcgccgtttgtcatggtaaatcttttccnnnnnnnnnnnnnnnnnnnnnnnnnnnnnnnnnnnnnnnnnnnnnnnnnnnnnnnnnnnnnnnnnnnnnnnnnnnnnnnnnnnnnnnnnnnnnnnnnnnnnnnnnnnnnnnnnnnnnnnnnnnnnnnnnnnnnnnnnnnnnnnnnnnnnnnnnnnnnnnnnnnnnnnnnnnnnnnnnnnnnnnnnnnnnnnnnnnnnnnnnnnnnnnnnnnnnnnnnnnnnnnnnnnnnnnnnnnnnnnnnnnnnnnnnnnnnnnnnnnnnnnnnnnnnnnnnnnnnnnnnnnnnnnnnnnnnnnnnnnnnnnnnnnnnnnnnnnnnnnnnnnnnnnnnnnnnnnnnnnnnnnnnnnnnnnnnnnnnnnnnnnnnnnnnnnnnnnnnnnnnnnnnnnnnnnnnnnnnnnnnnnnnnnnnnnnnnnnnnnnnnnnnnnnnnnnnnnnnnnnnnnnnnnnnnnnnnnnnnnnnnnnnnnnnnnnnnnnnnnnnnnnnnnnnnnnnnnnnnnnnnnnnnnnnnnnnnnnnnnnnnnnnnnnnnnnnnnnnnnnnnnnnnnnnnnnnnnnnnnnnnnnnnnnnnnnnnnnnnnnnnnnnnnnnnnnnnnnnnnnnnnnnnnnnnnnnnnnnnnnnnnnnnnnnnnnnnnnnnnnnnnnnnnnnnnnnnnnnnnnnnnnnnnnnnnnnnnnnnnnnnnnnnnnnnnnnnnnnnnnnnnnnnnnnnnnnnnnnnnnnnnnnnnnnnnnnnnnnnnnnnnnnnnnnnnnnnnnnnnnnnnnnnnnnnnnnnnnnnnnnnnnnnnnnnnnnnnnnnnnnnnnnnnnnnnnnnnnnnnnnnnnnnnnnnnnnnnnnnnnnnnnnnnnnnnnnnnnnnnnnnnnnnnnnnnnnnnnnnnnnnnnnnnnnnnnnnnnnnnnnnnnnnnnnnnnnnnnnnnnnnnnnnnnnnnnnnnnnnnnnnnnnnnnnnnnnnnnnnnnnnnnnnnnnnnnnnnnnnnnnnnnnnnnnnnnnnnnnnnnnnnnnnnnnnnnnnnnnnnnnnnnnnnnnnnnnnnnnnnnnnnnnnnnnnnnnnnnnnnnnnnnnnnnnnnnnnnnnnnnnnnnnnnnnnnnnnnnnnnnnnnnnnnnnnnnnnnnnnnnnnnnnnnnnnnnnnnnnnnnnnnnnnnnnnnnnnnnnnnnnnnnnnnnnnnnnnnnnnnnnnnnnnnnnnnnnnnnnnnnnnnnnnnnnnnnnnnnnnnnnnnnnnnnnnnnnnnnnnnnnnnnnnnnnnnnnnnnnnnnnnnnnnnnnnnnnnnnnnnnnnnnnnnnnnnnnnnnnnnnnnnnnnnnnnnnnnnnnnnnnnnnnnnnnnnnnnnnnnnnnnnnnnnnnnnnnnnnnnnnnnnnnnnnnnnnnnnnnnnnnnnnnnnnnnnnnnnnnnnnnnnnnnnnnnnnnnnnnnnnnnnnnnnnnnnnnnnnnnnnnnnnnnnnnnnnnnnnnnnnnnnnnnnnnnnnnnnnnnnnnnnnnnnnnnnnnnnnnnnnnnnnnnnnnnnnnnnnnnnnnnnnnnnnnnnnnnnnnnnnnnnnnnnnnnnnnnnnnnnnnnnnnnnnnnnnnnnnnnnnnnnnnnnnnnnnnnnnnnnnnnnnnnnnnnnnnnnnnnnnnnnnnnnnnnnnnnnnnnnnnnnnnnnnnnnnnnnnnnnnnnnnnnnnnnnnnnnnnnnnnnnnnnnnnnnnnnnnnnnnnnnnnnnnnnnnnnnnnnnnnnnnnnnnnnnnnnnnnnnnnnnnnnnnnnnnnnnnnnnnnnnnnnnnnnnnnnnnnnnnnnnnnnnnnnnnnnnnnnnnnnnnnnnnnnnnnnnnnnnnnnnnnnnnnnnnnnnnnnnnnnnnnnnnnnnnnnnnnnnnnnnnnnnnnnnnnnnnnnnnnnnnnnnnnnnnnnnnnnnnnnnnnnnnnnnnnnnnnnnnnnnnnnnnnnnnnnnnnnnnnnnnnnnnnnnnnnnnnnnnnnnnnnnnnnnnnnnnnnnnnnnnnnnnnnnnncggatacgcatacgagatcagagatccgaactatcctcctcgctgatacaatcacacgctacagacgagcgccgtgtgcattagcgaggacaccgagacccacaagaacgcgcgacagtgacaaacgagaccgcatgacaccgagagcactcactcacgtctgagaggagctctggcgagacgtcaacgcgaggcgacgataaagagtgagagcgccagactgcacgacgcacggagttcacagcagcgaccagcacaagcgcccgctatcacaccacgtcatccgtcgatgcaacaagcatggacctgagattgagactaaaacagagacgcgccagcttgataatgatcgcagcttcgaatacgctagtacatgcgcttcaacggacatccacacaagggacgacgaacacgagggcacacgagatggcaatgcttgccactcgtcgcgagtgcgattgctagccccgctatggccccacaccgtaagcggcgacaccgctctcaacgggtctacgctcgccacaacacaccgaacgcgtaaccacaccaccctctggttccgctcaaacaggactgctagcgacaggctagcatcgctcgaaaccccagccactggatgcacaaggatgagtcggagaaatggccagcatcgagctcgggtcgggcgcaccggcgcatagcatggcctgggaggatgccatggaagcgtagcgtgtaatggtccgatagatccatacctagtcggattggctgggtgcatggaggactgggtgcgtagacggatggatggatgacagggtgggtgcatggatcggatgattgagatggatggatccatgcatcgatgtatggctgggtggatggatggatggatggatggagcgcagacaggtagtatgcgtgggtgaatggatgaacggatggatggcagcgaggaagggagtgtgggtggatggatggatgcatgattcggtgggtgggtgcatcattaggtgggtgggtggatgatggacaggtgggtggatggatggatggatgggagggtgggtgggtggatggatgattatgtaggtgggtagatgatggacaggtggatggatggatgggagggtgggtgggtggatggatgattaggtgggtgggtggatgatggacaggtggatggatgcatggatggatggatggatgaatatatggcctgaggccaacctcagtgttccctcccccatgccgttccctcctctgtgctgtttcccactgccactccatgctgtttcccccgcctccatgctgttccctcctccgtgctgtgaaaactaaagggagagtggcctgactcagctccccaagcccagccttcccctcctatgagatcaggttctgccatggtgatgacccctgacgccaggctctggggctccctgcatggtttcagaggactgctcagaccctgtggtgcctccaggggtcccagccccatccccaggtgagaaagcctcaggccatcgtgggtcagggaccccccgctaaggtatcctgagcaccaacaccatgttccctcccccgtgctgttcccccaacccgtgctgttccctccctcatgctgttccctctcccctgtgctgttcccccaacccatgctgttccttccctcatgctgttcccccaacccgtgctattccctcccccgtgctgttccctcccctgtgctgttcccccaacccgtgctgttccctccctcatgctgttccctctcccctgtgctgttccccctcccctgtgctgttcccacaccctgtgctgttccctcccctgtgctgttcccacaccctgtgctgttccctcccctgtgctgttccctcccctgtgctgttccctcccctatgctgttccctctccatgctgttccctcctctctgtttcctcccccgtgctgttccttggccccctcgtatccacaccctcccctcctcaccctccaggtctcggccaacatcctggcacagccacccccactccccgtctcagcctgtcccgtgtctctgtcgctgcccctccaggtgcctacctgctatttctgggcggctccacactccaggactcacgggagatgcagttctgttcactgtgttccccacacctggcaacagctggtgcacaaggcctgcctgccggataagggagtgagtgagtgtgtgacccagtggatgaagtggcagcagcaaggcggcaggggtctcacggacctggcttgtagtcgtgcaggcctcaggccctcacctgggaagtgtactccttgcatggtcgagggagacagaggcactgagggaccagctggtgcctctgttaaggtgatggggaggtggaggacttctcagggtgggctggaggaaagacgggctggggcctcagcagcctcagcctcagcctcagctcccaccctcccgtgaacctgctgctggcccactaccccgcagtgtcctggggatgaccaagcagccccacggggcttctgcaggaccggccgtttggctccatgggccgggccaccccagcagccctgcaagctgcttcagagcttcacagcgaggtttgggaacggcctcagataaagttgtcacagcggatgctgcacagatagggtttccgatggctatcggtgccaccgcagaatcaagacactgacctctttgttgggggaaacaaggaacattctcaggtccgcccggggaatttaaagtggccactgctggtggggccggccagggcccagaggagggacagggcaaccccaaggggcggcaaacagggtgggctctagcgtcctccgtggaccctggacacacctgcctgaccaggctgggtgccgagcctgtggcaccctgggagggaagatggccgcagcacccacatctctgagagtcttggcagaagggcctggtttggaagttaaaaataggccccctcccaaggccaggcgcggtggttcacgcctgtaatcccagcactttgggaggccaaggcgggcagatcacctgaggtcagcagttcaagaccagtctgcccaacatagtgaaaccccgtccctacttaaactacaaaaattagctgggtgtggtggtgcttgcctgtaatcccagctactcgggaggctgaggcaggagaattgcttgaaccccggaggtggaggttgcagtgagccgagatcatgccatcgcactccaggctgggggacaagagtgagacttcatctcaaaaaaaaaaaaaaaataggcccccttcccccttgctccccagtgcccacaggcagagcagggtcaggaagggcctgcagcaccagagaaagggcttctgttccaggctgatcagaggtggggaaacaagaagagacagaaaaaaatcaacaggcagacccgtgcccggccagcccctccgcaagggaagcagaagctgaaattggcttcctgccccagcgtctcctggccgcggccccagcagtggctcccaggatgggcgggtggccccgggctggcttcaggggtccggccacttggcaccgggcaagaccctggttcagggctggccgtgtccatgccacctccaggctggggaccctggtggccccaggcgaggctgtgctcacctgtcccctgagaggtgtcagggtggcccctgcatcctcagcagccagggcagactggcagggaggccctcaccccttcccagcctgtggtcgcagaagtaggagcggcaggcccctctgagagtgtttggcagtgggggccgtggcagggtggccggagctgcttatcttgcacccctaggtctcctacctgttccctcccgggtcgggggcgggtgccggatgggagcctcaccctccttccccctgcccctccccacccgcacagccaggccaggcgccccgtcgtgccccacatacgcggggtgcactcggcggggccgggcgggaacatggcgcctgccctccactcgggaccgccacagaaaaatcgggggtgcgtgcagcgtcagcacagttgcggcgcgtgtttttatcatgctgggaacacgctgctcctgggagtgataagcattaaaccggccggcaggctgtcagtctcagtttgagggtttagaaatattgggacgaataattagatttcatatcgttaccgcagcacccatcggaggatcaagcagattaatttttttcaccctcctctgctcattaatattcattagaggctcaggaaggccagggtggggagggccaggccccagcagcctcgccgagcgctgcccgcctggctcgggagcagccgggacacagtagccgccggtcacccacctttgtgccaggaatgtgcctgcccattgcccctggggtttaccccccagcctgccccagcagaagcccccatcggagccggcagagccccacagctggcgtgcagttcctgagccctgctctgcggccctgggaatcacgggggtgtcctttaaaaggggggcacccacccgatgccagcctgcacaaagcacctttctcggggcagccactcaccacagtggacactcagcatgtgctgccccggacatgccctgtggacggcaccccatgcccactttgtcctgccaggtcaacccaaaagcaacagccagggctggagctaatatgcatcctgtgctgggaacctgccaggcaggcaaaaagcttcacacagatcatggcctcccaacataccgggaggaaactgagtcaaaggagataggactgacccccctgagactgccccaaaggctaatggtgggcttcgggtgggtccagagtgagcaggggctcggccgcccctctgtccccccaacagccatgtggggagagggcagagccccgtctgcagaggagaacctgagccaggggttggggtggctgctggggacggcttcacactgggactgcagggttgcacccaccccagccagggcacccaccccactggccagcttagctctgctcacccgttctgtggctgagccgtgtggtagcaggcaggtgacgtggaagccacctgctctgctggccagcccgcctgaaccttgcctgagtagtcactgaacgtcccagcccaaaggctgtatcttgctagattcctgagtgccctgcggatgggccaagaggcaggggtggcccagaggggtccctgcatacgggtctggtcgtgccctgcccaaggtcgcagcagggaggccgagcctggctgggaccccactgcccacctctgcggcccacagggtcccacgcgtgctggcaaagtccaggaaagctcatgggctggcacctagtggggaggtaccccagacccacaggggacatccctgcactgtcaccagcccgaccccttgtaccatggcagggttgggctgactgccatcctcaccacagggctgcacaaacctgtcccgggccagcggcagcatttgtaggtgacactggcttttcaggcaaaggtcatggtgcaggaagtttctgattaaaaggcattcatttgtatagaacaaaaagtgtgtttacaggaagtgctggagcacgcgtgtatgctgtgcctccagattggacacccaggtggctaagcttggggaccaccagtgcagtgagcagcacagggctgagggtcagggcactgaggctgagtcagccttgcaggagggaccaaggcctgaggggcagcggcggtcaccccttcctccgtcaccattttctccccttgatgtctgaccagtgttgggcaccacagagcgaggccatggactgcccgccccacctcgccctgtcccagcccccgactgcactgggatggggcccctcgcatttcctctgccattcagctgggggccggggtgcaatggatgcaggaaacgaggcggcctccacgggctcggcccagagtgttttccttccagacttagcctgagccaccgccgacagcatggcatggcccgaggcactggcatgagctctgtccctccccttcccaggcctcagtttcctcacccatgagatggagaggagggtactgcctgctttccagggtgacagtgaggccaggggggccagggccgatccaacacagtgctggtgtctcaggcccacaggaaggggcctgaccagcctcagggtggggacagacctgctgagtccaccaggtgctccccagcgtccgccgtgtgccggccccgggagcgagcgggaacgcaggtggccctgccacgccctgtggcagggaggggagccatgctgtcaggaggacactgaggcccgagggttgctagggaagtgccgtatcttctgggctaatctcggccccagcccacagaggtcattctggaggcatctagggcctgtgtggaaggagcctctaccaggtccagcccctgtgggaacagcggtttcacacccagcactctgggggcaagggtgggcgagcagtggggagaacacagatacgcagacccgggtgtgagttcaggctctgctgctccctggctgtgtgacctggagcatgttgctcgacctctttgggcctcagtctccacaagaaccctgcgcccaaccctggaaggtactactccctgccaagcctcccagccccagcacggtgttagccccaccggtcaactatggcacagatggcccatgccacacctctgccagctcttgggccaatgactgtccacagcttggcctaccagccaagccgggaggcagatccgtgtcacagatgccccacatactcacgggaacccccaggcaggctgctgacggacccctccccacgtgttcctacccccccccccagagcccagccctgaccctgctgctggtggacgaggcctgctggctgaggacgctgccccaggccctgactgaggccgaggccaacacagagatccacaggaagggtcagtatgacgcggcacctccgtcccaagccttccggaaggtgggggtcacttggctccccctgggctgagcccttaaagggaaaccagcctgctagggcaggggatggggcacagggagctgctggccccgggcgctgcagcatgaggcagacactctactgggaccagtcagcccagaccatgagtccctgtatgagggtcccgactggcaggctgagccaggacaggtgtccgtggcgggggggtgggggaggattctgcccctctgggggacaccgtgatccccgtatctcctccctgccttggctgcacctctgggaacccaccaagggcagcagcagggaccccgacaccagactggctggcaggtgccactggaccatcctccatgtcgtcaggctggctccaggaacggtcaaggtggccgtccaggaagtcgaggggccttgccgtgctgctgctactgagggtggcacgtctgggcggcctgcacctccgagcacccggggatgaagcgggaggccctctgggcttaggcaggtccactggccagtggagtccctggccccagtgcagggtggggacaggctgtggtgcgcgtgagcgggccggctcaggcctgagggcggcaccgcaggggacacacagcccgggcgccccaggtgaacaagccggccccgcgcagcctgggctttgtgggctgaggctgccccctgcgggtggctgcaggaagagccgcccttggacggtttcctggagagccgggtccactctagggccccacctctggctgccgtccctgagtggccacccagggtctcccctagttactccaccacccgccctccacgtcatccctttcctgggagacttcctcggggccctcccactaggatgggcccagagcaaggaggcctggaggcaggcaggctgtgagcactcacaggggaccacccagccttgccccccaggcaggatggccctggcagccagccagccatggctgtgaacccgggtggccgctctcctgaccccatcctctgccccttgtttaagacgggacagggaagtggggcacaaagtcctaggtttggacacctgtctccctccagatgacgcactctggtgcagggtcaccaagccggtgcctgcggggggactcctgagcgtgctcctcacggccgagccccacagcacccccggccaccctgtgaagaaggagccagcagagcccacgtgcccggcccctgcacacgacctccagctcctgccccagcaggccgggatggcctccatccttgccaccgcagtgatcaacagtaagtgctgggctctccgcacccagggcggctgctccaccaaggaggagcaggcagggcaggagagggtgggagctgagggtgggaagctcgggggctgcaggctgccgacagagtgagaggtaaggcagggaaggaggtgacgtgggtggtcccaagtgcagaacacatagggacaggagggtccccagagcccagggccaccacagggaaagcccctgccagcaggcaagcgggcttaggcacagactcggctctgcccggcacaccacactagaagccagtgctttccctgggggcagacgcgggggcggccctgactgtgggccagagcaggaccctcacctcggccctcctggcgtctggggccaggtcactccacagtggaggtgtccctggacaccacggggggtgagcggcagccctggccccggcccactaggtgctgccaccacctccacctccaagttgtgacaaccaagacatctgttggttgggtttttgttgttttttttcgagacaaggtctcactctgttacccaggatggtcataaagtcctagtctcaagccatcctgcctcagcctcctaagtagctgggacttcaggcacacgccaccaaaatctctctacacatggccgtatgtccctggggacagagccgcccctggggacaactgaagtggacagatgccactcttgcagtggctctctcggaaactctgagggtggctgcgggaatcatgagtcactcacccccggccgggtacaggagccatacctgtgatcccagcaccgtgggaggccgaggcaggaggaccgtttgagcccaggagttcaaggccagactgggcaacacagaagatcccatatctgccaaaactttgaaaaatgagccgagggtgatggtgcgccccgtgcacctctgtggccaaggacagcgcgtggccatcgtggacaggcacgagtcacgcagggaacacgaagcaagtctggctccggccagcggctggggcttcccaggggaacagggacggcaccggatggcgtttggagggggacggtaagactcaggtttagctttggtgaccacagagtcacagaactggaagaaaagcgacctttgtgagcaagtcggatgtgaagacggcttgaagtaggtggaggcagccagtggttaggggcaaagagacctgcagggccaagtgtgcagccactggggggatgtcagcccgtatgagagtcaggggagcagacccccactctttgagtgtcctgacatcaagacacctgctacatgcaaaagagaagccacagagtccactgagggacaaggatggggctcagagagccctggggcctgtggaccctggagtcaggggacaggggacatctcccaaggtacggagagtgagctgagataggttagagggggtcctggagggcggcaggtggtctggcacatccaggctgtggcgagaccaacagcagagaaatgactactggtcctgacagtgcagaggtcgccatgaccctgaccgaggccgctccagggagggtcagagaggaggcctgcacaggggccagctggccagagggggatgggcttgtgtgcctggtagccaggacataatagcccatgttatgtgctggtgggaatagctggtgacactggagagaacgggccgagcggccaggtccacacctaagcccaggttgggggcaggggctgggcaagccactgccccagggagccaggaggtcagaagagaacacgggccgcaggtgactgaaaggagccgggagcaaagggggtccccatctgccttctcctcttccctgaagaaggcgcggaggggatgggaggccattgcacccctccaccaggatggagagggggtgcccccgtagtgtctcggggtgcccgggagacccaactccaggggaacaccccgctgataacgccagtaagacagtggggacagcaggctggtgagggtcccgtcctccagcagggtccttgcccacacagcctgcggagaccacctcccagtccccgaggggcagctgcgggtgccccaggctcagcctctgcctcggtttccccctcgcgggtctgacatgcctcatccccaggcagcagtgtcctgggaacgctgcttcggaaggacaccaccgtgagccacacatcttgttgacatacctgagtcctgccctagcacttctgcggctgccagggcacggccgacgcttgtctgctgctctggaagagccgcaggaaccaattccagggtcagatccagtttcattcttgagcctccggcactctgggcccatctcgcctgtgaagcgggatgcagaggcacctgcctggaggcccctccgcaggccaccagatttggcctgtggtcaccagcaggcgggcagcctttctaaactgcatggccacggcccctctccccacacccctgcagcaagagtcccccacaatgaccttggagacgcagaaacaaacccacccagtggcctcccaggtctgggacccagctcaaggcctcagctgagagaggacagagctgcctgcagcccccaagtaaaaggaacttgagaaacagaaatcaacagcacaggagggagatgtgagccagaaaagtcgttagaacagcgaggtggaggaggaagagccacctcacccaggcactgaaattcctcccaagaggcagaggtggcgagcaggccgcagaggggagggcgcgggggtaggggccacccctgcgtgataactgcagactcaggatcaacatcggagaagccgggtgagaaaccagcactaacctgcagaggcagaaaccagatatcacatcagtctctaagtggaacgggcttgaaagccagataaggaatcccagggcccctgggttccacacggaggccaaggccaagctgaacaggtccttcccttccctgtcttcagccaaggggccatgggcagatggggcagggctctggggcagagaacattccttaaactgctataaagacaaaccgagaacacgctagagaagtcctcccctgctggcaaaaccaccgtaagcagagtgcaagcccccaaaactctcaacagttataagcagcccatttggggtcagtgtggtaaattcgacaaatctgaccagccaggtggtcactgacatggagccgcccaggtgtgtgggcgcatgggggcttcctaacttgtgcactcctggtctcatgcccacatccctagaactgcagtcagcagccatcgtgtgcctgagtgcccagggactgtgtgcgtgggttttctttgcagcctggcactcccacgcacctgcacgcacatctgtacacacacgtttcctcttccacggcctcccgggtccacacggtcaccccagtatgtcatggatgctagcctcacctggcggtgtccacttcttccttctgcccccatgaggccaaagcatctccttatggggctcaccattggaaggggacccataggggttcactcagaccccactccccacgggtcccagggctcctgggatctacggaagggagtggggctgtcacaggaccatccaggaggcttacagttacaggaaggggtcaaagcctcagctcctggggtggggaggacggtggggtccgtcacggccaggccctgcctccgcccacagccttgccctggctggcaggctggccttcagcctgaccccgcctgcttcccaccccacagaagacgtcttcccctgcaaggactgtggcatctggtaccgcagcgagcgcaacctgcaggcgcacctgctctactactgcgccagccgccagggcaccggctccccggccgcagccgccacagacgagaagcccaaagagacctaccccaacgagcgcgtctgccccttcccccagtgccgcaagagctgccccagcgccagctccctggagatccacatgcgcagccacagcggtgagcccccaccccggacgcgggtcctcaggatgccggctgcttccccacccagtcccgcaggccgcccgggaaaacccacatgcaagcacacacggtgccaccattcacctgcgcggtctccggcacacccagggcccccgcaggggcccagagcaggcaggccggactgtgggctatctgggtagtcagctgagggctgggcccactgctgtcccgagagacaaaaggcggaggaggaggaggaggggtttaaagacccttcagcacagggtcccccggcacagatcacggccctgggcccagtcgccttcctcatccctggagtcccaaggttaagctggcccgggcaccgctcttacgcgccctgtgttccaggagagcggcccttcgtgtgcctgatctgcctgtcggccttcaccaccaaggccaactgcgagcggcacctcaaggtgcacacggacacgctgagcggtaggcaccgcaggggccggggggtgtgtgggtcccgcctccccgccctgggccttgaccacctcgccatggcccacaggtgtctgccacagctgtggcttcatctccaccacaagggacatcctctacagccacttggtcaccaaccacatggtctgccagcctggctccaagggtgagatctactcgccaggggccggacacccagcaaccaagctgcccccaggtgagcagccctgtgggggccacccctgccccttaggccccctgagcagtgggaagggagtgggcttgtcgcccaagacaggtgggggtccgtttcagccttcgctctaaaccactcccgcccacccctccccttccggagctcgccctccagctctgaccggccaggtcctgccccaggcctgaggtgccacccctgcgatctctctgcagacagtctgggcagcttccagcagcagcacacggccctgcaaggccccctggcctccgcggacctgggcctggcgcccaccccatcgccaggactggacagaaaggccctggccgaggccaccaacggagaggccagagcggagcctctggcccagaatggaggcagcagcgagcccccggcggcccccaggagcatcaaggtggaggcggtggaggagccggaggcggcccccatcctgggccccggagagcctgggccccaggccccgtcgcggacgccgtcgccgcgcagccccgccccggccagggtcaaggccgagctgtccagccccacgccgggctccagcccggtgcccggcgagctgggcctggccggggccctgttccttccgcagtacgtgttcgggcccgacgcggcgccccccgcctcggagatcctggccaagatgtccgagctggtgcacagccggctgcagcagggcgcgggcgcgggcgccggcggcgcgcagaccgggctcttccccggggcccccaagggcgctacgtgcttcgagtgcgagatcaccttcagcaacgtcaacaactactacgtgcacaagcgcctctactgttcaggccgccgtgcgcccgaggacgcgcctgccgcgcgcaggcccaaggcgccccccggcccggcccgcgcgccccccggccagcccgccgaacccgacgcgccgcgctcgtccccgggccccggagcgcgcgaggagggggctgggggcgcggccacgcccgaggacggcgcgggcggccggggcagcgagggcagccagagcccgggtagctccgtggacgacgcggaggacgaccccagccgcacgctgtgcgaggcctgcaacatccgcttcagccgccacgagacctacaccgtgcacaagcggtactactgcgcctcgcgccacgacccgccgccgcgccgaccggccgcgcccccgggaccccctgggccggccgcgcccccggccccctctcccgccgcgcctgtgcgcacgcgcagacgccgcaagctctacgagctgcacgcggccggcgccccgccccccccgccgcccggccacgcccccgcgcccgagtcgccgcggcccggaagcggaagcggaagcggccccggcctcgcccctgcgcgctcgcccggccccgcggccgacggccccatcgacctgagcaagaagccgcggcgcccgctccccggagccccggcaccggcgctggccgactaccacgagtgcacggcctgccgcgtgagcttccacagcctcgaggcctacctggcgcacaagaagtactcgtgccccgctgcgccaccgcccggcgcgctcggcctgcccgccgccgcctgcccctactgccccccgaacggcccggtgcgcggggacctgctggagcatttccgcctggcgcacggcctgctgctcggcgcgcccctggccggcccgggggtcgaggcccggacgccggccgaccgcggcccctcgcccgctcccgcccccgccgcctccccgcagcccgggtcccgtggcccccgggacggcctcggcccggagccccaggagccgccgcccggcccgcccccgtccccggccgccgcgcccgaggccgtgccgcccccgccggcgcccccctcctactcggacaagggcgtccagactcccagcaagggcacgccggcgccgctgcccaacggcaaccaccggtactgccgtctttgcaacatcaagttcagcagcctgtccaccttcatcgcccacaagaagtattactgctcctcgcacgccgccgagcacgtgaagtgagcgcccacactacagccgcagacgctttgcacgccccgctgcgatgcggggagggggccgcccccaggccgcacggactgccgctcctgggaaccccgccacgcacaggcctcggcggagggggccgcagggggcagcgcccgcctggacccttggcacttaataaagaagttcagtttgatgagcatggtggtgggccagcctagttctctgagccagcaggcacacgcagccagtgtcacatccagccctgctgtgtacacaggccactgcggcccggagtggctgggcccctgccggagttacaccactgggtgctaagagctagaccgagcgtcaggtcggaggccacagcacacactgaaccactgcagggccagccgctctgggcctaccccaccccagccctgtccatacccccctagggagagcagcctccacactgctgaccctctccacggtctacttggccgccagacacggaagagaggggcactgacctggctggccatcccccaaccctgcatggtcctgggggtccgatgtcccccatccagtcacagaccaccagggatggcaggggtgggggcgccctggggaggatgaagccctgtggtggccaaggctgggggaagaacaggcgagtaggtggacaggagagggagaccgaggccgaagcattccctggcctcgagggggtcctgatgctcactggtgggtgcatctctccctcagagccagggctgaggacaaccgtgtggtggagtcacctgtggtggctgagtcggtgcaagggtcagggcacccccaccccccgtcttccctgccctgctgggctgtatgggccggccacactgagggagtacttggctgaccgcgttcagccacggtgtcaccgtgccgtttgcagctgggtggctgtgggcagcctccagcgtgctttctcactggagaacaaaaacactcttctattcccaacgtcactttatttttttatttttgggtctcactctcttgcccaggctggagtccctgggatactcacggctcattgcagccttgacctcgtgagctcaagtgatcctcccacctcagtctcctcagtagctggggctacaggtgtacaccaccatgcccagctagtttttgtgttttttgtagaaatggtgtctccctatgttgcccaggctgggcaaccctatattttttagagctaaggtcttgttcggttccccaggctgaagttcagtggcacgatcataagtcactgcagcctcaaactcctgagctgaaaccatcttcctgcctcagcctcccaagtagctgggactacaggcttgacccaccacacctggctaacttttaaaacatttttatagagacagggtcttcctgtgttgcccaagatggtctcaaactcctgacctccagtgctcctgcagcctcagcctcccagaacattaggatgacaggcgcgagctaccattcccagcccatttccaactctacttgaactagctgcatttttttcagctttgcccagcagccctggtgagtgcaggcaaagaaggcagcggcctcttgcctcagaagcccgaggcacttcccagccagtccagggctcgctctcctgcccgcagctcgtgggcctgggtctgcagcgctttcagtggtctctgatgtctttgtccacctgcccactagggtctggccagatggggcccgtagccaaggccaatggacagacatggcttccaccccctcccagggacctgagctccagggaaggcaagcagccttttcctcacagacaccccttctgttgaagaccaggtgatagcggggacgggaggcacggacccctcaagtctgctcatcatttgcattgttgtgcatgaatttgcgtggagggttcaggaggctctgcccccaagtcctccccaggtgcaggcgcagggtacaagatgttctaaaaaatagaaacctggtggggggttgtcactgtgtgtacatttaaaagtaaactgtttaaaggtgtctagaaactacgaatacagtctctggtgagtgacaggtgctcaaagggggtaaaaaacacaactccagtgtcctcaccccctttgagccccaccccaaacctgaccaagcgaggccctggaatgcaagacgcagaggagaatctggaagacagcccagcagtgccgcacaaacccgccatgcacccagacgtgcctcagtgtccacacctgtgccgcaggagtgggagttcgggcctggcaacccttcctgggggctcatctcagaggcagcaaggaccctgtgaccgggacccagacctgaagtcaccccagagggccccgccacggcccggactcgaagcttagggcagcacactgagcctcacgaagggccctgcgcctgtcctggcttgcataaccccctactgcccccaccatgcagggctgggtaccgctgccatcgcccgtcccaggtcattggcgtgtggccagagcccgtccccatcgcacccaggactcgcctcgggcacgcgtcttctgcacagaccctggggcccccacacctggcagacgccatcagtcacccctactccctcaagccatcaccccagtctccccccaccagaccaccgcctgggcctccaccctgtgcctcccctgtagccgctgactcggtggtggcccaggccttctcccgcctctccccaggaagctgcctgccctgctcacagacaccccctcggccccccagctggttctctgctgagccaggttcaaggctctgagtctgccctggtctccccttgaagttctccctccacactcctggggtgggctcatggtcttctctccactaattctgtagtctagccacgcctcccctgagccccagacctgcagacctacagcccctgtgtccttccaggcccttgatgtaccatgagtgactgtaaccccacgcacctgtaacttctgcccacacctgtgcaggtgttcccctcccccaagcccacctgtctccccacaccagtgcaagcacccccctggctcactgtctcctcccctcacctgcacaggcatcaccccgagcccacctgtctccccaccagcccacctgtctcctcccctcacctgcataggcatcctcagtggccccctgcccctcaagctggagagcatcagccttgcctattcacccttcattgtcaaagcaatgcttgatttgtccaaatcccaccgcttcccaaacccatccaccatcgccgactcccagacctgggacttcacccttgagtctctctgaacagccgcttccaaatctcgagggtccactcctcacacagctgccaccgctcccctctcccaggctcaccctgctctgaggcccgtccccgcccccaggtgcctgtgcttcgcgtaaaaccccttctgttactggccccatccttcagaggtcagaagtcccccttctctgcctcagcacagaggagaggagcctcccgttggcggcctgtcccgacggcagcccctggccctgctaagcccaccacccgctgggctccatgctgcagctggttgctccaggcagtgcctcctgatgccctctctactcctccgaggctgtccttgtcatccagctctcagcttaggtgccccctcagacctgtccctggctcacttcccgcgtaggaacggtcactctgcacctctgtccccagctcgctcccgtgtaggaatggtcactctgcacctctgtccccagctcactcccacgtaggaacggtcactctgcatctctgtcctcttgcccgtcgcctactggcctgtctcctttgaaagctggggctgcgcctgcttgacctctgcctcccaggcacccacaagtggccgacacagaggaggggtctgcatctgttgaagtcacaggggtgtgtgtggaccacagccagcccctccccatgcccagcagtcagtccaactgtcacagcccactttccagccacactgtccactcatggcacacggccaccgtcacagcccactctccaatcacactgtccactgagtcccatgtgtgacctgagcttcttggatctcggaccgctgcattccaagctgctctctccccactcctcccccctccccactccccccagctttgcctgtgaaactccttctctcctcaagactggcttaaaaggtccccctcagggccacccagccaggctgtacccgtcccctgccctgcacaggatgggcctcccgcctccaccctccttcttccaggagggcacctgctcccttctacctgagctgcatacagctcaaagccccttgcaggctggcaactcccaggcagggtcagcccagcctgccgggagtccctcacgctacttgggacacaacgtccacgagatgatgcagggcagcctcgccctcctgaggccccttcctctgccaggcacagggtctgtcctctcagccacaccatgggctgagtgccctgactgtgcacgagggccccaaggttccatcgggacacacctcctgcccaggcacctggcgggcacagctgggccaggacacatccctctgctggcttccagcactcggttctcgaccaccagccgtactgctgggcactggctcccagccacgccctggcttacagaaagctcaggcctagcagaagcccaccccagcctgcctgaggaagggtgggagtggagagggcccccactgccggccctgtctcccacaccaggacaccaacatgcagagcaggacatcacctgtggctggggggctgcgtgagctggcaaccgtcggatgggtctgctctgaaaaccggtccccacctgtcccccgcaagccgacccctcgggagagcccagctttggagtctcaggcagagcctcaggacgccaggaggcagcaaagccgttgcactctggcctgccctgtatctgccggggccttgcagagggggagggaggaagattgggaggaggcagcctcaccccctcaacacccaaccccctcctccttggaggtgccagggagaggtgaagagaagagcaaaccatgcagctgtggacagaactcgcctcgggacctcgggctgggagtgtctcagaggtgagccaggcaggggcagggagggtcgggagctccgggcagaggttagggttagggcgggacgcatggaggagggaggcgcagagcaggaggtctcgcagcttttcggaagcgcatccatttccacagcgagggaaggagcaggggaggtgactggccacccgggaggagcttggccaccagacagccaggtggcctggacctggcgagagtggcgaacccggcagaatcccaacctcacagggctgttccaggctgcttccaacacgaccctggaggcacatcctctgatgctgtccttgggcagggagcagggggctcccaggcacggtgacttgcccagggtcacaggagtgaccaccaagatgcaagggaaatacacagcctgagccctgccttgcacacggcggccctcgcaccagcacggcctccccatctggcaccctcagagcccctctgtcccctcagagccccaggcctccccagcactgcccacagacctgcagcagcttctgtctggctgcttccctccctgccggccagggcctgggaatctgcatttaaccagctcccagcagtttgctctctggcacgtgtgagacctgcactcacagcaggtgcccagaccgtgggcgccgacctcactagctcaccagcaggagcacacacagccctgctcaccaggccttcgtcagctgaggcaggggcggggcagggagagagctggacccagatctctgcccaagggccgtgtcctgccctgcgcggagtgcacacttggccctccccttctctgacactcctggtgaacagggtggcgagggcagtagccccaccctcgaacgcagggcatgggctgaggctgaaggaatgcctaggagagtgtggcgtgtgcaggtggggggcggaaaggggcagggaagggtgaagaggaccttggtgtcctggctaatccgagtcctccgtgttgaaccccaaaccccaagcagccgggagaagctggagcaggcctggcacacaccctaactccagtctgaaattctgggcccctcctgcacagcccagatccccccaggaggccgctgatggctcaaagaaggtctcatatgctctcatgggcgtatgccaccagcctgaggcagagacccaaggcccacacgcccggctattgccgtgagccggcagcacgtggccttgattctcttcccgatgcaggacaggtgggccacgcaattgaggcttagccaggaaagaattcaagggcaggccagggtgttagacggcagcagtctgttattgaacaattttactccttgcagagcaaggctaactccctggcagtgcatccagagtccacagtgctcttggcaactgtatttataaccacttaaacccctcttcaattacatgcaaattaaagggtgggttaatgcaaattgaggagcaggttacttaggactttctttttgtttgttttgttttgagacagagtcttcctctgtctcccaggctggagtgcagtggcatgatcttggctcactgcaacctccatctcccgggttcaagtgattctcctgcctcagcctcccaagtagctgggattacagaagcctgccaccacgcccggctaatttttgtatgttaagtagagacaggttttcaccatattggtcaggctggtctcgaattcctgacctcaggtgatcacctgcctcagcctcccacagtgctgggattacaggcacgagccaccgcgcccggctgttacttaggactttctaggcaaggggcaataacttccccagcattgccacgtaaagcaggttacgtccaggctgttgccatggtgtttgtaaactgtcatggggctggtgggactgtgttatgccagagaacaatgaggcagctagggatcgccttcctcgccatctgctggttcctgctgctttccttactttatcctttctggaccagatcacgttttggtcagcaaggttgtgaccagaaatgtcctgctggtttcctacctcagaacagctcagaggctgcatgtgggtggcccgcccttggctctaatagggtctctggctatggaaagcaggcttgggcctctcaagaggctgggggccgtccttatgggctgtgctctcatgtcccctgcaatgcatctcccccaccagcctgcctggcctgggcacattgattgttgggcaactgtcactgtggctgctgtcacctcccccgaggttctccccattaaccagctggctgcactcctcgttagaccctgccaactggggcctccgaaggggcacagagccagcaagtttgtccctcctgccatctgctgggaagggccagagagctggcccctccttccttccacaatcaaacatggaggtggcaaggaagtctccagagcctgggcttgaagtttcgagtcctggcttgggatccagtgtctgcacatcccacaggaaggccggagacagggaggagcctggtgggaagacattgtcagggagggcgaattataaatgaagagatgcggctggcaccaatcagatgggcggtgcgggaatgggaagcaccaggtgccagcagcaggtggataggcagctccagtgcacctggcgggcaggtgcagccccctcaaatgccgcctggccatggatggtggagattgctgggtcacaagccatcccagcacaacctcctggcgttgcgttctttcttccttaatagcatcctgtaaatgttcattaatgagggcctgactgggcaaaactatgctactgttttctctgaaaagcttttattgtgccataattcttgaacgagaagttggctggacactccatccagcttgacagttcacttttctcattctttgaagatgtgctaggcctggcatggtggctcacggctataatcccagcaccttgggaagccaagccgagtagatcacctgaggtcgggagttcgagaccagcctgaccaacatggataaacccctgtctctaccaaaaatacaaaaaattagccaggcgtgatggcacatgcttgtaatcccagctactcaggaggctgaggcagaagaatcacttcagcccgggaggcagaggttgcagtgagccgagatggtgccattgcactccagcctgggcaacaagagtgaaactctgtctcaaaaaaaaaaaacaaaggaaaagatgtgcttccacttttctctgactctcattgttgatgaagagtagtcagctgtatttctttatcatcacctctttcaggatcggttcaccgttaacagcctgcaattgtatacagttcactaagtgtgcatcctcgttggcattcctacatccgagaattcttacctttcaacatttttgaaaaatccccagccattttgtttttgaatgttgcctttccccattccctctgctctcctttctggaactctgattagatttatattagattctcttctctactctgtacttcttagcttctctttcagattttctatctccttatctctctgcactcctaatgggtcatttcttctgatctactttctggtcaataaattccctctttaccagtgtgttatctgttgcttaatctgcggtgaatattttttatggcatttttcatttctaaagttgaaaacgcacattctgatgatggtggtgatggtgacaatagtgtgtgataatgatgatgatagtgacgatcatggtaatgatgaaaataatcagtacaactatcaaagattggccaggcacggtggctcacacctataatcccagcactctgggaggccgggtgtggtggctcacacctgtaatcccagcactttgggaggccaaggcagacagatcacaaggtcaggagttcgagaccagcctggccaatacgtgaaactccgtctctactaaaaatacaaaaatcagtcaggcatggtggctggcgcctgtagtaccagctgctcgggaggctgaggtaggagagtcacttgaacctgggaggcagaggttgcaatgagccaagaagccaagatcgcaccactgcactccagcctggacgccagagcaagactccgtctcaaaaaaaaaaaaaaaaagaaaaaaaaaagcactaccaaagatcatcattgttggctgcacttgtggtttcaggcaggtagccttggcgagtttgttcatacctcatgatcattggagctgagatttgcaaactgctcagtgcagccctgactccctgtgagtcaaaagccacttctcacctcaccaggagctgtggtgtttgttgggtgtcaatgtacgactttagttgttgttgttttaaagttctactgtgtgtttttttaaaggaccagtgaaatttgaaaatagccaaggaaaagaaaactggttcccacaatcacagacaccaccatggaacacaccaaggcaatttcttcattataaaaattttattatgaagagacaggggccggacggggtggctcacgcctgtaatcccagtactttgggaggccaagatgggtggatcaagaggtcaggagattgagaccatcctggctaacacggtgaaacaccatctctactaaaaaaatacaaaaaattagccaggcgtggtggtgggcgcctgtagtcccagctattcgggaggctgaggcaggagaatggcgtgaacccgggaagcggagattgtggtgagcggagatcgcgccactgactccagcctgggtgacagagcgagactctgtctcaaaaataaataaataaatagataaaataagagacagggtctcactatattgcccaggctggtctgtgaaccgctgtgctcgattggtcctcctgcctcagcctcccaaagtgcttggatcacaggcatgagtcgccgcacctggccaacacgggggcagtttttgatgcaatgtctgcagtggctggagggagctgggctcctgctcacatcatgctttgtgcttcggttgctcccacttcagggctgcactcaccctccctcagcaaacctcagacttggaagaggctaccatgagggtgtgtggcttggtttagaccttgttgacaaagaagtcagttaatcccaagttcagtaactaataaacatcagcacatggtaacacacagtctaactactagtttttttgtttttttttgtttttgggtttttttttgagacggagtcttgctctgtcgcccaggctggagtgcagtggctccatcttggctcactgcaacctccgcctcccaggttcaagcgattctccagcctcagcctcctgagtagctgggattatgggcctgggccaccacgtctggctctgtgagtcagcacagggaatcttaccatggacgctgccgggagatgcagggccactcaggtgtgcacgtacactggattcaaatacaggcagcagacatagacaacgatgccgggagaggggcggctggcagaagaatggccccaaagatgcctgtgttttcatccccagggggagcctgtgaaggcgcagcctcatgcagcagaggggagttaaggctgcaggggaagttgaggttgctcatcagctgacccaagatacagagattaccctggatcatcctggtgggcacagcataatcacaaagttcttatcagtggaagaggggtcaggaagaataccagagaggtgggatgggaggactcaatgggctttgaagatggggggggtgccatgagccaaggaacggggaggcttccagaataagcagctggttctcctcaggagctcccagctggggccagccctgctcacgcctggacctcagccagtgagacccgcttcagtgagccccactggctcctgaaggctgctgcacctgactcaggatagctgggacttggagtagggtgggacacagggcacagagggccggccagggctgcaaaaagatcccggtggcacctcatgagctggggacaggggtcctgtgcccgaccatcttgcgtctctttttgtttctacctttgcaataataataatacaagtaaagtcagatagaagttcaggaagcatgcacatgggatgctccagtctccagccagcacgaggaaatcatcactctccaatcaaaggcagagggcgaacaatggcgccatcacggtgcactgcagcctcaacctcctgagctcaaggggtcctcccacctcagcctcctaggtgctgaggaccacaggcgtgcagcaccattcccagctatttttttttactttttgtagagatggcatctcactatgttgcccagtctggtatccacctccttacttaagcaatcttccttcctcagcctctcaaagtgctgggattacaggcataagccaccgcacccaggcccgaggttgagcttttgagtggctgtcaccctactttccacaacagtcacaccgattgctgttcccatcagcagtgcatgccaggcctccacatcccaccaacacatgctgcagcactgtctgacttcagcatctgaatgcatgagaagcggagtctcactggggctgtaatctgcattctccagtgaccggcagtgccacgcagcatccccctgctcactggccactgtatgtctatggagaaacatctgtccagacccatcgcccatctctgcacctttctgctcatttctaaggtgagaaaacagagggtggacaaggtgagggaagagagggtggagaaggcgaggggacagagggtggggaaggtgaggggacagagggtggagaaggtgaggggacagagggtggagaaggtgaggggacagagggtggggaaggtgaggggacagagggtggagaaggtgaggggacagagggtggggaaggtgaggggacatagggtggagaaggtgaggggacagagggtggagaaggtgaggggacagagggtggggaaggtgaggggacagagggtggggaaggtgaggggacagagggtggggaaggtgacgggacagagggtggggaaggtgaggggacagagggtggggaaggtgaccggacagagggtggggaaggtgaggggacagagggtggggaaggtgaggggacagagggtggggaaggtgaggggacagagggtggggaaggtgaggggacagagggtggggaaggtgaggggacagagggtggggaaggtgaggggacagagggtggggaaggtgaggggacagagggtggggaaggtgacgggacagagggtggggaaggcgaggggacagagggtggggaaggcgacgggacagagggtggggaaggcgacgggacagagggtggggaaggcgaggggacagagggtggggaaggcgaggggacagagggtggggaaggcgaggggacagagggtggggaaggcgacgggacagagggtggggaaggcgacgggacagagggtggggaaggcgacgggacagagggtggggaaggtgaggggacagagggtggggaaggtgagggaacagagggtgacaaccatccaagtgtgaaactcatgggtatgtgcttgggctgcagacaccctggcctcaccccaccttggcccttttgatccatgagactgcacagttcccctcctggacccttggttccccccacacccaggaggcatagaacaggcaggacatcctgtggccagaaagatgatcgggggtctccagggcacggagcccccacccacacactacagtagggattgacagcagcctgaccgccactgccctttcccctgtaaggtggggttcccagtggatggccagagggtcccaccccagtggctccaatccccaccctccacgtcagcaccagccaggtggtcaccgtcaatgaccctgtcaccctcccgggggaaggggcttccaggcccacagccctggcaggttcatgtggggcactggccctcttcctgccccacccaccagccctgtggtctgggcgcctggctcacacctcccttcctcccacacgcaccagccacaggctccagggtctcagaggaactcctgggacatccctttatctggcaccaaagcccggggcagggcctgcatgttgaccgactgccttctctgctctggctgggctgaatagct

SEQ ID NO: 477 - DNA, 5250 bp, Homo sapiens
atggatgcgggggccatcccgcaggtgctggtgatgatggagatagcagacatgggtgcgggggccctcccgcaggtgctggtgatgatggagatagcgggtgtgggtgcatgggctctcccgcaggtactggtgatgatggagatagtgggcctgggtgcgggggccctcccgcaggtgctggtgatgatggagatagcagacatgggtgctggtgatgatggagatagcagacatgggtgcggggccctcccgcaggtgctggtgatgatggagatagcagacatggatgcgggggccatcccgcaggtgctggtgatgatagagatagcagacatgggtgcgtgggccctcccgcaggtgctggtgatgatagagatagcagacatgggtgcgtgggccatcccgcaggtgctggtgatgatggagatagcggcggccgtggacgcagctgataagatcggtccccggagatgggacaaaggggccgccatcggctcgagggctggtcatatcctgcccgaaagggccgagcagggcctgagatgcggcaagatgctatctcgggtttattgcgtctcagaaggatgttctaagggcagcagaggccacgtggatgcccgtttgtgggtctctgcacacacggtggccggacggcagatccggggctgccctcagagcgctcgccacccccacccgcctttagctgtcgttcctccaaccccaccagccatgaaggcccctcagggctggaaggctgtgtgcggtctcttcggcaggcggtggtgccctcctcctccaaacacaggcactcaggtccacggtgtcccagtgccttggggacacagccgttcaacagccggccctgaggggctgacagtccagcaggaagacagagttaatgaaatcaagacctctgccccctggtgccctcaggaggtggcccatcccgacgctcactctgaacctctcccagatgtggccttcggtgcctgccgtgggccctggttggtgaatcctgggaaccagggctctgcctcccgagggtctgactttggagccggtgaccttgggcaggtcacctcaccccctgttaaatgggctccaggtcctcaggggccccgcggggtttgcctgcgtgggaaccaagcacaggtgatcagcaagcgaatccgcacgcggcgcgtcatcgtggacagaggggccggcttgccccgccccacgcagctgacccctggccaccccggatgtgttggaagctggtgttctcggggcccacgtggtctgtgcaccagcctcaccgccagtccgctgacccacagaggcttccagaaccccactcacagggtgacgccttcacctgcctcctcaagtcagagctgtgagccagcctgccagggccagggctcagccccacacccctccgatccctggactccttggaggcccctcgcccagcccccggccatccctgagtggtgggttctgcccctgggcgagtggaacggccacctttatcagagccagccctctctggcagtgtgtgatacccatacccagaaggggcggccgccacgggaaatgccagccacgctcttatctgggaggcttggccggctggccctggagctccgattagggagcaggaccgtttgcctgtgggtgcctcgtgggccggcccttgctctggagaacgaccatcgcagggctcacagctcgctcaaacccagccacaggcatcctcctggctgcgtccctacaccccacagtgccctagagatcttgctgcagggctgcccaggcccctgggacccagcacctgcccggcccctgccattcaccccaggcccccaggactgccaccctccactgccccttgggccaaccctagcgggagacgagctggagccggtggtgcaggatgggcagaggcgcatacgggcccgactcagcctcgccacgggcctgtcctggggcccgttccatgggagtgtccagaccagagcctcatcccccaggcaggcggagccgcatggacctgagattgagactaaaacagagacgcgccagcttgataatgatcgcagcttcgaatacgctagtacatgcgcttcaacggacatccacacaagggacgacgaacacgagggcacacgagatggcaatgcttgccactcgtcgcgagtgcgattgctagccccgctatggccccacaccgtgcctacctgctatttctgggcggctccacactccaggactcacgggagatgcagttctgttcactgtgttccccacacctggcaacagctggtgcacaaggcctgcctgccggataagggacagccagggcagactggcagggaggccctcaccccttcccagcctgtggtcgcagaagtaggagcggcaggcccctctgagagtgtttggcagtgggggccgtggcaggcctgccccagcagaagcccccatcggagccggcagagccccacagctggcgtgcagttcctgagccctgctctgcggccctgggaatcacgggggtgtcctttaaaaggggggcacccacccgatgccagcctgcacaaagcacctttctcggggcagccactcaccacagtggacactcagcatgtgctgccccggacatgccctgtggacggcaccccatgcccactttgtcctgccagggtcccacgcgtgctggcaaagtccaggaaagctcatgggctggcacctagtggggagagcccagccctgaccctgctgctggtggacgaggcctgctggctgaggacgctgccccaggccctgactgaggccgaggccaacacagagatccacaggaagggtcagtatgacgcggcacctccgtcccaagccttccggaagggtcaccaagccggtgcctgcggggggactcctgagcgtgctcctcacggccgagccccacagcacccccggccaccctgtgaagaaggagccagcagagcccacgccgggatggcctccatccttgccaccgcagtgatcaacagacagcgcgtggccatcgtggacaggcacgagtcacgcagggaacacgaagcaagtctggctccggccagcggctggggcttcccaggggaacagggacggcaccggatggcgtttggagggggacggctggccttcagcctgaccccgcctgcttcccaccccacagaagacgtcttcccctgcaaggactgtggcatctggtaccgcagcgagcgcaacctgcaggcgcacctgctctactactgcgccagccgccagggcaccggctccccggccgcagccgccacagacgagaagcccaaagagacctaccccaacgagcgcgtctgccccttcccccagtgccgcaagagctgccccagcgccagctccctggagatccacatgcgcagccacagcggagagcggcccttcgtgtgcctgatctgcctgtcggccttcaccaccaaggccaactgcgagcggcacctcaaggtgcacacggacacgctgagcggtgtctgccacagctgtggcttcatctccaccacaagggacatcctctacagccacttggtcaccaaccacatggtctgccagcctggctccaagggtgagatctactcgccaggggccggacacccagcaaccaagctgcccccagacagtctgggcagcttccagcagcagcacacggccctgcaaggccccctggcctccgcggacctgggcctggcgcccaccccatcgccaggactggacagaaaggccctggccgaggccaccaacggagaggccagagcggagcctctggcccagaatggaggcagcagcgagcccccggcggcccccaggagcatcaaggtggaggcggtggaggagccggaggcggcccccatcctgggccccggagagcctgggccccaggccccgtcgcggacgccgtcgccgcgcagccccgccccggccagggtcaaggccgagctgtccagccccacgccgggctccagcccggtgcccggcgagctgggcctggccggggccctgttccttccgcagtacgtgttcgggcccgacgcggcgccccccgcctcggagatcctggccaagatgtccgagctggtgcacagccggctgcagcagggcgcgggcgcgggcgccggcggcgcgcagaccgggctcttccccggggcccccaagggcgctacgtgcttcgagtgcgagatcaccttcagcaacgtcaacaactactacgtgcacaagcgcctctactgttcaggccgccccccggcaccggcgctggccgactaccacgagtgcacggcctgccgcgtgagcttccacagcctcgaggcctacctggcgcacaagaagtactcgtgccccgctgcgccaccgcccggcgcgctcggcctgcccgccgccgcctgcccctactgccccccgaacggcccggtgcgcggggacctgctggagcatttccgcctggcgcacggcctgctgctcggcgcgcccctggccggcccggggggcgtccagactcccagcaagggcacgccggcgccgctgcccaacggcaaccaccggtactgccgtctttgcaacatcaagttcagcagcctgtccaccttcatcgcccacaagaagtattactgctcctcgcacgccgccgagcacgtgaaagccagggctgaggacaaccgtgtggtggagtcacctgtggtggctgagtcggtgcaaggggctgggtaccgctgccatcgcccgtcccaggtcattggcgtgtggccagagcccgtccccatcgcacccaggactcgcctcgggcacgcgtcttctgcacagaccctggggcccccacacctggcagacgccatcagtcacccctactccctcaagccatcaccccagtctccccccaccagaccaccgcctgggcctccaccctgtgcctcccctgtagccgctgactcggtggtggcccaggccttctcccgcctctccccaggaagctgcctgccctgctcacagacaccccctcggccccccagctggttctctgctgagccaggcatcctcagtggccccctgcccctcaagctggagagcatcagccttgcctattcacccttcattgtcaaagcaatgcttgatttgtccaaatcccaccgcttcccaaacccatccaccatcgccgactcccagacctgggacttcacccttgagtctctc

SEQ ID NO: 478 - protein, 1730 aa, Homo sapiens
MDAGAIPQVLVMMEIADMGAGALPQVLVMMEIAGVGAWALPQVLVMMEIVGLGAGALPQVLVMMEIADMGAGDDGDSRHGCGALPQVLVMMEIADMDAGAIPQVLVMIEIADMGAWALPQVLVMIEIADMGAWAIPQVLVMMEIAAAVDAADKIGPRRWDKGAAIGSRAGHILPERAEQGLRCGKMLSRVYCVSEGCSKGSRGHVDARLWVSAHTVAGRQIRGCPQSARHPHPPLAVVPPTPPAMKAPQGWKAVCGLFGRRWCPPPPNTGTQVHGVPVPWGHSRSTAGPEGLTVQQEDRVNEIKTSAPWCPQEVAHPDAHSEPLPDVAFGACRGPWLVNPGNQGSASRGSDFGAGDLGQVTSPPVKWAPGPQGPRGVCLRGNQAQVISKRIRTRRVIVDRGAGLPRPTQLTPGHPGCVGSWCSRGPRGLCTSLTDLTGFQNPTVTPSPASSSQSCEPACQGQGSAPHPSDPWTPWRPLAQPPAIPEWWVLPLGEWNGHLYQSQPSLAVCDTHTQKGRPPREMPATLLSGRLGRLALELRLGSRTVCLWVPRGPALENDHRRAHSSLKPSHRHPPGCVPTPHSALEILLQGCPGPWDPAPARPLPFTPGPQDCHPPLPLGPTLAGDELEPVVQDGQRRIRARLSLATGLSWGPFHGSVQTRASSPRQAEPHGPEIETKTETRQLDNDRSFEYASTCASTDIHTRDDEHEGTRDGNACHSSRVRLLAPLWPHTVPTCYFWAAPHSRTHGRCSSVHCVPHTWQQLVHKACLPDKGQPGQTGREALTPSQPVVAEVGAAGPSESVWQWGPWQACPSRSPHRSRQSPTAGVQFLSPALRPWESRGCPLKGGHPPDASLHKAPFSGQPLTTVDTQHVLPRTCPVDGTPCPLCPARVPRVLAKSRKAHGLAPSGESPALTLLLVDEACWLRTLPQALTEAEANTEIHRKGQYDAAPPSQAFRKGHQAGACGGTPERAPHGRAPQHPRPPCEEGASRAHAGMASILATAVINRQRVAIVDRHESRREHEASLAPASGWGFPGEQGRHRMAFGGGRLAFSLTPPASHPTEDVFPCKDCGIWYRSNLQAHLLYYCASRQGTGSPAAAATDEKPKETYPNERVCPFPQCRKSCPSASSLEIHMRSHSGERPFVCLICLSAFTTKANCERHLKVHTDTLSGVCHSCGFISTTRDIKHLVTNHMVCQPGSKGEIYSPGAGHPATKLPPDSLGSFQQQHTALQGPLASADLGLAPTPSPGLDRKAEATNGEARAEPLAQNGGSSEPPAAPRSIKVEAVEEPEAAPILGPGEPGPQAPSRTPSPRSPAPARVKAELSSPTPGSSPVPGELGLAGALFLPQYVFGPDAAPPASEILAKMSELVHSRLQQGAGAGAGGAQTGLFPGAPKGATCFECEITFSNVNNYYVHKRLYCSGRPPAPADYHECTACRVSFHSLEAYLAHKKYSCPAAPPPGALGLPAAACPYCPPNGPVRGDLLEHFRLAHGLLLGAPLAGPGGVQTPSKGTPAPLPNGNHRYCRLCNIKFSSLSTFIAHKKYYCSSHAAEHVKARAEDNRVVESPVVAESVQGAGYRCHRPSQVIGVWPEPVPIAPRTRLGHASSAQTLGPPHLADAISHPYSLKPSPQSPPWPPGPPPCDVAADSVVAQAFSRLSPGSCLPCSQTPPRPPSWFSAEPGILSGPLPLKLESISLAYSPFIVKAMLDLSKSHRFPNPSTIADSQTWDFTLESL

SEQ ID NO: 479 - DNA, 151834 bp, Mus musculus
  misc_feature (1)...(151834): n = A, C, G or T/U
cgcggggagcgcgcccatgggtagcgcgggacggcggcgggcggcgaggccctggcttctgcgcgccggccctggcggggtccagaggaccgcggctccgaggtgcgtgccggggggtgcggggtgcagggcgcagggaccggacctgcccggctgcgcgcaacttgcgggccgctcccccgggactcccgctcctttgtacgcgcgggctcgcgtctccgcgggtgaggaccgcggtcgggaagcgaccggcagcgccggcacattcatttgagcctggtcgcagaatcccgagaatcaatttcggctcgtctcccggagagcgaaagccgaggacaacttggcgtcaccccttggggagacgtttgtcgtcattaaccatcttcggctacattaattcagtccgggccaacgtcagcacgggcgaacggacagcaagtgcgtcctcacgaattggggctgggcgatacctgattttggtcaaaacaggtcttaggcgcttcgggttctgcttggagttgcctcggtctgcgcaaggatggctttgagaaagaaggccaaacagcgagggggaaaggcagaatgcagaacaccccaaaacccaagtcatccgcagaaaacggggcgtcttggttattctcattggttttccccagtaacttcaaaatagtcccagaaatgttccttttgtctgcggtttcacttctaaactttaacactagatggctttcttatgacaggcattttagtccgctgcccgcttgagtttcctgcgtctgcagtctaggctgggatttatttatttatttaacgtcttacaaattggaatgaaaggaagaaactatcccaaactgctgctttatttgaaacatagtactcccctgtaaggcttaaactggttattatatttcttttttcaaatatggaaagtgggctttgatctctagcgaccagaggtgactacgaatgagcgagctgcttgttactgggctctgcatcgcggaggtcttgatgtctttggagaatgtggagttcttgggtgggtttggtgataagagctgcatagatttcgacatgctgtttatggctagctggagcggtttccggaacaggcagcaatgggatctattgcagggggtggagggtggttgggaggggggaagaatagtctatcttcagttttgggcgcgtgtgaggctgttcatgcctaagggttgaccggcagcatttgaggaagatctgtagctgagtgcgtctgcctgagtcatactgagggttgtgtcacggacctctgcgtttccttctcccctggtgagatctggcttgtctcttcccagcacggctttttaatgactagtacagtctagtcattaaactagtgcctctagttaaccgatcagtggccacagcagattcttacattctgggttaagtactttttttttttcagggggtcggatttgggaattaaacctataggcttgggtatgatagacaagcaccctaccacaaagctacattcccagcctcatttattgttatttcaaaacagtgagccatttactattattttgaaagaggctcactaagctgcctaggctgacctcacgctatagctcaaacagactttgaacttgtggtcccctgcctcatgattggcttggatgacaggtgtgctctgctccaccccaattcattttccttacttttgttctacaagtaaaacatcacaggtagcccaagtcttgccctggtggtaggcaggcttattagctgaagaaattgaaatttggctttatagttatttcttgtggtttggctggcttaaattataacgttaaatttgtatgttctaaattaaagtgtattcataaatagctaaaggggggggaccccaactgggtaaatgtctggggaacatagcaaacaggaagggcttccctcagtacccacgtgctacctatagatggggtgaggtgaacttgcataagaagccctgtagacatttcctccggaggatggagagagcacaacacagcatccagttaggaggtggaggtggagcttctgcctgggagtgcggctgagaattgcactgtctggcttaagtgtatagtttttagagcatgattttgttattgtaaaatattaggctctcgccaagagcgtttgctttagcgctgtaacttctagcttcgttagtgggatcatcatcttggtcaaagctatggagtatacatttggaaggtgcaacccctctccccgtatgataatgcatgggctctttgatacctgagcttagtcacttttccagagtttggggaatcctcttcacctgagataaaagggacagttggttggatacacttgaagatctatttctgaaacaggtgttagtacaaatcattattatctggtaattgaagctggcttgacaaggccgtgcacaggcctcccaactgtgcttctgtttacatggacctgcttctcacccttggctccaccagtacttgttaaccccagctttagagaaccttggcttgtctttaaacttctgacctcaatgtggaggtagttttagatatgtgtctttacaaagacaccgtgagtcctaagagaacatggactgaccatacttgtttacttaagtaaaatatgaagtcaagccttgtagactacaaaaacccgaggtctagattctcttcctgaacctacacaagtgcttctttttcgggtgagaagaaggggtaggaacctcaaggggcagtctctagtcccaggtgagtttggataaagtataaaccttttggctccaaaaatattggtttctgtctctctgtcactgtctctgtcactctcttcatttcattttttattatttagagtgagtgtgtgtgtccgtctgtgtgtgtggcatggtgtgtgtgtaggtcagagggcaacgtgtagaagtcgattctcctctcatcacatgcgcttttgggtctgaactcagggttggcagcaagtgcctttacctactgagccatcttgccagccccctttgtttctttattgtttaaaaatgcatgtattagagcaataaaaatgtctgtttggccagaatggtttatatttcccatgattacgagttctgctggattccgtgtattgtaagtttgtgtacagtgaacctccgtatatggatttacagttgctaggtttacctttgaagtcagtggctcaggaatcgcttttcgctgccaattgcattcagctatgaccctttttaaggagcggtaaccatgcaagtggaattcaaatgtctcccaacttcaagggtaaattggtttgatggtctctgaccctgagttcagagtgacaatagtggcgagtgctctgcagctcagatctgatgcttttctcctgcgagagccactgtagtagtgcaggctgcttctgagacctgtttcctatgctgtgttgtgtggagactgagtagtggacagtgcgacaggctgtgagctgagtgtgattgtcatggagcatctctgtgccagaaaggatgtaagtgaagcagaaatgccttcatgcgtaccactgtttccatccatctataaaacttagaaaacagaaccaagccacatgtggtggtgtactctgatgatcccagcactgggagcagaggcaggaagaccaggagttcaaagccatcctcagctacataatgagttctgcaacagcctggcctacatgggaccctgtctcacaaaatcaacacaaaagcagattttaaggaggttaggtttatatgcatttggcattgctaccctaaccatattacttaaatatgcgtaagtatattaatgaaaccaactctagccatcactattatcagtgcttttaatcaagataacataaaaccgtatatggtagcccttgtgatctcagcactaaagaggttgaggcaggaggattgctgggagtttgagggcagtctggcctacagagttggggctccatctcaaaacaacgaaagagaagaagaaagtaacaggagaaaagatgtgtattgggcttggtccccacatggggtgtgtgtgtgtgtgtgtgtgtgtgtgaatgtgtgtgtgtgtgtaggcatgtgtgtgtgcatgtgagtatgtgtgagaatatgtgcatgtgattgtgtatctgagtgtgcgtgtgagagtgagagaacatttagtaaagtgacctcacatctcatctgacaccccccctccccacacacctttcccttgtttcatagtgaggctgtcactgggcaaagggtttagagagcacagcctgctttccccagggttctccactgcttagctcctaccgtgtggtttctgactgcactgagaaccgaacctgtggccttagcacagccaggcaaggtgactgagctacgttcccaataggccctagacagcttccaaaggggattttcctgtagtcactcagcagggcctgtgggagtggggatttaataccactttttgatggtttcagccctcaaaagattttaatctttgtttgcagtgcttgaggcttgaactctggtttcatacatgctggtgtggtgttctctcagtgagtcgggtgcctgctctgctttttcttttcagactaagttgcccaggctaaccttaaactccgtcactatcctaggctagtcttgaactatctcgggatcttttggcctcagctttctgagtagctgggaagacagagctgcgccaccaggcctgacattaggaagtttctatagaatatatagaatatagactatatagactatagaacacagcctatgctaccttgtcattgtaactttactgtttcaggacaaattctctagagcagtggttctcctcaaccttccctgccacccttcaatacaggtcctcatgttgtgataatccccaactgtaaaattatgtttgttgctacttcataactgtaattctgctactgttatgaatcgcaaatgtctgatatgtgactccaaaggggtcacgaccccataggttgatctagagagccattcacctctgcatccaagttgtcaaagtggggcccagtgagcagggtgtctatggctggccctgctgctgtcttggtgagcgtccctgagtccaggactgttctgtgatagtcaccttgctgctctgtttccttgttactagttcctttgttttggaatttggttctgttgacaactcagcccttcctctcaggactgttgccccgggctggggtgggtaatgacactggccaccgagtctgactcctgagtttgaaccctggacccatgtggtggaaggaaagagccgactcctgaaagtcattctctgtccttcacacatgggacatgtatgtgcgcctcccctcctctaaataaacgtgaaggaaagaatgtgccgcctgtaccttagctgaccctttataccgcttcctgtacccctggtgggattgatcaattgcctaggcacccagtgggtcatctttagccataggggctcccttttgggggctccaaggaatcatgttcttatagccaagcactaggacatgtgaagtgcttggttttagtaactggctgagtctctttccccttctcacaggctattatgaaagatggcacctaacttgctttacgagttctgctgactgagattttctaagtcagaagtgagtctgtgttttactgtgtccctcgttagacctgctttgtatgtagttagtgattaggaaatatatgcttaatgactgactggctcttatacattaggggaccctgtggctttctaaagacccaacagaaaggacatggaaaaggggatagagctagaccgctgctcctgccctaagatttgcatcatcttatgtcccttgcagttaggggaagagccggtgcttccctggtggtgtcccttttagtggatggacagtcagatacactgattgttgctgtaatgaaagcagcttgagaaagggagggcttatttgggttcatagtgagcatggtggaaaggcagatcagaagtgtgtggccactggtcatattctatctagtcagaaaaagagataatgctggtcttcagactactttcttctttttaagcagcgtggaaaccccagccgtgtgatagtactgctcacatttagggtgagtgtgaagacccacttcagttaacaccaaattagaacacagaggtttgtctcttgggtgataagattctagctctcagtgaggacattacagctcgcatctcttccttgtgtactactatccctcagctgtaggagcgtctggaactctgtctgcgggtttcccacttggtgtatgtgcccttcctctgaggaatgtccccttttatttgtggtgaagtcagaagtccaaagtaggaaaattagttagcttcccatcactaaggctgtcatgggagggaaggcgtggcctagcagctcacctcaggacaggcaggaagagtggaggggcccgatgtggagcagactcttcccatttccctcatatttcatcctggcctgttccgtgggatgctgccagccacactcatggcaggtcttccctacccagcaaatgccctggaattgacctcccagacacacccagacgaggcccttgccagttaggtgaggtggacactgtgtgttcagttacaccttttctgttgggtgctttggagccaggctctccttgggccagcctggatttcaccctcgagcctcagtgctgggatcacagagatgtgccagcaccgcagccacacctacactgaagaccagagcaaagagccggtgtttgaagttgtggctgtggaacatgggcatggcgcccttatgcacgtgggctcttgggcgtgtaaaacattatgcaaacccagagtcctgttgtgcatgttcccgcagacttccaggaggtgcggagtgtctggtgccgtgtgaccagcacagctctgcttctctgtgctctggggcgtgttttaaatttgattcccgtggaaccatgggattcatgtggttctggaatagctctgggctgtttcctctttgtattgaactgtctaataagggatttttaggaattacagttttggtcattcatccagtaaaatgctactgtttcaagtgtttaatgccttaatccagtgaacaatggctgttttgtagaagggtcttcaggctctttccactgtaaagtcaactctctgaatgcctgtatatattcatacgcatacaagaatacttgtgtctgaatatatacatgtgtctgtatgtatacatatgtgctgctgggcatcgtgggtcttgcctttaaccccagcaccaagaggggcagaagctggtgggtttctgtgagttcaaggccagtctagtctacatgacacatttcaagccagccagggctacacagtaagaccctgcctcaaaaatcaaaataaaatatatgcatacttatgtaccgtagatctgtttatgctctttatcatgccaagatctcctgaccatcatcaaatatgagcaaaagtatgagttttaagaaagatgtttttaaagtgttagaagtagaagtgttttctcttacaccccactctctatgggctgtgtgtttatccattgcatctgtgtgcatctgttgtctttcctggtggcctttctcctggtccctggaactacttgcgatgccttggttgggcgcggggatggaggtgcttctggtttagcttggctgcagagaaagcttcacaccattacaccgcctactgcacagagtgcggagtgataagacacgtcacctgtctgtgcagacatgcgtcagaagcatgtgaagagtgcagcctcacagtggggcattctgtatgacaggatggtggcacacactgtccctagctcatcgaggaggccccgtgtttccctgtatggctctagtgtgaagtgtccccacaggctcatgtttgaatacttggtccccagatgctttgagaacctttaggaaatggggcctgactggaaagtgggttcctgggacctggctttatggctgataaccatggtaataaccgctcgaatccacagtgccacactcagaacgcgccccagagcacagagaaggcagagctgtgcgaaccactcgggcaccaggcactccacacctctcagaagtctgtggagacccacacagcagatcactgggtgtgcacaatgttttgcatgcccaactgtccttgtttcccacaggaacagtttcagtttggccattagtaccagcctgagctcctgtttcctgagccatggagatgcgagcaagccactgctgcgcgtccatatcctcattccgtgggagccagagtaagcccatcctcccctaagctgcttcttcctggcgtttggtcacaaggacaagttcagcaagtagcctggcagcgcttaggctacaggaggcctggagtatagaaagatggcttccagctacctaccgtgctcccactctgtcctcctcagcagggtacagctccggcttgcacctctcctgatgtcacttttttgcacttgcctctgtgtctcctccctagagcatctttatcctgtgggcggggacctccctgctgtgttccccgggcttccgaagtttgtgccacaagagtggttcctgaccattgtggttaaatgattgtagttgtgggtttggacatgaaggagctctctgtgccttgacttttttttttgaagtaagttatggattccattgtgactcattctaagtggccttcctacttcctcctgcatctttcccagggtcacaggaagtggctgccactgagctatgtaggtgcagctgtgggaggcaggagttcctgcagaggggttagcagggctctgcaggatctggggagactgctgatactgtgcccaaagtactgaggtttggcaaggcggcacacttgccacctcctatgagctggtgggctgtcttttcctttcccagtgtcagtttggtcccccagggtggccctagtcctgttggaggctgaggggaaggctaagttctcttggaagccttggcttgggctacttgatacggcttactggagggacatgaattctgagtttctagcactctgttgcccttgcctgttcaacccttaagattccttctagaaatggggatgtttgagaatttggtctcagattataggccgtgctcccttgcttatgtgtttttcattgatgactagcaaagtctgttggaatattattaattatacctaagtttttgcttttatttgagataaggtctcatatagaccaggctggtcttgaactcaatctcccgagtgttggggttacagacatgctctgctagaccaggttttatgcagtgctgggggtggaactcggggcctcctgcacgtgaggcaggcactgcccccctgagctatatccccagcctgtgacaagcagctgcgcttagagcctaccaggagtctctcgtcatcataaccatcatcatcataaccgcagcagagtcgtggctcctcttttgtgtggaatctgagagccatggtcctctctccacactatgagcagagccacagcaaataagtagtaggggcatccaattggctaccaggttttatttagagccattctaaggccttctctgtgaatcacaggtctgatttctattttgaaagttccgatgggtaggaatgaaagagactgctgtgcttgccgtgtaaagagaatgaagagctggatgagaaccaaggccggtttcagacagctgtgtgcaagctttcctgctattcttccttgctcctgtctcacgggggagcacctgtgcatgcctgtgtgtgcacaggcctgtggaggccagaggacagccttccacaagcaacactcaccttgggctttttgggacaggatctctccttggtttgggacttgattcagctaggccgtcgccccgtccccaactctgggaccacgagcacataccactgaggaaagcttactgtatgtgtgttgaggtgacaggctccatctcaggcctcatgcttacacggtaagcttcttatcaactgagctgtgtcttcaactcctacataggaatttcatgaggccagtgagatttgtttgctgttaaagacacagtggtttaatgagaagtgtgctcttcctggatcttgtgcgttttttaatgtttcaaacctgggtctcttgggtccagctgtggtgctctgtcgtgtactgaacactgtaactgccttaagtcaaggcagctttcagtacgtcatggcaagagagataaattgaagagaaggaagaaagaaggtgggggggtaaagaaaggtgagggtatggggagtggtggaggcagctagcttactgagagtggggtgccaaggctgagggtggagctgcgtttctcagtcaggggtgctgggtgccctgtaatagcagcccagcctgggagttgctggtccttcagaggccatttcttcagctctgaaaatctctgccaagattaaaagaactgtaagaggggaacggtcttgtttctcatttctcctttgctacatttgcataatctttgttgaagccagctgaatgtgaagccctaaataaattccaggcatttaaatatttaaaaggattcagccacagctctctactcacccgaagaataaatgtgttcaacaaagaaaataacaccctcgcagatgcagcccggatagactgtgtccaccttgtcactgaattagaaaacgttaacagcgaagcttgcatttgacggattctgaaactggccgtgtgccaaaatattgtttccctgctagagaaagcggtgggtgtgtttcatgctggcagctggccagccaggggctctgacgcaatcactcggtccccataactgctttgcaactaattttagggcagttaaatccgggtgatgtctggtggctgccgtgcgtctggttcagtggcgctttctaaatccatccttttagcttggcaccacagcttctggttctccctagaataagcctggggcagaggggatgttgagtcagtgagggaacactgaggctggcaggtggggagaggctgggctcaggccttaccttgtgctgcgtcatggaggcaaagctcgggccaccgtgtgtgtgtgtgtgtgtgtgtgtgtgtgtgtgtgtgtgtgtgtgtgagacaggctgaggagggggtggggcacaccgaggctccaccttcctgcagcagccctcaggccagttttccttgcagtctctggtctctgccagcttcacggtgctaaaaactgaatccaaccatcctttctgggaaatgtaaagttagaaaaaaagataactaaaaaagtcataaaggagccgcagctatttggagtgtcttacagaggagaaccagagcttcgttctgtgtgtgggtgcgcatgtgtgttgacctttgggccagtcaaggacaccgccagtgtctttccacattattttcagctatgctggctggccagagggactcaggggtccttgtgactccattctccagggctgaaatcacaaacatgtgccaccttgcccagctttttatgtgggttctagagatcagactcaggtcctcatgtctgccagtaggcacttttcccagtgagccatccccccccacaactctcacagacagttttaataatgactaggggttacaggctacaggtctgcttgatagagccattgatggattgctgagttggcagggaacctccagagttccagacctccaagggcagacagagtcctttaccgcagctccggcagagtcggttcgtacagttttagaccttacagaaacccttgggctctttctcagcgggatttccctatctggctgtttcagattagagcttcctgcactgagggtgcttagagagcaatgggagcctgagcctgagctgagctttggaaaatggttgggatttggagcctttccaagtatggcactcatttagataggccttgaactcatgacagccttcctggttcagccccatgagcgctaggcttacaagtgtgcaccaccatgccagcgctggctctgttttaaactgtatttcaacataagctgtaagtacggaatccttgcttttcatgactgagcacttcctgttacctgaggtgaaatttctagaatgaaatgcagacagcttaagtgtgttgttcatcctgtgagtttgggcatgcgtgtaatctgttgtaacctatgcttcagtcagggtgtgaagtgtactgactccccagaacgcctctcctgtcccttcctgggcaacttgccccacccccaccccagtttctagttttctactgtgaagtgttgcatgttcttgaggagatataaatagcaactcagttacaagggtcacactctcagctctgtgtggaaatattactatattaactttagatctgcctttaagtagatcacacacttcctttgctctccccatgggctcagggatcattttcagtggcctgcgatttcgggagcagctttctctctctcacctgatctctttgtcgtttgtactccaattccctgccaagcagtgacttcctgccttgtccaggcatccatccacctgcctggtttttaccactgtgcactcttgagactcaggtgagtctggcctctgtgtcctggcatctgcacagggctggcaggggctcctggcactggctcaactgctttgcctctgaagatgggtcagtagagctcagctgttcagctgtgtgtgctatttggaaaacttgaggcagaagaagacatgggtgtgtccttgtgaagcggaggactcatttttagttcaaacacaacagttgctccaactccctgaattcagtttgatgatgtcatctgtggaggacacgaaccacctaaaccgggaagaccagatttcggatctgctgtgctgaagtgatactggcgaatgcaggaaaatctcggaggaattacaagtaactttcagacctaagagctgcgcctttgccatgccttagttgccgaagcctgggatgccccggcctctacagctgtgagcagttctagcttctactcaatgtttgcagttcctggtggcttcacgtgtttgttttcagtgtgtgactcttgcacggggacaggttggctctggtgggtactctccctggtcaagaagacccactcgagtatagtgctgacatccaagaagccttcctttgtactgcacagcctgaggtctgtgcgatgctactctgaacctaggctcctcccatgtccttcctccttcataaggcttcatccccatctcaccaagtgacccgtggtccccactcaggcttgctgagaagaaaggaccgtctgtgaggtgggtggctaagggtccctctcactttgcccgcattcttctgatgaccttacctgatcccgggaagctgggaattgttgttactgccatccctggcttatgttagttctgtggaggtgactccagacttcatgactccttgtctgagattgatgctcatgaataaggcttccctgaaacctgcctccatagcaggtgactcctgagacatcatgtgttgttgggaaagtgaaccagtgcagttgatgatcctgggccctggttcatcctctacttttatcctacactgtaaggggtgtgtgtgtgtgtgtgtgtgtgtgtgtgtgtgtgtccatggctgtggtgtccacggctttctcaccagagcctcagtttctgtacctgtgaacagggggcagttgttcaccatgttcctgggaggagtctgtcagacacccaggagcatgctttgcgatttccgtgggctcctctggaccaggctcaggtctgcaggctcagcccttggtggtagaaggcagcttggtgttgctgttgggattctttcatcgtgggaagagtagactttctaactatgcttcctggtcagtcttaaagtctttgctattgaaggcatcactgccctgtgctgcagaccgcagttggttccatgtggaggagggggagtaaaactcagtatggatatgagtgagggcagactcttggaactgcacctaatgatgcttctggggacatggctcagagagtgtaaggaaagacctggcttcccatttacaatccagagaaggtgaaggggtggctattccaggacaggcgtaacagtgactgctttctcaggggctctggggtgtgcgtacattcagaaatgttccatgggcatttcggctctgtcccaccagcaggagaggacttcaggggcccgctggctgctagcaccttacagtgccctttccaggtgtcagctcaggctcgtagtagtggccactgtggagcttgtggggccgtctgtggttgcccgagggctgggtcagtgtccaggggctggtaatggtgtggtcagctttcctgggcctgccttagttctcctgtgtgttctaaggacgtgcagagccatccatgaaggcaatagacgttcttttcttttaaatttgaggtagtctcgtgtatcgagtgagctcagcatacactcatctccagcttctaatcttcctgctcctgtctcctgggtgctaggattccattcccagtctgcttttccacatctggtttcatgcagtgctggggatcaaacccagggcctcacaatattccctgcaaacactctaccaactgagctacatcttcagtctgacagtagccctactgtgctgtgtgttaagactatccagctgtgggcgaccgttggccttttctctgaagatagaaacatttatgttcttgaatgaatcttggtggcttgttagctgattagaaaggggcgggaccctggttgaaatgacatttgagaacttttcatagactggaaggcatcccagccttttggtcggccagggtgagtttatccccttccccctttttgagatgagccttgactggcagggatttactgtgctgaccacacttgtctctactagaggcctccgcagggcggggcagggggtgggatcatggagtgctacacccaggccaagctcatcctctgcccttcccccgctgctgtctgttcaggtgtggcagctattgtgctgagtttgcccctttctctaggagttgagttgtgaggacctgggaccctccccaagatcagagcatagctgctcaggtgtagactgagcagagagcctccttgagccctccatctgactcggggcagtggctgtggctaaggagctgcaggacctgtactatgttcctgctgccgtagtttgggacgtatgtgtccatgtatgtagttcatacccttgtatttgtgtgttcctgtgtgcagaggacagatgccagtcttggcagtggctcttaaggtattgcccaccactcttgagacatgatctctgactgtcatattggggcttgtattggagccctgatcatctacactggctggccagtgagtccagagatctgcctgtctgcttccctagctcttaagatataagcaccgactaccatgctgggctttatatggtggggtctaggtttcatggtaggatttgaactcaggtccttgtgaggtaagctattactttgccatctgagcctttttcctggtccagtttgtagcgaacaaaagaacagcctaatggtggacatggaacctgaggacactgtcgttgtcttaagtaaaatatacacctgtatgaaagcaggaaaactgacctgggagctctgggagtctgattaaacccaaaggccgtgttttaactgtccatgggtggacaggcatgcacactgaccagtgtccttgtcacttgcccttcattagctggactcccttccactcgtgctgttaggggagcatcagcagagccccggggacaatgaggtggtgtggcttgttggccaccggtatggctgaccatgagttctcagttcttgtcttcatggaggattggggaggtgccagagaaattgcaggtcttggcaaccctggagaagtggtttttacatagtaccctcccactaagtgttctttctgttattgttggactcagaagaaaggcctactgggccacaccctgaatctggggagagtcccgaagttctgggttcagatacttccctgcctgaggctcaggagcaggctgtgtctagtggatatagaatggtcctgggacctggaggcttgggccctctcaattggggtgaattaatttggcagagtaaaaacattttggcagtttgtcttttttgttctcaaatagcaatttattttgagacagggtctctcatatagctcagactgacctcagattcaagctgttgataaaagcggataaccttgggctcctgattctctgcctctatctcccaagtgctggtgtgtgccatctcactcagtgcataccatgaggatctctcactgcccttcgagtgagtagagaattgtcccgtgcccccaggatgcagctcaggcccctgtcagcatgagctcctcctgagcgcctctggaaatgccaggcagggctgctgcccacaggcatattccctccactctgtggcctgccctgggctctggtgagatggacttacagacaggacacagaggtgcatgggatgctccaagggctgtacgaagctgccccaggttgtcagaatggctggtgtctcggtgaaatgcgtgtgccctttcccacttcgtgtttgaagccaggaaggatccaggaatcagacaaatgcttctctgtttatcagttacagtgaatttctgtggtacaactcagggagaggagtttccctcctccatcctccatcctcacatcacccagtctttgatcccttgttagcctctaagagcccagggctggccctacacctgccaggggttcctgtgtcttcctccagcatcacacaggatagctctgcacaggacagctttgtaccctcactcccggcaaagggttgatgtactctgttttcttccagcccctcacaggccagtgcttctgagaacagaataaatattgctcattaaaaacacacagacaggcagtggtggcacacgcctttaatcccggcacttgggaggcagaagcaagccgatttctgagttcgaggccagcctggtctacagagtgagttccaggacagcccgggctatacagagaaaccctgtttcgaaaaactaaaaccaaaaaaccccaaaacaaaacaacaacaacaaaaaaacccccaccaacacacagacagggctggtgcggtggctcagcagataaaagcacttgctgcttgctgcacagcctggtgacctgagtgaccccaagaactcatgtaacagtgggaggaagaaccaactccacaaagttgtcctctgacctttccgcatgtgccatggtgcacaccacatgggattaatcgtaagttaagaccccacagagttgctgcctttaacagatgccatttacatttctggaaccacagtagccccaagcaaacaatgctgacagcttaaggcgggatgagtcctgtaactctccttagtggctgtaaccattcaaatgagtctgaagacccacccacccccagtgaaatgcagttacacattccaaaaagcaccaagtagctatgtaaagattgtgccgggataagcttgcttgcttcttgcttggtgattaattggggttggattggggttggatttgtatatcattggcaggagatgtgtccatctacatagttcttacatatgtagaatgcttaatacttctcaaagactctgtcctaaaggcacgttgataaaaatggaagaggggttggttaattggtgttttttgacaccgggtcctgttgtgtagaccaggctagccttgaatttatgatcctcctgcctctgcccttacggctagtattccagtccagcactgttggactggatcagaaaggaggttttgaggcaacttcagaaagttcagtgaagtcatttcaaacttctgctctcagagtaaaacataggatattggattctctttactccttcttgggggtaagatttgtcctgtgagcaccatgcttccagattgttcatgtttttgcattcagttgccaactataaagatctcagtcatctgtctttataatcttagtcagctagttgcaattccagttctgcaagaggaagacaggtctttggtggtttaaggggaatgatcatcccaaattgcttctcagaggagcagtgtaaaatgtagagcagtaatggggaagaggtgactccctttgaagagtgggtgtgggttggggttagataccaccgtgactttaggaaggctggtttctcctgtgtagctggtggattgcgggcctctcagaagctttatttgggggctgtggatttagaatggaacctcggggtccacctgcccagacgagcctgtgctgattggctgtgcgcttttgctacggtgatgattattcccctgtagcagaacatgtgggaatgaagccctttatgactgcgagtcacctgctcaggtcactgtgctgtataataagtagcttttgaagaagtccgtcatgatggggaaagcctgtactgagagggcatgttgaggagagcgtgtatattcatggttccagggcatccctttgtgtttattctgttattttggagtccttactgtgtttgcatgtggtctgtcccctgtatcatttccctctgggacttatatccctgctgagaagctgaggcaacctttttctgtatattccaagctagtggtgggtacaagggcggggtgcagctgcacttagaaacgcctttgctaaaagactgggctcctcccttggacgtgggtcactgacggctgaaagtctggcctctcagccacctggttacacataagcctgttgatcatttaaggagcatctgcctaaacccagggggcctgacttaccccttccaagtctgggacacaaacagcttgtttcattgtgcagcttttacagcttcctactccagaccatgggtaccagagagtctcaagttactgtccaaacttcagtcaccatggattctgggaacagtgaagtctcagacaaatagccccaatgtagagactagggctttatttcaccctgatctcccaccaagatggaccatctcttgggggaactgagagatatttctctatcagtattgcgataggaccaagcagaccacaccaaggctgcttatgtgtccactcagactggtgaggtgcttagtggttaaagacagtaccaagcttagtgacccaagttcagtccctggaatccacctggtagacgaagagaactgactgccaacatttgttctctgacctccacaggccatctgtagcacatgtgcaccccttcaccacataaataaatgcaaaattaatacacttctcacagtggcccagttcttcctcttttaaaccttcagctgaagtcagtgcccagaggtgggctgagatcctcgtcctcgccttcctaccttgttggagagggagggctcagtggctaagagcacatgctgctacccaggtatactggcacacatcctcagccccaggacttagcaggtagcagatatgtgtgagttctaggccagcctcatttacagtgaaaagtccaaggtagccaaggttacatagagagaccatgactctagaagaagaagggggagagggtgtggggaggaagaagaaagagagagagagtaggaaaggaatggaaaggaaaggaaagaaagaaagaaaaaagagagaaagggaagagaaaagaaaaaagcacttgctaagtgatcttgcagaggactgaagtttggttttcagcactcaagttgggtggctcgcaaccagcatagctgtaggtccaggggatctcatggcctctgaggacagctgtaggcatgtgcacatacctctccacagatgtacatacacatacacacatgtttatatgcacatttctcagcacagatacacatacagttatgtaattttaaataatctttctcactgttatgcttcaatttagtttttgggcaagtggctggacttaatttgttgggaagcctcagatttggggtgctggcctaggactcaggaccagctaacccctgtgtatgctgaagaccttgacataggcagtcctgctccatcctggggggaagcctggggaagaacgcaggagggactgtacccacccctccaggctccgcagcgtctagggtgagcttcctgagcactgagccaagtggaagaagctcagtaattgtgtgggagtttgcccccattaaacagccacagctggcttctgtataaaagtactgaataaagatcgattgtgaggtgaagagtgttggcagtgggacaataaattatgatactccacactatcaagtcatttatgtcaatttaataccttgctatttaatggtgtgggagaacgttcacagaatgttaatgctaagcagcatgtatggtctcagtgtcccaggaaaatgagatatgcacatattgttagcacaagactatattaaactacattaaacatttactgtggatgttagttgcagacatgggtatttttttttcttttgctttctagatttttttgagtggaatgtactaattttgtaagagataaaacatgctattaatatattagagtgagcgagttaacgtgtgtccattaaaaatgatcagtcgttttagtattttggattcgttttctttccctatataatcttccttcttattttttcttcttttgagtgtatttagagagttttaaagacacctttaaaacttcaatgtctaataaatgctttctgtccctacagaaaaccctggtgacccgagggtctcagtgtaatctcctatctggaggtcctgtccagggctgttctcttgtttgttagatttaggcactggggtttttaaccttccaagtgttttctctcctttaagcttcctacttcagaattccatatgtggatatttatgtattatatataacataatatatatatatatatgcttagtttagaagcaccacagttaattctggctgtttaatttttttcactgttagtaaggagccacctgctggcttttatgtgcctcctgtaggtgtccttcctgagattcgatctccaggacaccagggtgaagggccacatcttctttcccaagttgttacaaagcatagatttttggtacttagtgaaaacagccttgcagccttctcttatctctgagaacacagatgtcttgactcagaaaattccgagggtctttttagctgtataattgccagccctttgataccttgctctttgacatttacattaaaaataaaaattagctaatttgtaagttataaggtcttaaaaaatagttcattcctctctcatgcctgtgaatgcttccattaaaactctgaaatggcttattaaattaaatgcagtgtcaaaggctaattgtctctctgtgaattagcctacgtgctgtaggagggcctggtttaaacattacctttgagttctgaagtccatttttcaaatctatccattcagagtgtttggacttgagacatctgtagattgtgaagccccttctgtgtcataagggaagccactgcacttgtggaggctccaaattggtcaaggtgcagagggtaaccgacagagccctcggtccctaaacagggtgtcatggaccattctccacattttccctgaggttcaagagacacagagaggggctggaaaggagttctgtggcaggcaggacgtggtctgtggtggccatgcattgagagctcactgttgctgctgcacaggaatggccttcattccccatgcctgggggaggagtttatgggcctctgacctccctaggccaaaaaacaaaagccacagaaatgggaggggactgtggagacaatggcttcagcaggaaagagggaatgaggggcaaaaatgcccaaattcagattatatacaagtgtgacgttaggtcattaagagtacatgggatgccggtgacacactcagtgttctacaccaacttcctggtgtcccgagtgtgaaacatgagtgtgtctttggagtggcagagcccagcctggcatcatctccagtcagcaggtggcagccatccctgactaaggaaacagacagggagtgtccaggcagtttgtagccatgccatatcagtggagaaccagaaatgctgttttctgtgctcttgttctaacttagaaacagtatctcacaagtcactgtaacctcagtaggatgagtggagtgtgaggcctgaagtcactgtcccaccatggtcaggatgctgtggtgatcccgtagggtgagtctgagcagcagactcccaggtttccattcaggtggagatggcatgcctgagggaagctcttgagcttctagtgacagagtgtgcttagtcccagcacaggctgttgggcactcgtaagtaagtcttctgggcatgaatgatcttccacgtgtgctggaaagcacggctgttcaggctggctgctgtgcagagaatgcaggagctgggtggtcgggggcgggggagtggggtcagggacaggggcattcaggacaaccaggaaggagagccaagcgagggctttaaagtcagaatatccatgttgggctcaaggcgaaggtctgtgtgattggtgatagtgaacattaggacacaggcttggagaaacttccctgacccttgctgggaatgaccctgttgtttggctacctcagaagcccccccccccccctttcagctctgggatacagggtctgtggaagggcgctggttcccctggctgctggatggaaccgtttgaagagcaccattccctaaccctaactatagccataagtcttgaccctgatgctaaccataacccttgaccttaacccctagcgctaatcctaaccataacccttggccctaaccacaactataaccctaaacccaaccatactcataaccttaatcctataaccataacctgaccttaatcctaaccctagccctgaccttaaaccctaagcctaatcctgaccctaactcctaactgtaatcttaaccacaagcctaaccataactccttaccctgacaccaaccacaatcctaacgctaacccctaaccctaatcctaatcgtaaccttttccacactccttgccatgaccctaaccctggctccaacctgacccctaaaccagaagtgccctgtgctcgcagtgtcctttattaagggttagggtccctcctgctgcagtcctctggcagtcacacatacctgctgggtctgctgggtctgcccatggtgctcttgaattgaattcctttgaattgtcaccatagtgttctagactggccagcagacaggaaggtgttgaagaggccactttcagccaacgtgatgatgttggtcagtacaaactgcacttaaaaatgcagacgctgccccttttgctgcccgcagtcacacgctcagtggtcacgcgcagctggttgctaccacatcagacagcacgatggggcactttcatgactgcacaagactctcttgtttgatagttgctgtccattagtctcccagccttgggcctctggacagagtccatcctttattcctcctggggaacacatccagggatgaccctcccgtgctcgtacactcctcacagggccagaggtctgcagcacccctgcctgcctctctggctgaggtctcctcagacgcacctgtgcttgcttaccctggttagtgacagacacatccttactgccttcagagctcccttcctcagctggcctcccttcctcattggcttcctcggaatctctaaacgtttctgagcccactccctcagaaacaattgtcataaacttcaagtactccacatatttttgaagtgacatctaacactttcatcacacatttaaatagtggttcatgggacataggaaaagaccaaagccaagatgggagtagtgtgagcactgatgcaggtgggattgtccttcacagtgtcatttgggagaactgcctgattatgaagtgaatgccatgaagctgtcaccaaagccacatctgatctggtgtgaaactttttggtattggggaaaattccaggtgtattgaaaagctcttcatcgttcattggtggatgtgcatgcctttagtccccacacatgggaggcagaggcagatgaatctctgagttcaaagccaccctggtctacagagtgagttccatgagtgctagggtcacacagagaaaccctgtctccaaaacaaaacaaaacaaaacaagagcagcagcaaagagaaggacttcatctttggctctttgccactgacccccttggagcatttaacccaggccacatttgccaggtatacatctgccccctacagcaatggtgcctgtgggcttcaggccgggttgattattaaaggcttgtagtggtcaaggttctgaagggtctttatgtaaagtcctggaagtgtgtagccatgctgcagtgcattgtgggagattttgatgggaaggaaaggatgcccacctgttcctcagaagtctcgcatggaagtgagggtctagatgctcgtcaattccacacacaatgagtgtcagggaccttgggtccttgtgtcttcaggttggtggctcagtggggagaacagttagttctaaggcaggtttctctgtcctccttctccctcggaggtgtcagggccacgctgtagatgtctgctctctaacttaggatattatctctcatgaaattatgcaaatacgtagtcatagacaagaaatacaaatgtcagtttctgacagctgtttcagtcggtcaccccagtatcataggtcctgaatcccagagcactggaagctccctcttctatcgctctgtgtgtgtgtgtgtgtgtgtgtgtgtgtgactgtgcgtgtgagactgtgcacgtatgtgcaggggtggaggtggggggtagggtggtgattttgcttcaggagatcctcctacctgaaacaagccaagtgaatgtttttagagtgttagtctctgagcttaccatctccaaccctcccaccctgcgcctgtgctgtgattgctttggggtcacccctgttccatatgtcatccataaactcactagcgccccagggtggaccttggtgtacttgtactttgattgacactggagtcctataaagagggtgtgggtgtggacgcacgcctttaatcccagcactcgggaggcagaggcaggcggatttctgagttcgaggccagcctggtctacaaagtgagttccaggacagccagggctatacagagaaaccgtgccttgaaaaaacaaaataaataaataaataaataaataaataaataaaatttaaaaaaaattaggcttggtacaggacgtggtaatgcacacctttaatcctctaacttgagaggtggaagcatgtgtatctgaatttgaggctagcctggtctgcatagaacattgcagctgaccagggctacattttgagatcctgtctcaaaacagaaccccacaaaaccaggcatattactttcctactctcttagggaaggtaactataaaagttgatcctataattgttttcaaattctgcttaatatagcacaagaatgcaaagagacgactgttgctgattaccttacggtaactgtccgtgctgtccatgtgactgtgttacttctccttcccagggcacaggtttgtgcccagcgtctggagagctctgcatatgtgcgagcagacccagcagttttttgtttttctgctcactgaggtactgccctgcagtttagcatctgataagtctgaagcgggctccaggggaagggtttcttatctagcataggaagataagtgcttggctggtggctcgttgaatgttcttgggcatgcacctttgcagaacagggcaggattgcccagcagtgggcctccagcttgtgatgtctggcagaaatcctggtagtggaagacccaggccctgctgctggcagaactgtatttggcacagctctggccagtgctgtggggagacagggtacaaggatggtctccaggttctggggaactctgccctgtgtgcagaaccaaccaggcagcttcccctgatgagcacatggagttgtacgccacaggctgtgggtttcctcagatacttgggacggtatacagaacatagtgcaacttccccagatgctaaaaatgttccgctcgcagttcttacaggtggggcttgtcagcaccgtgcagcctcgggtctcctgcctgggtggtgagcctgatagggcatagggatgcaggtaagggaggtgcagggcataggggtgcaggtacgggaggtgctagtggatcatgctccgtggttggtccgactgagcccataacagcacaggctcggagacagggtgggagtgggggtgcagctacagaatctgctgtgagactgtagccattctagtggaacagtcagcttgctaacaagttgtcagctgtaatgtgtgacaccgctcctctcccccccccccagccactgctgttaatttacacagtgtataatctgagtctgaaacccccttctgctgcaccccagggcttaaagcacattcctaatgtcctgtttctgagcagaatcaattttttttttttttttgttaagggaagaaatgtgatcagagctggtggattttgggtcatcaaggaaattgcacaataaagcaagtacagagttaaatttaaacagacaggcttcgctttatggcgttggaaggtcttttcttgggggtggctagtctctagccagacagtagcctggttctgtagacggtcttaggagtgctcaggataattctaggtcagacagacttgcagtggagttgtcctgtggcctgggccagctctgcctggtttacttgtcccttcacaggttaaactcctagctccccgagatgatggttttaggaggtggctccttagacaaaggtggggcatgaggggtgagtcctgggcatgggattagtaacctatgaaggagatctcttctacctcaggccttggaaacagcatgtatctttcatgacccagaaagtgggtacccccaccctctgcctctggctttgtccttagacttccagcctccagcacgggctatctcatgctactgttacagcaactgggctgtctcatgttgttgttacagcaactggactagactgagatttcatatcacacttatgtgtttattatgcagcacgcatgccttaaaggactccaggggtctccaagatggctgcaagctgtgctttaaaggagtgccacacacagcgacagtgtgagccatctgttgtggacaccctgtggtcaaggtttcatggagggcacagaggttgcccatgctttcagaggtcaaggcatagtgttagctagcattctgtgtgactttgttcaaggctccattttccctgtacagtccacactagcctctcctgctggaccatgcaaagcagtgtccagcttgccatgacttccacatcgtcttgtcacctcttcaggctgaaatcagttctctcttgtcatcaccaagactggtggcccctgacccatgcccctctgctacttctcccttacttctcgccttcctgcccccaggttgcttctcctgtggcctctatcctggtacttgcccttcctaccccatttctacttggccatctctgatttcctgtgagggttctggatatggccgtcctgtaccctcagccttgcatgctcttgtcacacctcttctctgtttgcacccatcggatcagccatgctggctagagctctgcttgccagctcagttgctggtcagcacactgtgggaatgaatgagtggccattctagaagcagttcagtaaccagctttcccatgagcagaatttggtgtaagcttaggtataccagttgtgtgtgtgtgtgtactgctgtcacctttaactttagttgccttcctaggcttaatatttattaggtcaccacacaaagctgttgggtttagggtacttggtaaggttagtctctttccctgacctaactctgataggaactttagatagagattggttggcagagccatgctccttgtctctcattggcttttgactgaggaagctggagccccacctccccccttggttctgatgacagcctcaggatgaggccctacacccagtagtctcggcctagagctgggtaggacgtggtgagtctggcggtcttctaactacacaagagagtgaagaacctgggcatggagcctctcaaaggtgggagacacttcttgctaatagcagctgcttgcttgaaatctcttcttccctagaaagcctctcagtgggtaatgaacagccgctgcttcaacacagggcaagctctgagaagcactgcaagtttgttgaactcaccctgcccttccactgaagaatgttgatgtttttaggatacattgttgacatgatttggttgtcttgtgacttctcctgcggagataaaaagagatgcctatctatcccagatagacccaactgaccaaagaaaagattttacccaagttcaccttagggaatcctttagccacttctggcagcctcaccctagcaggtcccaccccagttgattgttcacctcaggtttggtggagattagaatctcaggaagggaacggccagataaggtcttgtgatcccaccagccttccacaccattccctgggggatgttaacaagctgggtctcttgcagctgggtctccacagctttgctgctccaaggtggccatggtggtcatgttgctcagtcaaggtggccatgtctggcccagcggcagtgtttcaggagacatggtggctctgcctgtgcaaccctattttctgtagtgttccagagtcgtatgaatgaatgaatgaacgaacgaacgtagtccttgcatgtaacacaggctgactcctggtttcagtcagggtccttcctggtgttacctgggtctgtgctgccgatttcattcagggtccttccctaggtgtgactgggcctgtcccacaatgtctgagctcatccttggagccatctcagctgacgaatcctcttacacagaggtgtgtgtgtgtgtgtgtgtgtgtgtgtgtgtgtgtgtgtgtgaagatcctgtttatggaaaggaaggattcgagggtgaggtcagagcacacaggatttcagggtccacactcccccgcctcctcacccaccactgcctcactcaggtcttgcttggcctgggctgtcctggctttatactctgtcctctgtgtccagctatcccctcattcaaagtctatggccgaccagccttctagaaggaactctcagggtgccctggtgactggaggaactgaggaagcagccagggaggtgacaagaatcccactcttggttcccaagagtggaacccaggagagcgtcggccatggggcaggcatggggcgggggggggggggggcggggggtgtcatagctttgtgatttgttttatttcgtcaacacttgtcttatggtggttttggatattcttgctttggagaaggagtctcactgtagctgtagctggccaggaacttcaggtgaccctcctacctctgcttcctgagtcctggagcattggcagaggcagctctgcgggactccacccgtcctaatctgttcccagggagtgctgacacttctcttttgagactttgaggaacaaagttcaacttcaggtgtgtgtgaaaccctatcttgctctaagggtgggggtggggtgggaagggacgccattcacctcacagattgattgcaggtattccctagttggagggattccctgccagaagttagtgctgacgctcaggctcaggcaggctgtgagcagaggggccctgccctggcaggctgcctctggaggaatggagtgagcagggtttgaggaaggtgacagctgaagggagtcaggagctgcctggcagcagagaacactggggcatggaggggcgacggcttctgccctccacctgcccttgctctttctgaagggagaccgagaggccactcccttagcttcatctccagacttaggcagggcacgcagcatggttgttctctttcacagcttaatctccagccactatgtcagagtgaggtgtctttggcccaactctctgtgctggacgccagctaaggtagggttaagtgtccgtgcgggaaggtgtagtccctgagagactggacaccgggccttgtatgctgtctacccagaagagtccaccatgcacagtgtgaggggccctggggaactgggagtgagtggaacctgggaagtggtgtgcctaccacaggctcatctgagtgagccctttgtaacttctggaatagggcatttgagaggttgcactgccatttgccttttgggaactgtgtccccacagtcatcctgccacctgtgaggtgtaccacaggtgctgcgacatgccaggactcctgtctggggtttgctccctgtgtcctgctctgcccctccgtcactgcctgtaatactcgcactctctgtacggtccctgtgtagtcgtctcagggactaggagtttaaaacggttccatgatgttagattatttcaggagaggttctcacgagctccaagatggctggtgttaaatttaggcatcttgggctattcagggctgggaaagctttggtggaaagatgagtgctgggatttttctctaaagcctcaaaccagagcagtgtgagacaggcagggtgaaggccacatcaagcctggctctggcccgtgccgtccaaggccgttctccagcttcttcccacgattccctctaccaagttagctcctctcatcagatggtgtccccactcagcccctcttgcggccttaccttctctccatgtcaccccctttccttcttattctggtctgaggctcagcccctatgctgtcagctatgtggcatctgtcagagtcacctacacgagtccattttagttggcagaaggcaaggatgaggtcataggaaggttagggggaggggagctagtgtgcctggccagggtcagatggattcattttctctgccagttaaagaattaaaaggcaggagggacctgaaacccaacagggagccgcagagtctcaagcgctgcaaacagtcaccagtgaaagatttatgggggaaggaaacacagcgaacacacagagaagaccctctgcaaagcagaggctggcactcagaaaccacaccaaatcgaaccaccaccaccacacccccactgccgctgctgccaccaccagcaccagcaccaccagcaccaccactaccaacagcagcaccagcagcagcaccaccaccaacagcagcaccagcaccaccagcaccaccagcagcaccaccactaccaacagcagcaccagcaccaccagcagcagcaccaccagcaccaccagcagcagcaccaccagcaccaccagcagcagcaccaccagcaccaccagcagcagcaccaccaacagcagcaccagcaccaccagcaccagcaccaccagcagcagcaccaccaacagcagcaccaccaccaccagcaccaccagcagcaccaccaccaccagcaccaccagcagcaccaccaccagcaccagcaccaccagctgcagcaccaccagctgcagcaccaccaccagcagcaccaccaccagcaccagcaccaccagcaccagcaccaccagcaccagcaccaccagctgcagcaccaccaccagcagcaccaccagcaccagcaccagcaccaccagcagcaccaccaccagcaccagcaccaccagcaccagcaccaccagcaccagcaccaccagcaccagcaccaccagcaccaccaacagcaccagcaccaccagcaccagcaccaccagctgcagcaccaccagctgcagcaccaccagctgcagcaccaccagctgcagcaccaccaccagcagcaccaccaccagcaccagcaccaccagcaccagcaccaccagctgcagcaccaccaccagcagcaccaccaccagcaccagcaccaccagctgcagcaccaccagctgcagcaccaccagctgcagcaccaccaccagcagcaccaccaccagcaccagcaccaccagcaccagcaccaccaacagcagcaccaccaccaccagctgcagcaccaccaccaccaccagcaccagcaccaccagcaccagcaccaccagcaccagcaccaccagcaccaccaccagcagcaccaccaccagctgcagcaccaccaacagcagcaccaccaccaccagctgcagcaccaccagctgcagcagcagcaaacaacgtcaagtctcttcttgggggctcaaaggcttgaggatgaaactcggtgttttggttttttttgttttttaattttcctcctaactcagggttggtcagtttaggggaagctaggatgaccgactatgccagaactgtgtggcaagtcctgggtaagccctgaactagctgagcccatccatcggcagggggtcagatgctgagagacaaaagtctacaaggcctagaaggtggcaagagggtgaggaagaagctggccaccttgcagatttaccaccttattgcctcgccatggcccatctctctccagtttgtgtctcactgcctgccacacaggttgatggaggtcctgggtcctgaatgcctgggttggggagttgttggcatagctttgtgttgaggaggtggcccaggacctgagtgtcatgcttgctgtctgtgcatgtgtgcacggggcaggtgctgcagaccccacgcccactctgtagacccagccctggctcgtccatgggacatctgcacctgtcctgtgcactgccgagatttttgcctcttggattttgacaacttgttaggcagttcttgccactctgctgactttggagatgcctagcaacgttttacagtttggacaggttctaatcactttaacgaaaccataataaatcattttatgacgagaaccctggggacaggaactctaagctgggttttgggtttctcacgcagtggagcttccctttttaataaaaagcagtcctagatgcagtcaacaggagctgcctagggtcagtcctgcctcccagcccccctggagcagggctgctgtggctggagttcagaagcataacctgtatgagctgcctgactattccccagcctctgtcccaggccagggactcagcaatgtgggacccaaggcctcagtttacattatgaagacagctcagaggcaaaggactgctggagagaatagagccctggctttcttactgctgctttggtgcagtgtgcgcgtgccaccatggttctgaacagatgagttgaataaggcagactgctgctcacttcctgagcacagccaatccaggcagcgatctgcagttacctgggcctgtgcagtgggccaacacggttaacacagaggttcccaaacttagaagctaaatcccaaggaaccagatttccttattcccactggccctgactaatttgtttccattttctccttatactccagaaacaaacatgattaaaaactccccttccctcccctcccctccctcccccttccttccattctcttcccttcccgataaaactgaatcttgaaatactagtgcatagttttattttatattagttgatctttttagttttctaaagttctctaaggaaagtttggaatggttctggattgcctttataaaaacattatcttttgtttattctttagcagtatcatgcatgtaaacaatgtgccttgatcgatcacctttatcctcagttccccctccactcctcaggcactcccaacatgtcactcccccctccccttcatgttctttaaatgttttaagtcattaatttaagatatattttatttctagtcatatgtttgtgtccatgtgtgagtgtgaacacgtgagtggacagatctgcagaggccagaggaaagatccctgaccctcctggagctgtgcttacagatgcttgtgagctgcccaggggtggatgctgggaaccattgatcttctgcgagagcaatacatattataaaccgctggggcatatccacctgtgctcccccgtaccatttaaaaataaccttctgagcttaataagtttaattagtgcttgctgggatgttgactgatgcttttgactgggccttgcacaggtgacacagctgcagtccgtctgtactcgcagtcacactcctggtccagaagatagtatatcatagactcctccggtcctctggttcttagatctgtttctactcctgtctcccatggtgttcctggtccttgggtaggatgaatgttgagataaatatcctatttagggctcactcagtaggcgttattctcagcactttggccagttatgacccatggcattaagtgatctctgcctattgcagagagagacttctctggtcaaggttaatggaagactaatccatgggtataaacataagtgtttcaaaggcagtctgatgatctgtcttatgccaagttgactataacaggttcccctctagggcccatgacctcctgagccatgcttttgaccaggtttgcagtataaggcatgagttctctcctgtggggcaggcctcaaatccagtccaaaagcagttggttatccccaggacctttgtgtcactgtcataacaatgggcacatcttgcatggcaggtattagcattatagtagtatggtagaatgcagggtccagtgctgagtaagatcagatatattttctcccccagtggcctgggcagcattttccagtactgtgaaagctagcatgtagtaggaagaaattttcagatcagttttagcttgagttttctatatcctgcgaccaaagtaagttgtctctttagcactaggtcttattgtctagttctagtgggtgaccaagaacaacagcagtggcatgtattgttttgggaacctttggtacctccacaaccaatgacttacatagcggtatcctatgtccagaactggaattttcatctgataatcgagtcttctacaggaaatcttctagaagacttcctacttaactttgtgataatcagctttctctctgtgtgtgtgtgtgtgtgtgtgtgtgtgtgtgtgtacacgcacgcacgcacgtgtgcactctgtgttcatggatggtgtttgtgtgggagtctccatggaggccagaagtcagtcttaactgtcgtctatggctttttggcttttagctctgccttttgagataagatctctagtttgtctggtgtttgcttgctctgtcagctagacgggttggccaaggaccccaaccccagcctggggtcacgggcacatgccaccacactgctgggtgctaagaatccaaacttaagtcctcaaggctgttcagtattcaccttactcacagagctatctccctgtcccaacgttttcccacacacacacacacacacacacacacacacacacaagagagtttttcttatcctctggtgtctgaagtccgggaatctgtcgaatgcctaaggaatcaccttttgttttatttttacatacgaaccaaaactatttccatttgaagccagtagactcatgtataataaaatacttttttgtgtgtgtttcttgttgttgtttttgaagaggtaaatgttttagatgatgtaagtcttctccccaaataagaacctttgagaagccagcagcaggtggccctgctccactacaccagtttagaaatgttcacctctggagacatggctgccactcactgctccaggagagagtgcagaacaaacgtgtcttggctgctcattcctcagtgacttctgtctgcctggcttcccgtttttaattctggcagtaagcgtctgcgaatgtctgctaaatattcctccccctaccagacagcctccagtcaggctgtgtgcgtgtgtgagaaccgataattttccctccctcctcctccctggtggtttgctcccagtagccagtttatgggaatagtctttcagcagtgatggagggagaggacacaggactcagtcccaggcgcagagtctatgggagtggccttccatgacaggtggccttagaggccaagagtcttgccatttcaactgtgttgcatttcttcgtgagtgtctgaacatattttaggaaattaaaagtgagaatgggaaagggttaggaagacaggttagtctgcaaatgcttgctgtggaagtatgaggcctgactgaccccaggacccagataaaaaaagccacagtcctgggaagcagagacaggcagagtccttagcctaaccctgaactccaggtccgttgatagactgtctcagaaagcaaggtcaatggggaacaacaccctatggtgatccctggtcttcatatgagtgtgtacatgcacacacacacacacacacacacacacacttgggacatgaaaagtgtacttgttctacttggttctcacagagaagagagagagagagagagagagagagagagagagagagagcactaagagaaagccctcgctgttggtagctagccagagaaagggcttacaagacaaaagtactgtagaagcaacgcgggttcccaccagacacgggttagagtccaagcacagctctgcccgtggatggcacgtggacccaaccaactgcatcctaggctgcagaggcagttccctggggattccaaagcctatcaggcagatggggtcagagctggcacagctcacatccgctgtgcagttacaacagccttgggctgcctggtcagtgcaactcccacgggggtggctccatctctgacctgctctagtggaaaactttactaccaccattgggcacctctgctctgcagtgcaaatagctggataattttctggtttagtctgggaaacgggagcgtccaaaatacttgagctccaggcaggcagctgctaacttttcattaccacatcttcccattcagatgcccctggttacccatcctttagaccagcatctgaaggcagggcccacagaaggcaggggcctctgcagttcaccctctgttgtctgtagtccaggaccaagagcaccactcccaccccacatacactgagttactgggctttttttctctgctagacctccagaggggccgaggttcattgccttttctatgttgtacattgcatggagacagcctggaagcctggcctgtttgcctgcatgcgcacctggtagatctcggttgcccctggctactgacctggtgcatgtgcaccacactggacatcgtgtctctctctggtgttcaggaagtacagggtctcattccagctttcttgtggagcagccaggcctagggaggagcggctgttggtgagtagctgcttctacaggctggcctctggctgtgcacagctcctgactacagcttctggctgtgcacagctcctggccaagctcagcttctggaggagatgctggcgtttgattcacgtggctgtcgagtccactgtcttttctgtgtgctccctcccccttccagaagagcgtctgagcacaggcttgctctcctcctctgtcagccttgctgttgccttgttctcagtgaactaagtttctttctcctttagttgtattgagctttggtaacttgtttactgtctcaaactcaggctgtgtgcaaatataaatttccccttgatgtatcttgctgtcagttgttgaagcttagttcttgtgggcattcctgagacaggccgcagaagcaggcagtggtaaaaccctggagtgagggtagacttggcagagggattcattactattcttgttgctgtggttgtggacagaagcaacttaatggaggaaggacttttgcttccacactggaaagatctggtctgtcacgggggcaaggcatgcagcaagagcacctagctgcttgctttcatctcagtggaccaggaagtaaagaccagacaggaagagggttgggctataaacctcaaggctagaaacctgcttcctcctatgaagccccacctcctaaaggttcctaacctcccaaaacaaagccatcagctggaggcctgatgttcctgagcctgtggggggcatttcacagtaaagccacatcaggagatggggtggcctgtcacattgtgtgtcctggggtctcagttccctggtgaggcatagggtgggagagtgggaagtactgggtgtgtggatcacacacatacccccatggactcaggagaccctgtggaggaagcctttgccggagacatgctgcatctctgtgtgtggcatccctgtcaccccataagtctcgcatcaggaagcaccgttggccgagcagtcagtacttcaggaagtaaatccgcctttcctttggaggtgatagtgagaaattgtttctttttctcatgcgtgtacctcacgcatctcacttttatgaaccagacacagtcactcagcatccctcccttggacgcagaaaaacctcatttctcctgggattcgtgtagtaaagttgttggcaggattgagcaaatttctccctggaaaacatccaagcctgggaccaagtaggaaacaagtctgtgcccactcaagtgtctggtgacaactgaactgtttgcaagttatgcagaagatgttttttagaacttgtctcatcctcagggtttcaattattttgatccctcctccctcccccgactccagaaaggagactgaggagaaaatccctgcgaagctaagcccgagtgactcccgctatggtaattaattggcaggaaaatcaataattgagtgagaagtctctcagtcagtggtgacagagacggtgcagtgagatgctagtgaacttgggagacagcaccaggggcagggagctaattggatgaatttacatactgcatgcctctgtagtgcctgggctgctagtcagtcggagactcagagacccaaatgttcaaacctcttaagcgtttgaccctgaaagaagcctcagtgaataggtatctgacttggtgaattaaaatgggaccacctttgcattgtctgtcagacaattcgaaaatgttagctcacttcctttcttcacagagcaaattctttcccattcatcgcccctgtgtgtttcctcaagggagctgctgccttaatgatgtttgaggatactgactctgggccagtttaattgtaggttcttgttgtttgtaggttttttccatccttacaaatcattgaggacctcagagatgtttgttttgtttatgtgagatctgtcagtagtcatcatattggaaataataaacaagttcacacacgaggagaggctgcgactcactcagcactcatcccatcaaaagctctgcagagcccaggcaaggcaccgtgagatgtcaggtaccagccaagggcggggccgatggtgtcacctgtctgaaggcctgtgttctgtgtaagaagcagggcagttctgttttcctttaaaacaggcgcttcattccttctctttaagccctctctgagcggcctctttgggtaagtgctccacagtttactctcatgtggcaggtgtgtcctgggacaaagtagctctctgattcctaggtctgtccctaggtgtgatccctcgagggatagaccacaggtgctgtggagctcaagggtcaagactttataggaccacttatttttacttgtccctgaacaatattgaaggagatagtctaatcaatttgtagatagtgtaagttttttaaatatttaaaattttgagattataatatatcattactccttttcttccctccaaaccctcctgtgcttcaccccctctggcttgctttcaaattcatggtctcatattctctctctctctctctctctctctctctcttgtgtgtgtgtgttcttaaatatagaatggtgcttgctcagtctgtacagtgttgtgtgtatgtattctcagagctggccgtttggtgttggagaaccactcaccctgcttatgtgctcctggctagggaagactgtctctcccactgttagcttccttagttgcctgcagttctttgtctagggtgagacctcttgagctttcccttgtccacattagcatgtctattgatgccttccttgttcaggtctgtttccactgacatgttggtgggtagtttctgacatttctaggaaacaccatgtcacagccaactctccattcctctggcatttagaattgctctctcccctcttctgcagtgatctctgagtcttaaacttaggagttctgttctagatgttaaatgttattttatgtgtataagtgtttgtctgcatttgtatatgtgtatattcacatatgtgcagtgcctgtggaagccaaaagagcatcagatcctctggaactagagttacagatattttgagctttccatgtaaatgctaggaaccaaacctatttttctatctagagacagtcttgttatgtggcccagatggtgaccgaggagtttgtcctgttatgtcatgtgactttgccctgtgcgcagaggcttgtctactgctgacacagtgagaaggtcctgtcttggaattagtgtgaaaatcgttagatttgcatatccattaggagcccgagacagagcccggcatggtctatagcacgtggtttgggggctgctacctaagatgcagagcagctagagagcctgactcagttggcaaaatctactggagacacttgaggacttgaattggagctctagctggggcagtggtgcctgtaatcccagcaccctagaagcacagggcagaaggtctctgaggctgctgactgcgcgcgcgcacagctgactgtgcacacacacacacacacacacacacacacacacacacacacgcatactagcctgcacacacatacaaaagcacataggaggtgtggtaagtgaaaagatcaagatttgattatgtgtcagttgaatattatagaaatagactagaactctggtgtccctttgtgggcgagagtcctcattatagacatttagtcacctcgcaaccatacggagcggtgggacctgccagggtggctactgagcagatgctttcttttggggactgagtgatctccatggctgggtgacagcacggaggccctccccagacatggtcacttgatcctggactttgcagatgcagaggcatgtaaacttaatgacatggtctgtggccttttgttatagcagcaggagcgtgtgaactgctaaggcatggcactgactcccgcagccctgtgctctggacagcgactaagtgcccagcacatgatccactgaatagctttgatagtctgaacaatttgaaggacttagatccagatagagagtgtaaaaacaacaacaacaaaaaatgtgttagtgcataaacctgagtccagggtagactctgttatgcagtaaagcatcagtgctgtgagctgtgcctgcccagccccccaccttcctgactctctttcactctgtacccagttctacttgtccatggcccctcaacctccaggcagctgtgtggtgctctcctgaagtactaggcacagttagaaaaactgaccataggattctgactggactgcaggaagcataagggacttcctgttggtgccagctgagctcactctcagttccgcagtgtttctgccctgtgacatgctctgtgggtgtccgaattgtgtgcacagagcagggaactccacttgtgtgaggctttgcctagaaggatttcttagtaagagtttccccggttctcctgcctttgacagaatctatcctggtgatagcagtgttcaatttactcttttgtgggtcaaagccatcaccttgtgctttggtttgtgcctgtctggaagtctttgggatagcatgttccctgtgagttgacattttgccctgctgcattctcctctaagtgttgctgaatttgtgtgactgcaagaagggtctcttccagtagcttggagctggagaagccatgcagcctggtgtgagggtcctgctgctcccacaggagtctgtgcagtctgtaggtgtggagaactgggacctagtgatgtcatactgtcttcctaatggtgtcccaaggtcccaggttcctagtgagaggacatgagggtgactgtggttggaggtagattcccctggctgcacattctacacagcattctggcagcagcagctctagacacagtgagcctcacttgcttttcctatggaatcttcctgggctggctcctgaatccacatcgagccatccttaacttttggtgttggcctcatgttttgaaatattcccactcggttgtcctacctggttggctgagtatagttattatttttgcagttagaggcaccaccttttccagtctttctcatcacacagtttcctaattcaagctgtgagagatttaattcagttctgtaggcgtttatagggtgtttgcaagtcggtagccgcattattacaaacctgcctccttgttttccgtgttgcctggagccctttgattagcatgctccccaccagtgcgctgagcctgctcctccccctctcccttggtgggttgttaaggctgagagcctcctcgggagatgagtggcccaggctcactcttcctctctactcaactctctactgttgcagtgctgcagtttgctgtttggtgggcgctcagagctttgccaggcctttctggagtgggaagtcaggagtggaagagaacataggatccagagggggaaatggctcttcgccgttacctttaccagagcaatagaatacactcacctgtccgtcacagagaaataggcattaaattctgatatttctggacgcagtgagctaccaaatggtgtaaaagctgattctcttgcattccatcgccagagctttcttggaacttttctctcacgtaattggttgcagacgctgggaatgtatgtgatgacctacaccctaggtgtgcacagggttaaaatgtgagcagtttgaacttaggaaccctgctctgtgaggaagtactcagtattcctcagccaaaatcttcccctccccccaggaaaagacaactacataatttcaaatggatacattcactgattctcttcaagagtggcttagcccgtgggggacacagccacacgagtttattttctttttttgtacctttcttttgttgatggagctcatggggagctcatggattctcatttgtgtttagagggaatggtaagcagatgtgtatcaagacgtccatgtggctgtgagctctgccccactgagtgtatagacacaggggcagcagaattggggaaaagatcagcctcagcggtgcgcctgttaaagacacccacaggcaattgtttaagttggtcttttcttagtttgttatggttgctcttaatctgcatccttgaaatagaaaatacacttggatttcacgagtctgattcattctccttgatttaatgagcaccactgaaggttcacactctgggcacccgggctgaacacgttcaagacattgttcagttggagctcaaatcagccgctgcacacagcacagcacagcacggctcccactgtgctgtgtggtccagagttggatcagagctcagctctttagataatgaatataaatgatatcttctcgtttctaatgtttagcttgtctataagcaggtgctggtgcaaactagcagatgattgtggaagcctaggtcagctgtgcgtgtcaggtccagggcctttgctgttcccgggtaggtatgtctgtgtggtgtgccttacctcttgacacagagcatcctgtgagtgagcctacatcccatggttctccaggttcctactccaccctgtgcccaagccactgtctgggcatgagaaccagagtggcaggattggtagctggctggacagagggttagaaggctgtttgccttttgtgttcattacaggaagagctttttagcattagtgcatcgggaatgtatttaacattagtgtagcaggaatgtatttaacattagtgtagcaggaatgtatttaacattagtgtagcaggaatgtattggttctgaagttttccttattcattttgtgtatggtaaatgctgaaagaggcagagaatttcctattccacatatgcctgtgataataatttactgctaattaccaaaaagagttaatatcataaagttggggacaggataaaagaccatggcagcagacagtggttttgagtctaagaaacttgcctgcttttgttaattcactttacaactattttttgattcctgccaattacacctcaggctactacctatttaaaaactcacagttgagtggcacgggcgttaaaggaagtcatgtaagaaactgaaaatgtcagagcagaaagtacagcatccttggagagcagaggggaagaaggcattaggaagctctttaactgtattctgggacatgccagagaagtggagagtgaaggtctttaaagccatggaggatgctacacagacctgagagggccctgtgagggaaggtataggcccgagagactgctttatatggccaagtactgaaaggctgagagaatgccctgggagatgaagtgctgtcagactaagagagttctctgtaaggtgaaggtccgagggtgtcctctgaggtgatttggagctcagagtgctctgtgaggtaagatgctttatgttttagccttgagtggtaatcctggtcccaggtgtgtccttattagctctgctctgagacgagaggggcaggtctgactgagtttactaggtgcatagtaaagtcagtgtacatgtaactggtagtttcctaacagtctttaggtgaaggaatgggggcctctctggtatctcctgccctacaaagcctttccttttctctgtgtcttcttccaagtcaagtatgacttcctcctctccaatgaggaggaactcaccagaaatctcttctggtgccatctgaggacactgggattcattctgtgggaagcctggccaggcgttagagagtgattctggtgccaagagtttcatcctggtgtagacaacatgtaaggctgcgtgttggtgctagatttgctacataaatatttgttggatattaaatagcttcaaagggtctctgtgtccagtttctcttcctttcctgagtaacttgaaaggaagcagagtagtcatcttaaaccacccagatttcagtgccattgatgttgggaattccacaagatcgtgatatgcctcagtgcagtgtgtgtgtgtgtgtgtgtgtgtgtctgtctgtctgtctgtctgtctgtctgtactagcctgggtgagttgagtggtcagcatgctaaacacatactatcgtcaggaacgttagtgcccaaagcacatttccaggaagactgatgccatctgacgtactaaagtcccctggttcccactgtccttagtgcatgcgatctacaccgagtgctgactgggcaagctgggctaagtctgtgttggtgtccagtgctgattgttcacgtcatcatcgtatctcagagtggtgaagggaatgtggaggccatcctagctgtacaggattctgaggggagagatgtgactcttttgctgattgctagagcttctaaggtctgcgcagaaatgaacagggcgtgcttgacttagactgacctcagtatattgacaaggaactttggttttatttgttttcattttgtgtgtatgtacatgtctatgttcttaacatgcagatgtatggaagcataggtcagcctttggtgtcttttcttaagttccgttcatttcattttatgaaacaaggtctcccactagcctggggtccaacaatccagctgggctgtctggatagtgtgccccagtgaccgtacctgtctctttgtctctaaatcccagcactgtgtttgtaggagcacaccatcatgcttgacttttcttcctgagttctggggatcgaactcaggacctcaagcttacatggcaagcactctacacagccccaagaattttactgttaaagaaaaaaaccaaaccaaaccaaaccaaaccatagccttgcttagatgctggatttccctgcataccagcaggttgtcttctcaccgttggcgggagagctacaaggaataactgtgtgttggtgctggctgcacttcctcagaaccgcacttcctcaggaagcctgcgggtaggaacaaggtgtggggaggggcatgtctgcatggcttgtttctgtgcagagcatcttgtgaggtgtccccagcacagacctaggaatgcggatcttcctgtcccttcccttgcattccagtacataacagttgctggggaagacccagttttaggtgctcccctcccccacttcccagcccagacagagcccttacctcattaagccacctgtgaaggaggaagtgtggccaggctccagagtcctcattgatgctactcagagaatctgtggcttcctttcctggccataaacaaaagcagctgaaagaatgggctttgcttctcatgggatgcttgctatgtcaggggaaggaaaggcgctttctcataatgttcatcttgtaggggcctcaccataaaatacagacagtaacccagaagtgccgtgtgaagctgactattagcagcagacttttcgagtttgtgttggggtctcataatacatgcacacgaggacacatgaggacagaaccctccttacaggaaaattggaatattgatctctgaaaacagcgatgcttcagaaatgcctctctcttaaggtctggaaggtcatactgtgttcgcaagagatacttgttattcgcagtgcagtcatgtctcccgcataggtctccctggtgacggctccatgtgtcctcttgcacagcctcagtggcagagaacatcacaacgcagtgtgctcttgtcctactacaatggctagaagctaggggctgcctgtgggaactggtggctgtgataggtggacagacaggccagggaacacttggataggaaatctttcacaaatattctggtgttgggggtcattatattgtaacataagccgttaggcattatcaagtaaattcatatatttatgtagccgttctgtctgtctgtctgtctgtggttttccataagactagaattctgaacctgctaaagcaacctccttatcttcctccctctgaacctatctattctgcttctgctttgagtcttcactattcctggaaccccatggaagagaaatggtctgtctcagcctttgtccctttgtgactcatgtatctcacttagtggccctggagcttcagtcataatgcatcagacgtcagaattcccttcctccttaaggctgaataacattccattgtgtgaatgggtcacactgtttattcacccatcaaaggacacttgggtcagttggaacgagagctgttgtcagagtggctagacactgctagagcagtgttttttcaacctgtgggtcacgtcccgtctggggtcgcctaagaccgggaaaaacacagatatttgcattacaattcataacagtagcaaattttcatgaattatgaagtagcaataaaaataatttttatggtcaccacaataggagggactgtatcataggtggcagcattaggaaggttgagaaccactgctctagagccactgtaagttctttggatgcaaatcctggatcccatggcaaggctgagggacctgctgcctgtgcctctgattctgagcctcagaacaagaacgattgctcattgaaggagaaacccagctgctccgaggggcttcagtgacttctcatcagctgctttgcgcttcctaaagacggaggcagactgaggaaggtcggctttctaaagcagaggccagtgacagccttctgcataagtgataagcttgtcttcatgtcgtagtggagtggttcatgaaggtaccgcgtcagcacggccgcttctgagcaggtcggtggggatcctccttactgcgggctgcctcatcttgctggaagcctgctcgtgctcctgggttccttctggtcagtattccctccttgctgcatcttggctccttgcgctatcatacaggagtgtggattttaggaagctttagtttgcagttcttatagctactgctctgaaatataagttgtggatggagaagcttgtgatctgaggagcagtctgacttcaattcatattcattcatagtcttccaccgcccccacctcctgtctccaccccttgagtgctgaattccaggtgcactgcttcccgaggttcagaacagaacccgggctttatccgtgctaggcaagcactcttccagcagaactgcagcctgggccaagaaccaagaaggaagtgcttccctgagcaccaggttcctcgtccagggaagcagggtggcctgtggactctgccactcccttctttccttccctttccttttaccgtaggtaggtgtgagtttgtaaacagtatcggaactgtcaccagatgcagttgtgatttaacagggtaatctgaaacacccttctccttctggtcttggtgttgcctccacaacactgagaagtgactgtgatcataaaggctgctgggggatgtggttgattcgtgttgctgtttcctgtggtagaattagaactcaggcgttttaagagtatttattaaggctggagaaatgggtcagtgataagggtccaggttctaaatgaatgagtgaaagagaaagagagagagagagagagagagagagagagagaaaggaaggaaggaagaaagaaagaaaggaagaaaaagaaagagagagaaagaaagaaagaaagaaaggaaggaaagaaagaaaggaaggaaggaaggaaggaaggaaggaagaaagagcgagcaaaggtacatgattactcctaggtatgatggaggagaaagtctattacagatatatgggagagtcaagggtagacatgaccttgagctctgtagggagagggaaccaggtacaacagcctggaggccgaaaggaacaaagagggcaggtaaccaaaatgattggattatgtagggaaagcagcccagctccctaggctggagagttcagggtagggggcagggtcctggttaactgaagggtcctctagcagctaggaactgaggaatgctgggaaacctggtggccagtgtctgctttcatatgttaaatagcacctcagccattcatcctgggtttgaaaccaacaggttcccagcacccacatgtggcccacaacaatgtaattccagttccacagaacctcacaccctctctggcttatgcacataaatgtaggcaacacactcatacacagataaatacgcctttcaaagtacttcttgaaatgacagtgaacaggaggatgtatgggaaaactgacaaaaaacccttcaccttctgttataaacaatattttacaaaaataatttgtccacggcaagagcagcgttgcccaaagactgtgtgtttgcaagcctctgccatctggatgcagagcggaccactgggttctcttacctacttttcgctcagcctttgacactggcattcacctcagcagctctgttagttgggagaggaggagacagaaccggataagatagtgctttgtgtccttgatgggcctggatctgacatcctgaggaccctggaaggagctctggtcacccagggattctgagcacactgagaattattgttgaaatttccctcgggaatctgaccaggtctctgtcttctcctgcaggttgttgctgctgcgggctgtgagctccaggctctgccggcggaagttgcagtctttttaggtaagtggctgcaggctgccgtgcaaaccaagttaccctcgcagctacttggtgttttagttgtttgactcctgcatcccagtcatggttctttggaatggtttgctttctcgatgtattgcatgctgtagcaggtgtggtgagcagggctcacatgggttcctttgaacattaggattgcctagtggcatgggagtgggggttcaaatttagtctctgatgagtttctgtgcgtcccttggtgtgttgagaggatgtgcactttataatcagtttgtgcatctccgtggagagagtgtcccttaggtaacagggatgcaggtaagcatattattgtgggcaaagggctgcctgaagtccactgtcctggacagttcaggacacggtgggggctgggggtgctgaggtgagctgccggaagacagataggccagatgggagtgactgttggctgcccctttcagccttaagtcaaggtggcatttccccctccctcacatgaactacagaatacatggaaacggcaggaagtgagataggtctctgaaggagcctgtgtctgccctgcctcataagtccccactcacacatgtgcacttttgtacctcacatgtgtgatcttccaccctttgcccttaagaagatgagtgtatgtttcttaggagtaaacgtgtgcgttcagtcacagcaggtcagctatcagccttgagttacttagtactgacccatctgtgctccatctgttaccagcatcccagttcaggtccccatctgacacagagtaccagtccttcacagcatcatccacctacatccagtgtccagtccagggctcggtgctacatatgactgccatgtttcttgtgtgtttgtgtgtgtgtgtgtttatctgtctgtctgtgtgcctgtttctctctctctctctctctctctctctctctctctctctctctctctctctccctctctctctgtatctgtctgtctgccttcatgctcctttgacagctgtagctgggcttgcctttataatgttgtcagggcaagtgtttgaacaagggcaggatctcaccaccagagatggcagcatcaccacacactgtcgtgatcactgcacaggatcagtgcgtgaggctcatgtgtgtggtgagctgtggaagtctctacagaagggagtgactgctgaggagcggcagcagaggccaggatggcttttctgacatggcggccttgttccctcctgataggaaccagaaggcaccacccacttcctgtgctcagggaagcccttgagcctaaggaaactctgatgtggaaacagcagtgcagagaggcgaggaatgctccagtgcaggaagtaggcaggtctgcagggttttggtttaaggaaggaaccttgtgacacagcatctgtccttccagtgccatgggctccactccagctgggtgtcaagtcggtgctgtcaaagccaggtggctggctgaggctggagctacctggacatagctgagcaccctttggcgttttctcacctacgagagctgtggaaagcagctgtgcttgggtttctccacctggaggacccatttccagaccaacgcttagtgggtcacctgtagggaagggaggtcctgggcaggtcctagtgtgtgctttagggtaagtggttctgactcctgccagagatgttgggtaggcatctgtagtgtttcagatcatagtttattgtgttatatataagaatattacttcattcaacccagacatgcactggaggataactctcccaaggtaactgatacccatggacttcctgtaaactttaaaagtggaactaatagctcagtgggtgaaagtgcttgccatgcaaacccgacttcctgagctcagtccccagaaacaacatggtagcaggaaagaactctggtctccatgtaatgcccccctctgacctttatccatgtgtatatatacacatgtgcatctatatgctagtagatggaaggacacacctactgtgcaccaggcttgcaatgtgcttcagttgggaaggtgtttacagtcctgcattataaggactactgttgtgttctccctcccttagcgaaaagctgttgagtcgtccgccggctctgggtttatgaatgcgagggctgggctctgctgcagaacacgttgtaatttcataagctgtttcctttctgtggtttgtttgtttatatggagtgtttgtttggtggcagcagcagaggaaggtttcctgaaggaggcattcactgaagaacaatgggtagtgttcaggctttgattccttgtgaaataactgttttcgttccatggaggcttgtctctgttaattaaccatgtgtctgagagcagttggggaatctgccacatcccgagtagttctaactcaggctcttgtgcttctgactctctaggggcaaagctcttaagaccttgggtcatttggtcccctacacacctacctggccaacccccactttgaaagatgaacagagaccctaagcacgtggtccagcctgggaactatagcatggaatcagtgactgacagacttctctgtttacattaaactacacttagcagccatcctctttttctttaagtctgtctgtgttcttggcattgctactcctgctccacatcctgtgaagatgaagatgagctgcttggaaaccagctggggcctcagagtgagggaagggttgcatctctggctagaggactacagctttgagccattttggcacatgatatatgtagacaaacacgctagtacgtggactttgtgtgttggtggcagagacctgtaatagcaacattcaagatacttaggcaggaggattgtgaactctggactaggttgggctacatatgagacattgtttcaaaaaaagaaaaaaaaaatcccaacataatacatcccaaaactgagtttggtagaacctgatatttagtgacaggaaccttcactgtgtcggtcagcagctgagcaaggccagccaattgtcagggtttgtttatttaaccttgagcaatttgcctgaaccttttgtttgttgctggagattgagcccagggccttgagtgaaacctagatttaagtgctttacatatagcaaaatgcactgtagagtcacacccagtcagtgacctgtggaaggggacgggtcctggtctggtgagcctcctcctctagtgagccgtgggaagcacctcatgtgcaccccagctgctgggcttcaggaatgctcatttcaaccatcactctcaaggtttctgatgagttttattaatggggacacttgccactactgatatagctatttaactaatttctgggggagaaaattagctaaattgttggtaagaacacttaaccatgatctatatgtccgtgtgacataatttctaaagggaatacggtgaaaattcaatctgagccagatgggactgaccacaggcagccaacacaagtgaccctgaatgacttcttccacctgggaagagatgacttgcgttttatggcctccttttgctctgtgcctgggaatcaatgcactttccattctgctgatgagagcctctggtgagagtggctccagggttcctgggctatctcagcatttttagccccagggtttggggtagttaggagtctgctaagctttaagattcagtaacttctggcacagaagttaaaaaagctaattggcttttaaagaacctagggtaaatttgcctctgggcctgcagcactgttactggtagtgttaggatggggcagggccctagaagcccagagaggctcagcttggctactgtcctcactagagcacttaggaggacaagtgacagggaaagccaagaaaggagattagtccgagtggccacatggagagagaagaggagcccagatgtccagtgactcgccctcccttctcccagcttccattcttcagagtcctgaccggaggtttgggttgaattgagggcgtgtgtgcacagctaagccgtgctggtcaagtgtggttccgcccatctctgaccttgctctcagctcctgccctgcacagcgatctgacaggttgtcagagctgtgtggtatctcttcctgggagacaagctcttcctttggctggcaccggatatcagcctttcccttcatgaggttacttggaaattccagtttctcagggtctacccctccaatgttctgatagctgggccatgggaagaggacacagcatctacagaataccctcattagcctgtccaggacggtcacagggtgaggatgtcctccagggcttggggtgagccatctgcagcgtctttactgtagacaagttacttctctccatcttggacgtgccctgtctccataataagaattcatggcaaagatgttaacctctgtgttgaaaaaagaaaatgtgaatgctaagttagtatcagggatgtaggactattgaaatgtggattttcagttttcagtttgttatgtgtttcctgcttctcagagtgaagtctgttcaatcccttcgtgcactccacaaggttggtgctattatcttttggttgtgtagactgtgatggcttcgacactaataatggcttactctagactggcgtgtgtgcatgcgcatatatacatttctaagtgcagtcacacatgtatatatgctcacatggaggacagagccaccctcaggtgcttacactcttgaggtgccatacaccatgggtttttttaattttaattttaatttttatggttttgcttttggtttgtttgttttaagacagactattgactagcctggtgataaactctcttagaaataaactagttggtcaatgaaccagaggcccacctgtgactgcctctgagctgtgtgtgtgttatcactgtctcccagccgtgaccatatatgttgtcactgtctctccagctgcgagctctcatgctgggcttttctactccggttcttgggctcaaactcaggtaagtcctcaggcttgcatggtcagcgcttggcaagcctgagacccaagtattttgttgcctgctttgctgggctggtcaggtggccagtgctgccttaagctcttagctgctcagtcaagacactttttaaagcatcgttgtactggaagcaatcaatgtaataataaaatctatgtatcagagaggggaaacctcatgccacagtgcgtgtgtggcggtcagaggacaacttgtaccgtcagttctgtcttcccatcttaacataggttcagaatccaactgtggtcaccaggcctgcaaacactttaccatcttgcctctaagaaacttgaaaatcctgtatttggtatttgagagccaaatcactggtgagctgccagcatctgtattcctagactttcctgggtgacaggcagtggaggtggagaagctgctttggcacaagagaaaattagcaagaaccacggtaatcgtcatattgcaggtattgccttcaaagagtgagaaagttctctttagtggccacgactatgtgactcatgggtcctggcttgacttccctatgtcacctgctgccctctcatcttcatggagagggtgtgagggctgacgcggttcaccctctgagcacacagagcctgtgggagtgtccagcgaggaaggcagccagcctgagggagctgcagcctaccctcctttcctgtcctttgtctattgtgagaagcttagcatgcagccattactcctgtgatctgcctgcctgggagccgcactatttttaggaacttctccacacaataggtttataaaaaggctattgagcctttttaggctctgtgttctgtctgacaaggctgagttacaagcaggctttcctgcctcactgctcaggagggcacgattctctcttcttctacatcttctctgctcttacttagttgtttcttccttggaaagtgcttggagacccagaggtctgctggtcctgtacagctatggcaggaatctggggagcactctgttgtatgtggagcactcccggtgtctgtggagcacactggtggatgtggagttctccagtatctgtggagcactctgtgcagtttctccagctctgtttcacacacactggttaagttgcagttttttatttctcctcttttaaaaatgtgctaacatatgcacagttagtggtgctgctggggaaagtgaacaagggagctggttcctccttccgagtctttcgtgtcttgagttgttttctcagaggaagggatcccattggcctggcctgatgaccaattgagaaagcaagtactgtttattatttgacgtttgttttaagagaccacttgggctggggtgtcactagcttagttggcagcatgcttctctagcgtgaaggaggccctggattccatccccagtgccacagaagtcaggtctgacatcccagcacttggcaggtaggagcaggaagatgacaggttcatgatcagtcttggctgcaaggtgcattcaaagccagcctggtctttatgagaccctgtctctgcagaatcaaagaggatgagaaagagcagtcgggcagttggatcttgttagtttctgattttacgctctgaatatgtttgctcatcaggatggaagggctgacttgcttgccatcactgaagcctgcctgcctcttatagaacctgacgctctcctgaggccacgggatagactggccacttcttccccttggtatctctcagttaagatgctgtaccaagcaatgcactagacttcacgccgtgagactgactttttcaaacacacaactaaatgaagatcattctcaaactaactttcttctaggtgattagtcaaataaagttgttgttgttgttgttgttgttgtttttagtgttaattgtaggaggtggtagacgagaagctgtccatataaccctgggatacttgcagagggctggccttccaggccttgggatatgttcctgggatgtcagccactgtaaggacaggtgtacagctgtgtggagggctccacttaggttccactggctgcatttgagccatccttcccacttgtcctctccagtgtctgtcatgctccttgagtttgtcagtggcctggctggcatctggttgatattaatacatccttggggttcctcaggtacctggctctatggcacctgctcacttcaactgtggaagctgtttagtgatttccaaacatcatcttggcccctagatccattaccaaggtcactgcacagagcatcctgtatcctcttccctgttgcctctggtgttgatttcgtaagtaagtttagggtggggcccagaggatgattttcctccaggccctccagagggcattgtccatgtgacccatcaggggttgaaccataaaagcccagacaataagtagctgagcccagggttctttgctctgtactgttggcagtgcagaaggcccacaggcttcctaagctgccctcccagattcggcggctggctttgcccatccagatcgtctgttgctggagggctgtggcacagggtgactgtggatgttcatccagccccagaccacaggctgagtggactctcatcgaatgcgtttgtatgttgaattactacttattttggccgccatcttggtctttttgtgacttgtgttgtcgtgcttacttttgcacgctgatgggtctatgaactgtgtcttattaaagaacataggttcatttcagggatgcttcagagcctggtagggacatgtctaaactgtagcttaatttacatttcatggtgacaagttcctctttgtaaaaacaaaaactcaaaacatttttggttgtttttgtttgctgagaaagactctcggtttgtagcccaggataaccccccccccccaaatagaattgtcctcccttctcagcctcctaggtgctgatattccagatgtcagccactataattagcttataaatctatgtaaataatcaaaggacaatttctcagagttgatctgaccctcattctaccttagcataaattagcttagggagcaggacggataatcaagaaggatgtggtgatgagaagggtccagtccatgttctttccctttcagcattgtcctgatctcttcacatggaggtgggcctcctctggggagcgggaggagggagtgcctgaaaaacgactcttcatacgagaggcagggatgtgtacaccacgacgccatgctggctttttctgcactgctagagactgagcctggggcccatgagcacatgctaggaaaacacttctccacactttcaaactcgaggcagggtctcacagagttggtcataccagccttgacctttgctccccctgcttctgtcttcagagtcacagagctggagcaaaggtagcaagcgttagccaaggctccttggacgtcagctcggcacacggggtttgtttactttgctttatggaaaccggggctctgcaatcagcgagtctgggaccccacactgcccgcgtgtcttacctgcctgaggtttgcatctctccagctgtgctaccttccattctttcttcaagaaattctgtctttgtagtcgctcccatttccagctgacttacaacttgttactgatggagcccagggcccacagccagaaacttccatcaagtggagggtcctggctctatctaggcctgaccctctcggtgcaagcctgcccatgtgagacacttgaagaggctgaggcaagtggctgttgtccttctagaccaagagggaccgaccagcagcactgctcctctgagagccctggacagacgctggaaagcagcctccatctgagctgtatgacctgaggtaaacacctgctctgtgggcaggtggagtaaagatggcccctgagatcttacctcctggaacactagctctccacctgtgcatcaccccccccctttttggcaaacctctagctccaaaaaatatttgcattatgattcataacagtaacaaaattacagttgtgatataacagtgtaataattttatggttgggatcgctacaacatgaagaagtgttttaaagggtcacagccttagagaggatgagaaccactgcctagaagactcattagtgactgatgggatgcagtccagtgatggagacgcttccgaagggtctgatgtgactgtaatagctaagttactggttactgcctgtctttctggtatcagctagtaagtttagctagtaggcagctagtaggttcaggtgaagggtctgtggtacacagtgacatcttcctcagtagtctctgttggaagatgacattgcagccatcatactgtcacctgtgtgagaacagagaacctggggtgtgtgtacatattcatgtacgtgtacatatgtgcatgtatctgcatttggaggtaagctaggcctcttcttggaaagtctccagcttatattttgagagagtctttcactaagtctaaggtcattggttaggctggccataagctccaggtctgtctcccaattgctgggactgcagacgtgggtgctgaggctacaaactcatcaaaatccacattttgtgacaggccctttatcgactgagccatctagtgagcctttgcatttgttttttaaatgcaaactgaattctttggtgaaagacaaagtttattggttgctggtgcctggtggttgagctctgcagaggactgattcagcctggcaggcttctggtgctctcttcatactcccaggggctggcagcgggccagctgggccttggctccctgctgggctgggaggactactctctggggtctcttgggtaagttcaggcactctgctactttatataattgctgtcccccctcccccacccgtgggatgaagaccctggagtgtgaaattaacacatcaagtgaatttgatattgcagtagccttgggctagtttttgcaaattaaattttgcagaaattagcgtcagccttgcaaaggcagcattaatttagtgctgttgacactgaactgtttccttgagacaggagggaggtgggggttgtgggggggggttcatactaggataatgaaggaccctggctatgtaaattttctgtttggttaaaaaaaatacaaatatgccattggctaaaaaggcttgcccaagtcaaactccaggaaatattgcacacacttaaagataatgggacatgaacataaggctgaggtgggtctgcaccacagagctgctgtgataacgaagctcgctgtcctgaccgtaatgagaatgcctgcacaggagtctacagtacccagcgtcacctggcacctggggactagaacacgagtcagctctgcagaggcttcaggattggactgcctacccagggttccttcctgtctggatgccaaagcttgctctctgttcatatgccaagtccttgtcttgtgtgtgcacgtgtgtgtagaggccagtgatcaaccttgggtttctcactgtccaatattttaaaaaattatttaaatgtatgtttgctagtatgatgttggattcccttaaagcagaattacaggcagttgtgagtagcacagcacgttacaggtgctgggaattgaacatgggtcctcgggaagagcacaggtgctcttaagtgctcagcatctctcctgcccacctctttggtttttgaaacagggtctctctggccttgagcttgccagtttagccaggctagctgtccagtgccccccccaccccccaagaatccactggcttctttctgcctctccagaagatgacaagtgagccacacaggtgtgggagcagtgggcactgagaatctgagctctggctcatgcttcagtggcaagtcccttacctactgagccacctccagctgctccaggcctttccaggtgtcctttgtcacgtaggacggtcttggtctctttactctacctgctggaggcatttgttgttttcagtttgaatcccaggggctgatccttccaggtcccgtggtggggagggggcaggtttccctgtgggcactacaggcagggctctatttgcacagtgtgtctggcatgacctttccagggcagcagctgctactgtgtttgggcttagtctcagagccaatggcactctggatgtgggatagtaagtcacatagaaagcccttgtcagggtacttgaacttgtgataaaactgtggtcatgcaggtaccaggggcttctgcctctcttgatcagttcctagcaacaaacaattcatttggctagttagccctttgtgttaggcaggtaagaaagtgtagccaggaatagagttctcaggtttcttaatccttgcttctgtgaggcagacaggtgtgttattggtaatggtaacaatgggttggtcccccaagaagagagctgggctttctgaggccctgtgacataccagagacagcagctgagaggagcatggaaaggggagcttggttttgctttgtagtcacagggtggtacgtaggtgtattctgggctcagagtctgtccctgtaagacagagcactttgaccatgggacgtaagagttgacctcagtgtgtcagagccatctttggaagaactctggacagaaactcaaagtaggcacttggaggtaggcctggcccacctgctatgccatgcagtgttctctaaccagggaactcactttagagctgagaagtacagcagataccatgaaagatgcgcttgctggtttgctcatgggctagtgcttagctaagttttcttaggcagcacaagagcacctacaggtgaacgctgctgcacagttagtgggctgaaccctcctctctgccaattaaaaccaagataatcccccacagacacacccatcgtccaacctgatgcaggcagttcctctccggctatgtcacattatctgggaagcctaggagggcagagggctgattcttcccttaaacttggccattggaaattacttccttactgttactgtagtagaaagtagttgaccctttgtgagcctgatgataaaaataaactaccaaactctgggaacgtgtaagccaacagctcctgcagtctcgaggccaggacacacaacaagcacagttgctgtagacctgtgttgctgcaaggaagctgtcctcccagtgtggcaggatcagctatgtgtgttgcagaagtaccatattgtcacgaaaatagtaagtgcttcgttcttcttgagtgagtgcattctgatcgcagaaacagcgtggggggagcctgcgtgccatcctgagcaggagtaaaaacatcactatttttagggaacgcagcagaaaggctttggtggcacagaggctaggaaaacagtttgataaaaataggacctgaagtgtaaacacttgtttcttggtccttcttttagcacagccatgggaaggaatcatctctggggtccttgggtgagcatgtgtcagtatgtggtgagcatcttcgtgcagctcgtgtgtccaagggtctgcttgctggtaaggtatggctaactctcagatttctgtccctttgtcatgtctttgtgtccctcctgtgactgcattcaaggggctcagtggttgctaatactcaccagctcctcggtgtgcctttccatggtgatttctttttcttttccttttccttttccttttccttttccttttccttttccttttccttttccttttcctttccttttcctttccttttcttttcttttcttttctttttttttttttttgagagatagtctctcactggcccagaattcacctgtcctctcgtctctgtgtagcatcagaattatgagtaggcgctccaatgtccagctttttgatatgggatcttgggttcattcttaggtcttcgtacttacttgcaaggcaagcaccctagaaaccggcccttctccctggcacccatttgaatgtctccgtggtcttgcatattttaaacaaattacaaagtttgtcttaggccacacttgctgtgtgtcttgtgacattgccttccctgttggaggtcgagcctgcctgggtgtgcagcctgcctgggtggatgttggctgagttgatggagccattggtgatgccggtgagattgacggtctgcttctgcctgcccacagtgactgtgacaacagctcactaaggcacagtcagctgttttccaggggcttctcagagtgcttctgcctagtggcaccagggcagtcagggttatttcttgtgcaaatgaaggtggctgtgaggctcctgagactggcagtcctgtttgactaagctaagctaccctggcattgaaatttctctattggtttggaaaatatagaagacaaaaaatactcccaggctaaagtgccatgataaagtctggctcacgggtgactgaataggaatgttcacattaaaaaccctgagaacagtaaatatttgactcgctgtagcatagccttcctcctgcgttacatcttggttctttcagcctctgccaggcttgcagacagctgatcctgggaggaatgagcactttcctttgcctgcagcaaggtgccatgggtgacccgatgtagtagctttatcagtaaggatttacacacagcagcaaaagtggatggacagcagcagtgttttttacagtgtgagacaagacccttttcagggattcgcctatctggtccccatgcctgccatgaagaaattccctgtgggtttggttcctccatcaagcacagttcaccaggagcctccgtctctgaagttgacttcagaatggatggtccagaagccttccttcttgcttgtcatctatgatagcataggggtgcccgcaccttcccacatgtgaacaccacacacataaaacacacatacaatcaaggttaacatgaagaagaagcagggtaaaactgatcatgtatttgcacgtccaaactccaagttcaggttggaccagcaggggcctggttcataagagagttttttcctcttaagttcactcatctgtcctcagtgaggccgacagtgacctcacttattccaaagcaacatctgtctacataaactttccacaaacaggacactgggctcagcactggccttcttggcacctctgtggctactcccttctgtagctgacggtcaccccaaaccaccacagatgccttgaagtgggccgttttcatctgggatactttctacagcccaaagcaggtgcctttcagggcacagttagagcctgctgctggaagagcaagtaggtggacaaggaagggaagaatcagaggagagcctcagcatggaagtgctggagcccgtgaggtgcctgccgggcagaagtgcagggctctgtccctacagctcttctgaggtggtgcactctcagcatacagggctgggtcctgtagcctctgtagttactgcaagcatctctgtcctttgtcagttttctccatgcctctggctctccaaggccccttggtctctgtggaggtgcatgcctctgctaacattcacctgcccgcatcttttctccagtcctgtgctaaccctcctttccttacagccttcctctctgggtggatgccatccctgtgtggtgtgccacctccttgcagtttgtctgggcacaggcattgtactgtgttccactttgaatgtggtcttcacaaggtgagcagctgtctctcttcagggacactaccgcagtgctggcttgctaccagtctgagcaagggcttagttcatgtttgctgcaagagtaaatgaacagtgtcttaattgagtttgttcttgtttgtttgtgtcttctgtgagtcttcttcgcactgtgggaaggtacctgccacacaatagagccatttgggttccaagttcattgtgaattgagcaaaggctgccaggagacaggaagaacggagggggttgtttgcagtctgtgctggtcccagggctgggggtggggctcctctgttgtgcctgctcatcctgcgagcccagcacagccccagaacagctctgtccgtgcctcatagaagtcactaaagccagggaggctctgccttcagcatccatctccatgattactgcactaatattcatttgagtatttattttccttttgctcaagtaattacgctgcagcaaagcttgactgtaaaaagtggattatgtaattacctctctagaaaattggctttcaacttgcacttgggattcgtgtttgaaaagaccgaggttctgctgtgggacacatgccgggtctttcctgggctgttgtgtatctggaggtcacctctgcacagcataggtgttccacaaaccctgtgatatcatttaacttgggttaccacatacgtccagagtcaggtccaaccagttagaagagtcaaaagtgaaaaacagaaaaaatgagattcattttatgtggctacatcgagaggagggacaaagagatccagggaaacccccaagtctgtctttgggttcctagaatgggaattaagtctaaacaggggctggagaatgtgcctatctcagcagccataagggccctgcccacctcagccacgctcactgacccagcttctctgggcttcagttgcatctgtcaggtgggctgagttattagaactgtgtgaaattactgtctgtgtcttaaatgggaagacgagcccggagcctcctcagtcacacactctgggccaacaggtcaggactgtttcatgctccatagacatgggtcttttccacgtggtcttagggaaacagaagagagaccgagagaggagaggattgcagacagaaaactctgtcttggccgggtcacggttggcttgggtcacggttggctcatgctgtctctgaagggaactaggtttgagttactttggtgttttgacatggggtatcatgtagcccttcctacatagctgaggttggccttgaacttctgatcttcctgtctctgtttcctgagtgctgggatgtggactccacacagctttcttgatgtgttctgagaactgggtggacacagatgggtccgtttgtttgtctgtaatactattctctctttccctaaagtaattgaacttacaaaggttcttacatggaaggaaacatcaagctgattgaactagcagcctgtagaatggggggagctttgtctgctgtgcatctgataagggttaatgtctaaattacatgataaactaaaagaaattcagcacctgaaaatacccagtaagtcacagacagacacttctcaaggaggagtgcaggagcataaatacagaataatatccaacatctttgcacagaacatatcttgcaaggtagggttcatcagacaggtgactagaagacagctcaggagtagaggctgtctgaattctgacggttgggtggagcccaggagagacccctggttgcttccttcagagggatgaaggtctttcccccaggaccttgaactagttcttgtaagagtgaagtgttagaggtgggaaccccaaccctgagctcctggctccctgctcatcctgaacccatgctcagaagcctccagaactggaactaaacttccccctatttagtacccagctgcaggaacctcattttagtaacagaaagctgactgggctccctaagacaagatctggggaagccagcctcttcctcccactgccttctgcggatgctggccttctgcctgttgttttcatttgagtcttgggtatttgtgtatatgtgttcctgtgtttgtgtggggcatcccatgtgagcacatgtgggctaggccagacagcaactccatcagggttgttccttagacactgtcaagtgggtgttggagacagaatctgtcactcagcctgaagctcattgatgaggttagagtggctctgcaagcggtctcctgacatgtcttcatgtcatacacagagcaaacaagtaagtaagcgccatacggggcttaagagtgactgagcaaatccctcatgtggatgtccagcctgcgtgtgcatgcacacacacatatgtacatgcttacacacagaccatccttcacatacatatacacacgcatgcctacagacatacccatacaacacacacatgcgtacacacatgctgggataaaaaaggaatcttgcctcaacttctcatgtgaggattgcagatgtgaaccacatcctgcctctgtttggattctttctctatataattgcgtttatcagaataaaaagccacatgttggccgggcgtggtggcacacgcctttaatcccagcacttgggaggcagaggcaggagaatttctgagttcgaggccagcctgatctacagagtgagttccaaaacagctagggctacacagagaaaccctgtctggaaaaaaaaaagccacatgttctagtttagagacaggagaatggttctacatatatataattgctctcttcagacacaccagaaaagggcatcagaccccattacagatggttgtgagccatcatgtggttgctgggaattgaactcaggacctctggaagagcggttggtgctatgtgctcttaaacactgagccatctctccagcccagatgtgtggtttgtgggtaggagtgcttacatgtgcttaagacactgggtgttgatgatagtaattttagaattaagtaatcttgaataataatgctggttttctggttgtgttttattttcatgacagaaaatctttctccaggtcatgagactgcatttgtgtaacacaatgggacccatctgggatggaggcatggaagggtattggcttccgtgggtctcctcagtttatggtactgtgtggctccagactgtcctttgggcagtagggacacttggagctagacagagacactacagtgctgcgtctctcagcacagcctgagagcacgagcccataaaaatcccctggagtagctcttgctggttcttgggtcccctggagtagctccttgctggttcttggacagcttggctgtgtctgcagaagtcgcaggtggtaaagcctggctttgtcatgtgcagcttccactgtgtacaaacaaggtgtgcttcacacactgctcacaaccacgcagggaggaagagatctgcagttttctctcttcccttctggcgtcttctcccctcacccctgaggctagacaagtctcacctgtcttaggctgaccagcctcgcacttccgttccttgattggaagcaattgagaagttgggctgctcagctgtgtggacagacacgaggatgggttctgacatttgctttccgtcagctcactcttctgatacttgttgggaatctctttgcgttaaggctttgcgtaaaggggacacatggccaaggacttctgtggcattgagtcttgaaaactctccatgcagttttatggtgtggtgtgggctgtttcttagttctgctcaggcctattgtttatattttgagtgcttctagcatgtatttatgtgtaccacatgtatgcattgtctgctgatgccagagagggcgttggatctggacctggagttatagacagttgttagctacccaaagtgggttctgggactcattctcagacctctagaagagcagtctgtgctctgaagcaccgagccgccccagcctgggatgggggtggggctgttaatttaatacctgttttctcttgtcctgagagtttttgttaatgacaggtaccatgtgaagctgatgaggggaacttgtccctcaatactgcgacgaaagtggtctgcagagctgagattctatcctcaaagccacatcgtggctttaaatgtctgcaacttctggagttcagtcagatttcctgtagttctcagtataggtatctcatatgtgggcaacattggggcaatttctgtgtctcggctgccagtacagagctgtgtggctatcagagacattgtttgggaaaaggggtggggaatttctctggccatactgagactgacttgtaggtagtgatgacaggtctctgtgtccctcccttttaggctccatcctctgggcaccaaggcccatcttgttatatgccaacctgactctgacctggaagccagaacaccttccccccccaaccccagcccctcagagctggggccctgttccagctgcagtgtgtccccatcctcaggagagagctgtgcagcctctgcactcacagctcgggtagacggtcaggtcgtctgcggtgtgcctggggtggttggtattaatagaagcctgtacaagtgttttagaactgaggtaggaaccggacactggaggatctgctcagggtttctctttctcttgtagtcatgtgtccaggggtttgacttgtaaaaactgtgactctgattttggcaggggggtggcagggaggacacattttgccaatgaaaagcattaaaattcaggctgctgcccgtgtcagatttcatacaaaagacattttacagtcaaacccggaaaacgtggaaatagagatttataatggaaatgctgattcaatttaagccaaagccagacatttcatgggggaaaattagattaaacagtagatgcttagagaggcctaaaaggcatatgctatgcatgcgtctcaagcattcgggtactttctgtggtgagcaggaggcagccccttgatgttagagccctttattaaacactcttttatctgtctttggacttatcagaccccaaaacgaacggcctgcagtctggtgattctgctcattcctgcaggatcacagcgggtgttgtgggtggaagtgattgtgtcctgtcacggtgtgccgtctttatgaggttaaggccatttagatggtgaccatggggctcccagttaccactgaccacttacatgtgagggcaaggaactcccagagaggccctaggacctgctggcaaggagagaggcttcctgctgtggttagacaccttgggcctctaccctgacctgagtgaggtcaaggctgttcccaggtgtgccctcccctgccagggctacctgcctacctcactctgctgcagtcttctggatacacaaacattcccgattttgacaaagtccaattcccaatcattgtcttgggttgacagtgctgttggtgttctatccaggaggccaatgccaagactgcactcacacttcagcttccatgaactatagtgtgtgtgtgtgtgtgtgtgtgtgtgtgtgtagggcagaggtcaacattacacatctttttcaatcattctcctccataatgtttaagtcatgatctcttacccattcagtgccactgggccaagggatcctcctgtctccacacccccagtcacccctggtgtaagtcatgtgccacatagaagcatggcttttatgagagtgctccgaggcctcatgcttgcaggacaagctccttcccagccatctcccagacctgttgtcttctgtgacttttatagtttttgcacttttctatttaatcttttttttccgagtgatttttatatgtggagttaggtaggatccagtttcatattttgcataagcacatctagtgtcttttgttggaaacgtttcccccattagatttttaccatccatattgaagaagacttgatcgtaggcctgagaacaggccacagaggcaacttctgaaagatttgctgtatgtaggatttaaatggtcagacacgtggacaaggatggggagaaggccttgcggagtctttggtaggaagcatgcaaaatgccctggatgataacataaagtagcccgtgtgaacagagaggcgggaggcccaggctctggcaaggattgggataggtacagtgctccgtgctggctgaatcaagcaggctttattctaagggaatatgacagggttcaactaggtggcagctgaagcagggagggaagggaagcatgactcagaggaagactgtgtggtgagcttgacgggctgtggttggatgtggattcgatgatctgtgtgagagcttgctgggtggcagtgttgggcgcggcctgaagaggctggaccgtaagcttgagcagtcacagtgcaggtgggaagcgtggagtgcggagcttttgggttgtgagtaaaggccgacttgtcagcgtaagagagtgtgtggaacctcccagatgcactcagagttcagagaaggcagccagggatagagagctggacacagcatcccgcaggaggcccctgagggaggaggagccagcaggcaattcaaagacgcaaacagggagtctgagtctggcccacgtgtcataatgctgctcccggctctaccctggcacctgggtctgcagcctcatagatttagatagatgtaagctgatcatgagttccagcccagggccagacacagttgtgagaagggacgtagggggtatggggcagcaaggtgggggacaatttgtgtaacagtctggggccctgcctgttcatgtggaactagctggtgcctggtctgcaatcatcctagcatcccacctgatagacctgtggttcaagttcccttgtttactttggtcctccaagtctgtacatcatgggttcatataaggggttctctagggtttgaatatttcagggttcatcatgaagtcctgaactctggtggaaaacatcctaagtgtatcttggggctctgctgtcctgaagcccacactgggaaaaatcccccaccccaccccttcccctagtaacacaaggcttgcctaaggaactgtggagttaatgccagtgtgatctttctaccaaggtagaagctatgtgtagcttaccccatatcataaaactccagagagaagaatcctgttttctgcattttcgtggccatgttaatgttgctaccagatctgtgtattggtttggtttggtttaaagagtctctgaatgaagcacttattttcctgctcagatttaacaaaatgttgttaaatctgattaaacttgcctatttaataatagctgtcttggctacttttctcattgctgtgacaaaatgtctgacaaagccaatctaaggaaaattttaactcattggccagtactgtccatcatggtggggaggcaggctgtgctgtgaggcagttggtcacattgtgtctcattcgtccagaagcagagacgtaaatgctggtgctcagctcacttccttgtttttcttcagtttaggacccagctcatggggcgctgctgcccacatttcaggtgggtcttccctcctcagctaaacctctctgaaaatcccctcagcggcaggagcagaggtgtatttcctaggtgattccaagtccagtcaggtggatataaaaacccatttctcaggtcactacacatctgcaagtgcattgaaagctgtttgatgaacatttggtcttgacttcctatgatagcaggctgagcatactggacatcgcatggctcaggtgatagaccttcagagaaggccacagcctcgttcttgtcctcttggccacaggggccggccggccgggggtcaaagtggggtacctttgtttctcctgcatttcccagccatgctctgattggattctgctgtggagaataagcattccccacacagttatccttgcattatcaatgtgctatataattttaaccactcttttctatgaatgggactcataatgtgtgcattttgtgggtttcaaccatttgctacagctgcaggcctgataagaggctcaattataagcacagtattggtctttaagactcacggatgtctcgtggaagatggggaaatgtgtcttacgtactgacgattgtgctaaagcagccaagtgctgtggttctgtcttgtccctctctgatgaatacctaggctgtgagctgagggccagtccttctcaggttcccagtccttgagtttgtccttgagctgtcttcctttgccctccctaactccttactgtaggtctcctgctcatgcctgggaggccacacaacttccttttttcctttttttcaaatgcccacagagggctggttgtttacttttgatggcagcagaagccataggactcatagtgcaaggctcattgtagctggggatgtagttggtaaagttgcacacttgacatgcaaaaagccctgggttcgatccccatcacaaagtgtgtgtgtggagcaatcttcttgtactggagaggcagaggcagggggaccaggagctcaaggtcatctttggctacattagtgagtttgaggctagctaatgctatattcacaaaataaaaagcacaacagagggagagggagggagggagggagggagggaggggggatagctgcaaggatggggtggtgtgttcttgatattgaaaatgagcttgagaaggaaaactaataatctggcgaggcctgtgtcttctccttccctcagtgtcagtgtctggactcgggaacttggaagcatggtccttatgctaggcctagcaggatagagcaggttagaagactacgtaatatgtaattaggtgcccattcagtgctgggtatactttataacacaccttcatttgtcagtgcctttcatatttataaggaaatgtgctagggcttatcgtctgagccccgaaatttgccagtgtgctatctaagctagttacagtgacaagccaggaagagtaagcgcgtggaggatcatgggaagaaggttgtagaggcttcttgtctcaggcttttgctcctaactctgacatgaagcttgagggacagaataacaagtcccctggatattcagttttccacaacatctttatttgtacgggaactgttcatagcatgcattgggagtttctgccaggaagctacctaacagaagagggttctgcacagcccagagggctcagagacccatgacagatggcctctggtgactagtaactgcttgcttctgtgctcccgccttgccagggagagttgctgggatgtggacagaatgagggtggcagcatttttcagtctactagttgggccatcagcagctcatttgccccatacctcagtgggatagggtgccccttgacagaatggaatagctgctgggtattaagttcatagtcactgtaagggtctgaggaaaagcatggggcagtaatatcctgtcctgtcttcccatgtgtttacacttaccgaccttgtgaacttgtatctgaaaagttgcagtgatcgttcagctgcctcaggttccctttgtaactaaggtgaccttggccttctgctcctacaggcttccctctccagtgtgtttagtatgctgccgtgccaagtggtgtacagggtgggatcaaacgcagggcttcatgcacaccaggcatgaactctactgactgagccacatccccagccctgaactcttacagttaaagccaattaaattagtagaggctcttatattattgagtgtcggcacctgatgcattcctttagttatttgtcaatttgcttgcgtgcttgcttggttatttagttatttatttatttatggtacatttaccacatactagaaactgtactgatccccacaaaagaaatagtgagaaaagttatgtaagcctggacccacgtggctgctctgaggggaaattcacacacagagagtcaggaatctgctatgaagtacaaggagagagaaagtagccaacatcatggaaacctggggtgtgtgtgtcgggggggggggtggggggggggaacgacacagcgagaggtgactagcgatgtggtcagctctgaagcagctggtgctccagttagagggcgcggtttggacagcagcctaaagtgtgggggtcctggaagactgtaaaggtactcagtataatgtgattgagacacagcatagaaatgggagagaacaccacactgaagagctagctgcacagagggaggtgggagctcacagagcacatgggcttctccagcatccagtgttctgtcacacagctatctgcccagccaggaagagtttaagtaacaccagcccctaatttctgtagcttcatggtttgtctttctggccgacatcttgtcttcactactcctgggtgacatggctttagtgggtctgatgattgacatggcttgtgggtctgtgtggtagctgagtctcagcactccctcccctcacctctccaggagaccctgtctgactcagctctacagcgctggggtttggctccttgttggctgtgcaggggtcttgtgtattttcccactttgtgtcctacgtgttaggttctggaccttcagtgtgtgcggggcatggggaagagagggggagagggaatgagcatctcagaggtgtcagggtggcccttagcatttcataggtggccttgtcacatctttgttaggtaggtataagtttctgttcttttcaatgacagtgaatctacttggattttccattcctgggtcagtttggagaagttgattttgctaggacattattggttttcgatttttgtcacgtggctgcttctggtattgcctgttggggattcatatagctctataccaaacattaaagagaaaggggtgggaacacacacatgcatgtggatgtgggtatgtgcccccgtaagggctgttgagaggccagaggaatagagcagctcacttccttacatgtccgtctccttagtttttgagatgcgatctcttactgaacctgggatggcagggatggctcctaggtccacctgtgtccatctgccagtgttgaagttacagctgaagcttttacacagcctctcaggatatcaatccaggtcctcatgctgtcatataagcacacttaccgaccaaggcggcccctagccagcatacatttttaagtttaaatttttattgtctgtaaaaagcagccatccaaagaactgatgggtccctcagaaagctagttcacagaatcagatgcatctcagtggaagagggccaaagtgtttgcttttttgctgtcgctcccttggtttccaggaactgtttcgtaagagtctaaattgtgtaggaaataacagcaattcatagcagtctacaatccttttaaaaatagtcattctaggtgatcgagaagaggcagccattcccttgtgtctgagaacacaggtcaggatatctgtgtgtgcatctgcttgcattttctccctccctccatttgtcacatccaggagatctcttatctcctcggttacataatggctctgggataaatagcctgaggccatgagcagactgatagctttttttagtattggggacaaagtagctactaccctaggaaaatgtctgcacgtcttctcaaggatgcccatctattcatcttggctaccaggagcttgcccaaacgttctcaatctgtttagctgattaagacttttcatcttggccagtgaactgtaggtggatacttatgggagggacaagagagccacttagcctgtcagagctgagaaagtatgcagtgttagcaacatttttttatggttaaagataaaagagaaatgaaaatacatctgatcacatttctgctccacacatttacatctgctacagtcgttcctgtgtggtgcctgaagcgaatcctgcatcctgctaacgtttctctaagagtgctggtgttgggtttctgtgagagttccagtcagccttgcacaacaggatagtcaggcacacctgagctctgtgacagtgtaaagaggcttggtatcagcagaggcaagggtgaaagatgagaaatcgcctgtagaccggtactgacctgaatcatgtcaatcacaactgactgttttctgtcttctaattcaggcaaaggaatgctaacgacagaagtattaaagagtgctgccgaagccgggacagtgtcaccacagcccctggagcacactcgtcgtggcctcagagaaaccgtgctttgaggatgctgtttgcgtttggtgaaaaaggcaaccacctttctgtctctgtctgttacagtgctgtgtgacgaccatggagggaggctcacaccactactgctgataactgcttcctgttcctgtggacatgagtgatccaaggccgtcacaggcagagaagcacaagcttggcagagctgctgccaaactcaaggacccttccagaaccatgcaggctgatgattattttgctcggaaatttaaagccatcaatggcagcatgggacctgctactttaaacacttccagttcgagtgagggcggaggaggtgggggtgggccagccaatggtaccccagcagtgcccaagatgggtgtgagggccagagtttctgagtggcctcctaaaaaggactgctccaaggacctggcttgcaagacgctgtgggagagtcgttctcagtccagctatgagagtgttacctctatcatccagaatggccaaaatgaccagggtgacaggcagccagaggagcagctggacctggactttgtagaagcaaagtacaccattggagacatctttgtccattctccccagagagggctgcaccccatacgacagaggagcaacagtgacatcaccatcagtgatatcgatacggaggatgtcctggaccaacacgcagtcaaccccaacacgggagcggccctgcacagggagtatgggagcacttcatctattgacaggcagggtctgtctggagagaatgttttcgccatgctccgagggtaccgaatagagagttatgaccctaaagtgactggctcctttgggtttccagatttctttccctgtgacactgccatctcccccagcctccatgcagcagcccagatttccagaggagaatttgtccgcatctcagggttggactacatggatggcggcctcttgatggggagggacagagacaagcccttcaagcgcaggctaaagtcagagtctgtggaaacctcactcttccgaaaacttcgggcagtcaagagtgagcatgagaccttcaagttcacgtctgacctggaggagggacgcctggaccgaggcatccgcccatggagttgccagaggtgctttgcccattacgatgtgcagagtatcctgttcaacatcaatgaagccatggccacgagggccagtgtagggaagagaaagaacatcaccacgggggcctccgcagcatcacagaccccggttcctgtaggcccagccggaggctgcgagtccccgctgggcagtaaggaggacctcaactccaaggagaacccagatgctgatgagggcgatgggaagagcaacgacctggtcctcagctgtccatactttcgcaatgagactggtggggagggcgatagacgcattgccctctctcgggccaactcagcctctttcagctctggggagagctgctcctttgagtcatccctcagctcacactgtaccaatgcaggtgtctctgtcttggaggtgccacgggagagccagcccatccacagggagaaggtcaaacgctacatcatagagcacgtcgacctcggggcctactactaccgcaagttcttctatggcaaaggtaggcacctggcttcctgcaggggctctgggactcttctatactactgtgttaatgccttcctgcgagatatacatacacacacacaaacatacacacacgccttccccaatgtcctaaggacaaaccaaagtacaattccatcagcattcactctggagaatcagtgagtgagtctattagactgacaaagcgtaggtaaggaaggggttgtaagcaaggtggccttatagcagccatgtggaaggatctgcagccagcatggatgactctgatagctgcacagatgggagcctcttccccagttcttgctccaccttgtactttagccctttctgagttagggcagaattagcacacagctgatggatggatggatggatggatggatgggtattgtaggggccctcaccctccctgacattccttttacaggatgtcagtagtccaaacgtccagctgtgacagtcttttgtaagcaggcacccctggtcctatgaagacagcagcagtttggctcagagaatagtcccgcacgacacactgggacccaaataacgcagcactcgaggggcagctttggaggaggaaggacttgttctgacatggttgcagagagtccaggccatagccaagtgtccctgtgttcttggggtagacatgggatcatgtcgtgcagagaattttttcattttacagtgcatagggagggatagacagacggtcagggattgggtatcagttctggtgacacaacttcagtgacctgctcttccggtaaagttctaccttgtaaagtttctagggccctccatagtagcaccaccagctacagacccgttgtttatcatgagccagtgggagacgttgaaatcatcccaggcttcaggcactgccgtgggcctttctgctttagagcagcttcctcggtacccgtcacctggacagctctcaccaagggcatgcttcctccccctctgacatcgagctttatttaaactttacccccttactaagtgtcctgtggttacatccatcctgtgttgtcctctgtgtcgctccttgcactgtgtagctggataactctgtgggttccccaccattctctgctcttgcctcgttaattcataggctggatatgcccaagtccctgctgaaagaattctgagttgaccagatgtgtgtggctcacatgagcagatacagggttaggcttccttctgccgttgttcgggacatctttcatatagtatagaataaattatttccacttttctctgtctgaccatctgtgtgccacacaggctttgtcaccagaatgctcctttccctgttcccagctctcctgtttgagttcagtccttgtcacaggaaagcccagaacctctgactgacacccccatgtcgtgccctcccttacgtaggaactctggaaaggaagaagacagctagttgcttttggctttcgaaaatgacctcagcaaaacatgcttcctccccaagacttgttatagctagaagctggcacatgaaatcaagtctgtaagtggcttagcatccaggctgagtgctggagagttgggccttcaggaggaaaggttctcaggtcctagtgtgcaaaagcttaacagctcccactcaagtgcgtccatctcacctccagagtgtgtatgagaggagccaagtttactgcccctgactgatggcaccactggacttgttaatggccttggagtctgttgcaggaagtgatttctaatctggcttttctgtcacttgtgtagacctctctccagtgacctctgccctctctgattgatgatggagacactggagagctttggaagcaatgctctcagactatttaggttggtaaagaaataagttaatcagctcccagaaatagcttgtgtgtacacaccctggagtgtatggtaaggagatgtagccgtgctggctggcagtgcaagactcttggattcatttctgactgggggctaggccgaggacctaggaagtagctggaaatctgagttctagactgtcctgtgaagcccacagaataaggaaatgcaccaaaggccctggtttctcactgggaggaagcctgggaagcccagctgagggggagtggcctcagaggaaagctgccaggcttcagtgtagaggagactcctgcttcctcagggctacttgagatataattaagagcaggagtcattagggaccagacattggtggctagagtcctgaggattcaagtgtagagacaagcttaaccccagagcctcaggggtgtgtttcagagaggatgaggccaacagctgtgagcccttgctctccctccctccatgctctccctccctccatgctctccctccctccatgctctccctccctccatgctctccctccctccatgctctccctccctccatgctctccctccctccatgctctccctccctccatgctctccctccctccatgctctctctccctccatgctctccctccatgctttcctccatgctctccctctgcccacttagcttcttccctgctgcgatgttgaaatactctgacaaatgcaaccttagggagaaagagtctattttaactcacagataagtaggatctatcatgaatgggaaatctggacagcaggagcttgaagcagtcaggaaacagagaggaatgagtgagagccagtatccagtatgtcgactccattttacccagcccaggagtggtcccactcacaattaagatggctcttcctatgtcagttactgtaatgaagactgtccccacaggtgtgcccacaggtcagtctttcagcttgtcaggttgacagtgcttgcttcaagctcccctcccctcgctccttccctgcctcactttttcttccgtctttcagtttcccctttcctttctccttccccatctccttcctatataaaatggcatctgacaggacacatttgactttcttcagcggtggaggcaacttggaagaagcagggggcaagagagtggcatgaggctccctcgtggtggcagtggcactgcccaaactaagctgctccaggggagcctcatattatctgggttcacgtcttcatcatctcccacaagcccccacccagctcccttctctccagtgcttgccttcctctgcagcactgagaatgaaggatgctgcagtcagagagtttcacactgggttggagctggaggtgtttgtgcaacgcttgcctcccatgcgcaagatcctaagttcagcagccagtctaataaacagaaatcctgcactatccaccccacctcaacaccacgttcctatttagtgtctgggaactcaggaactacccctttgccaaggctgaagtgcccgtctgtggaagtccgtgcttaataacccagggctgtgaaagggccagatggagaacattagtgattcctagcccacccaatgctgtcttcaagatgagctaaggattcagggacaccctgcaaaggacttagagtagtgcctgtctcaccacatgggtgttgtgcatttcgtgtgtgtgtgtgtgtgtgtgtgtgtgtgtgtgtgtgtgtgtggtcttctctcctgaaagaggccattacctctgccacacccagacacagaattaaaggcagcactttgttttgatggttaagagatgaggagagaagcagaagtatgggtgtatgtctggtgaagctgccacctggctccacacacactcaccccccccgtgtcactgatgctagcctgggggctaggggaggggcgtgtcttatgaattccctgaactctctgctgagtcagccatgactttcctttgagtttcatgtccctgccttttcttcccattttatagagtcggtgactaaaagggagtagggcactgttaaattcacgagggtgagcagagtgccatctagcaaaagtactattctaagacacatgttcctctctgagaggacattgttcatggacttggcttagcctctctccgtggccctcatcactgttgcaaacaggtccattgagtccaggaactcgtaataagaggaactacccagatgacctgggactctggcaccaagggacaatgccaggcacttgctctcctgtgcaggcaatgaggccgtagagagtcagtgtaagaacctgcaaaggcctgttcataccagaccccagcaggtcttaggtcagcatggagaaacaggaaggagggtgctgcttatctgtgaggcttgcttgatagccaaagtggagacctcaggcgtattctgctctggtacagtaagatggatcttgcgcccgccagactgaccagcagtaacgctgcaacaggatccttctgcacacgtttattgggagagcttgattgcagaggcgaagagacccggagcccagaactggtgctgcttatataggcctaggagaggcgtgtctcacacccggattggttatgcattacgcctcatttgcatgttcctcatctgattggctactctctctctctgtacctcacagagcctcattatcatgcccgggccaggcagtgtctttgcaaaaaactttactgcatatgtacacattggttgtttgtccaaacttatgcgtggtggccagcagtagtcagtgccactctgcaatggcacatgtggcttcccacagatggaagtgaaggttaccatcatggtaggtcccacaggttctggaatcctaataaagcccactgtgcatctatctgctcagctccaagctccattcgctcgcccatctcagaatgtacagaagctggacagctgagcttccccagcagcctctcctcttcctcttcttcttcctcttcctcctactcttcttcttcctcttcctcctcttgagaccactcagctgagaactgcagcaagtagaagaggcggcaatggctccctccatcccttgtatgccatcacatgtgtgcccatgcatttggagacctgaggttggccctgggagtccttctggaccctttacccttcttttagagacagggtatcccggctgaaaccaatgctcactggtgccactggtctggcttgccaggtcgctgtaggaacctcctgcctctgccttccttccagtcagggattaggcgacatttgggtggggtttaggaatgcagtcttatgcacattgtctgtggggaggggtgtgatgaacatcttatccagagccatcttcccagcccatagcttggttttcacttctcgtgtgagggcatcccccagagctgttcattggaagtgctgctgccaggctgtctgccatcttacagcaggtcacataatctctcacctttgaccccttctaaaacatgggccttcattggttttgtatgaagcaagtgtaatatttttaaacatttcattatttcacttcaatgctgtgggttttccaagcttaatagtggtttggttaaggtcggatcagaatcacatgacaccaatacctcagtctccctgcatggggaatgggctctcataatgcaggagtatgggtttctcaaggctgagtgtgacttcacagtggcctgaggcaggatcttcacttgcccatttgctgggcttttattgtcttttgtccacagctcctaaagcctggtgtagccagcgatctgaaatacaggcacacagttgactagagggaaaggtgatcagctgggccacttcaccccagtcagtagcatgcgaaaacagagtggccagctagttcttgaaaggcagaggacctgtaagctgctttttaggatacaggagtcacaggcttcagaggcctggaggacgtgggtcctggagcttgtgactgctacgatcttgctgtgggttttaccactggaccaactgcctggttgccctcgtccatctctgcagcccccggactcattggtgacttaccaattaatcagtcttcctcttaagatattgcagagtctagaaacagccttgggctggggtcccaggcaccccagacctttgtcttcctttcccccttcttgatggggcagccagggtacaacaccaagatcctgtgactcattcccacactgcagtcttgttaacctctttttcttatcctgtgctattgtattcgtgtgatgtgtggattttcattcaacttaacagctttctcgtggtttccaccctgccagggaaggatttcatttgattcactcttgaaacaattttatggaaatcattagctcattggtttagaaataaggccggcctgtggggggccagagtctgaatgcacacagctatgagggcttgctcatgagcctctgtccagagtggcagggcttctcagatcaaaaataacagagatctttcctgaaagggtccaggatgtcctttaaaagagttgcctttgttccctctggggaagtgggggaggggacagagcatagactctgttcacatcttcatggtctgtggacatgctctacgtcggagctagacaccatgttctcaaatctagggaaaattttaatttctttagaaacacatgcaggcattctacagacttcttactgaaactaaaagcaccaccaggagggaggttcctagcaaagactggtgaggcggaacggctatggggtctgccggtacaggcatggtgcctgtggacggaccatggggacctcacctccacatctgctttcagaaatgcaggcatgtgagtgagtcagagccagagccagaaatgcaagcaagatgtggtgagaggacaccttcctgtattctctgcccactaggctctgctccttgtcacctttgatgacagagctgagggttctccagttcttcaaaacacggtttctgattcagtggagtatcatgtgccacttgtcgccttaaacagatagctgcgtgtgcaactgcatttgcccagggagtccttacaggacagcgggcctgtgggaaacataaaatcttcaacagtctgttagaaaacacagaaacttgagcggggtgtgtgtgtgtgtgtgtgtgtgtgtgtgtgtgtgtaatttgaagacaagtgaccatcccagagtgctacagaacatggccgagaagagtagagcaccaaataccaagcctgtgggaggatagctagccgccgcagcttggaaagctctagactgatccttgtctgctataaaggcaggtttagtgcagtgtcctaggccccttgtcactaatgcatgtcaagagaacaaggcatactgaagtaaacagttaacatcctcatactatgattttaaactactgattacagtcacaaatggctgctcagcttcttcaaacctgacatgtgtttggtgacactgttctgtctactgtcttggttgttgttggcagcacatactgtatctaccacacaagctttatccaatctgaaattaatcctccttcactccaaaagtagcctccttgcggtttctggctccgcctggttctagaaggactgagtatctgttttacactattctggtccccaagcaatataaaacaaatggcctgcatttcagaaccaatttgggcagtgttggctggagtggagcaggcagttgcccctttggtgacttcagatctttccagaagttctcagagcacaaaaccacagctaggacccttgcagagctgcaggtttcccaaactcaaaaactgagagttgggcaagagaagctaaagcctagaaggtagcattcagaggggaaacgtggtgttttgtataagggtgggaaaatatcagggttgaagcatataacccttggagaactggccaggctgtggttagcagagaatgaatgaacagttccttggggtcccatgtaccccctgttctgcatgaatcactgacatggctgctgacagtaggcgtgctcttgactgtgtcagtgggtatatggcagttgttcctgtgtttgacaaggcccgactgcctctgctgtgctgtggtaagattccatcaatacgaagctacggagagacatagtgactcctcactgttctgtggtccagagagcaggagtgcccatcactgggaggagggtcatattgtgagtggggattgcttccttgagtgctcccctgtgtccatactgctaaatgtcccctgccatgtggctgttatacagaagagtgcaggctggtgactgtccattagaaagtgtatcctgtgtgtatcctctgcttggtagatgggacaccccagggtccatccctgccatggggttgtgtgactcaggaccaggggtttatgggaaagaagagatgagctgaccttggcggagggagttgctggatttgtaggagcagtgaccttcacagcccagaaaccatcatgtgcttcctgtctctaaaaacactagggacactttaatgacacggtgacctttgccactccactgatggctaagattaccctggctagtctgagtggctcattgagtgacctccagagtctcattcagtgtgagaaggtcaacttccgtatggaatggagcagtgcagactccttgctgactcttgaggagccatgcccctcccccctccacagtgtgaggctgctgacccatcttcctaatggtgccatctacagaacagcagctttgaggtgggaccctcagcatactgtgacggtgcaaagcagataggaaagcagaaagcccatgagatgacaccagctacgtgagcctgcctagatcccaagccagaggatcccagccgtgggaagggttgtggtgtggccttgtggctttgctctgggactgtggggagggtcgtggtgtggcctgtggcactgctctgggactcacttcatgaactgctgctgcaatgtcactctctcacaaatatgctgttttgaatggcagagcaccagaactactttggaatagatgaaaatcttggccctgtggcggtcagcatccggagggagaaggtggaagatcccagggagaaggaagggtcgcagttcaactacagggtggccttcaggacaagcgaggtaagaaactgctgttggtcactgccacgctactcagttttagaaaacctagctttgatgtcagtcatccactaaggacactgagaggcggttatgtggtcccatcccaagtaaacacttggaagcctgtcctggctctcaggtgaccacagtctcgccacattgcatgataggacagcatggtgaaggtggacagttatgagcctgagacatgagaggaaatgccatctacacagttcccatcagaagtgggaaatgagtttaaaaccaaatgcaaaagatgaggcagcctgcagtgtggctggcctgtgacaggcaggcataaccaaggtgaccacacctcagagagcagcttgttgtgccccacagactttgtactgattgaaacctgaggtccttacgttgtgcagctaaacagcagacaccaaccaccctaaggaatcagggtcccctgcacagcgggtcttggtcttttggcccacataatcagagtagccgatcttctagaatgtgccagctggccactttaggctttcctccttccctttgcttctgtaagtgtggtgacactgcctctcagctggtatttgcagatgtcctgttgagctagactgactaggtgctgacgatgctgactgagactgactatgctgctatgagctaagcccttcccttgagtgacagctttgaagatagacctgtgcagactaaaggttagggtagtaattgaatttaaataattaatgaagcaagctgtcatggtggctgtcacgctagtcaccgtccctccatctattgacagcatggctagtgtgtgtgtcatgtgtctctgggatgacactcggttcccaaggtcaagcagtaagacctcctggaccacagggcagtgctatcatgacagcctggaatggtggcctaggtgtcttccttacctctatttctgtgaagacaccatgaccaaggtaatataaaagaaagcatttatttgaggttcatggttaccgagggttagagtccgcaatcatcatggtaggaaccatggcagcaggcaggcatggcactggaacagtagctaagagctcacgtccttcatctataagcaggaggcagagagagggctaacagaaacaaaggcttgggcttttgaaacctcaaagcctcctccaggctaacaaggcctcacctcctaatccttcccaaacagttccaccacccagggaccaagcattcaaatatatgagcctatattctcatccagaacaccgcaccaggcttccaaggtatagagcaaaacacaagactgcgttcagtggtcctcctctcagccacccacacgcagcccagggatgttcaacgtgggttcagtcttcaaacagaagacatggaaaggagtggaagggataagcagaagcgcacggatggaaggagaagggtgtgctggggcttcagcctgagccctccctcagcagcctccccaaggggcatcagagcttcagttgtctggtgaggctctggctcctttcttaggctcttctgtttgtctcagcccctgtgatgacttcccgtccctctgtagggatgttgttgataaaaggcacggtcatttatgttttcagatggagtgccttgcttccgtttgataaacttttagatccccttgtgaataaccagcaacgggcactaaccagagtctcatttgccacagctcacaactctgaggggagcaatcctagaagacgctgtcccctccacagctcggcacggcaccgcccggggcctacccctcaaggaagtcctggagtatgttatcccagaactgagtatccagtgtctgcggcaagcagccaactcccccaaggtcccagagcagctgctcaagctggatgaacaaggggtatgtacagtgtgtgagcagaaagctcggactgcacacttgaaaatggaactttccgctgggtaaccccgcccccagacagtgcttactgtgtctttggctggtcttgaactcagaatcctcctgcctcagtctcccaggtagtcagaattataaaagtgagctgtcacaccagatttctcatgttctttcctttgaaaccatttctaataaatgccttcaagtgaagtgtgtggccccaaagaccatactagccagttccacggaggctccatctttcccagcccatgtggctttgctttgtgggaagagaccacatgacagctatagcctgccatattctcacggtgaggcaggtgattcatggggcctgcctggcgttgtgaacccgcgggtgacaccgtctgagaactggatgtccaggagccattgtggaggcaggatccaggtgtgtccttgctttccctcttggttttgccatgctgatgtggctttgttctgtgatgacttgtagacaagagcgtcagctgaccttttggctctcacagctcctcccatgtctttgaaataaagggctgttgggaaatagctgctgaggctatttacccctgaaagagatgcagtttgccaccacccagctgtctctgcccttctaacactaacacccctgctgctgttttttttcctaaaagcaaatctgcctgagagggcacctgcacaacaaaaaggggttcagctatctaagtagtaattaacctcgctgtggctcctctggctccgggtctgtagcctcgctgggctcctgtgactggctcctggccatgataattcccttcaggacacagtgtggagactcagcttcttcgtttggttgttgggattttggtaagatgtttcaagcaaggagccagaatgctctggagagccgaaaagaacttataatgtgaggccttgagggctttgacggcaatgtttacagaaattaccccccccccacccccagcttctagaataccagtgtgtgtgtgtgtgtgtgtgtgtgtgtgtgtgtgtgtgtgtgtgtgcatgcatgatacctgaagaggggatcagttccctaacactggagttaccggtgattctgagccgtcatctgggtgctgggagctgaggttgggtcctctgcacgggcagcaagtgctctttacactcatttctcctttcccttttcaaaggccgtcctagtttacacaccagggaattcataggccgctcttctgtgatagcctccatcacacacctcagtatagcatctgtaagagagtctgtcctgaagctgctcctctcctcttggccacatggtgcagacacacctggtagacatcccatttgctctgcccaggcctcaggtgcacaccaccggctgagctgcggctgagctgtgggtggagccggagctgaagttcatagcctttctttcttgctaccttcatttgtgtttaaatcttgttgatcatgacaaactgtcttagtcactgttgttctattgctgtgaagaaacacggtgaccaagacaactcttatagaagaaagcatttaattgtggccttgcttacagatactccatgattatggcaggaagcatggtggcatgctgggactcacagtgctggagaaggagctaagtgttgtacatcttgattcatgagtgtgggggagggggacttagtgtgggcttttgaaacttcaaagcctatctctgtgacaatcttcgnnnnnnnnnnnnnnnnnnnntcatacacacacacgcatacacacacacattcatacacacacactcatacatacacactcatacacacacacactcatacacacacatacactcatacatacactcatacacacacacactcatacacacacacatacactcatacacacacatacactcatacacacatacactcatacacaacacactcatacacacacacacaaactcatatacacacacacacacacactcatacacacacacacaaactcatacacacacacactcatacacacacacacaaactcatacacacacacacacacacactcatacacacacatacactcatacacacacacactcatacacacacacactcatacacacacatacactcatacacacacacacatacactcatacacacacacacacacacacacacatacacaccacctctgctgactaagcattcaaatatatgaacctgtggaggccattcttattcaaaccactacctaaagctcctggtgttggggatagagtggccagccttgatcctgacccaggagaaatagttgtggctgagtcccctctgtctgtgtgtgtatcctgctcacagtcctgagccacaggaaactgacaatctagtgtttgagtgtgtccctgctctcaggtcccagtgagtgtgtcttggctctcaggtcccagtgagtgtgtccctgctctcaggtcccagtgagtgtgtccctgctctcaggttccagtgagtgtgccttggctctcaggtcccagtgagtgtgtcctggctctcaggtcccagtgagtgtgtcctggctctcaggtcccagtgagtgtgtcttggctctcaggtcccagtgagtgtgtcttggctctcaggtcccagtgagtgtgtcctggctctcaggtcccagtgagtgtgtccctgctctcaggtcccagtgagtgtgtccctgctctcaggtcccagtgagtgtgtcctggctctggggtcccaactatgctgcttccctcacacccctgcctgcagtttctcttgagtgggttgggttggcttggtgtttgggtaagtgttgcgatcagcctgaggtcagcaggtgagggctgggagagcggtctgggaagaagggagtcagaatgtctgcttgtctgcgacagtgagcagcggagcctgctgcaggcttctagtagacaagaagacattttgaccatgttttagtttctccctgatgttccatcttggtggcagctcactggagagcaagcgatggaggtgtggcgctgacagccagggtgcagccctgtccctggccatgttgtatatttccctgtatttgcaagatctaagttctgactgttgtagtttcccaaaggtcttggtagccatgacgcaggcctagcatttggaaactccactcacattcttggtttggatctagacagtttgggttttagatgcctggatggcagaaagtgagggtctgcacagaactgagtggggagcctcccaagatctcagtctcaaggattcaataaatctgccgggtatggggagtcagggggtacttgcaggcccattgaggctctgctcagccagcctgaaccacacctcaggacacgaggccgtggcacatgacacttgctccagggtttacactgtacactctgtggtaatgaagtcagtgtgtaaggactgcccactgtgcaaggtgcatgcttgtagcgtcttgatgtcaacctgaactctcagttaagtcaactccctcagtgtccccaaagctctgaaggtcctaagctatctcccaagcaacttaggcccaactgctcttcataaagaaacaatagaacatttttaaattaggtgattttttttttcttttgagggggattttcccttttgagcacagcaaggataagctcatgaccccaggtgctcatagctggtgctcagtctctcagcccacagcccaggccagagtcattgttgctgtctttgtgatgaggaaggagcttgtggccccacaccctccactcacccttgtatctgtcagcagagaaagatgattctgtcatgctgtgagcacccatcaaagagatagggagacttccgccggcgctctcttgccatggataatgaggtggatgagactctccattctgtgttcttgctccaagaactgcctgtccctctgtcttgctctgctgctggggtcagctgtggggttcttttagaggctgagcttcccatctcaggactcaagcccagcttgtttcggctcctcacctgcagggagttggtgacgtttaaggcctgtcggtctctcaggctcggctgctgctaggatgctcaaggcctctgctggcaagaccgagaagtaggactgtggggaaaatgagcaattgctgaagctcattttctgaagctagtctccctctggttctggaggaaagctgtggctcccacctcagcacaacctggactctgaggtagagtggcagcagggactgttcagttgctgctgcagctcctcctgaggtgtcgtgtctacagccaatgttttctttttaaaatagtcaaaaatgtaagaaatgactgtaattgtacaaccaaacttactttggtggaaacaaaacattttctatgcacacacacgaattgcagtcctcgctggaattcttttcttactcgaccttaatttgacttgatttccctcctttgagccaacatttttccatgaatgttcaaataaattacagaacaaaaagacaggagaggcagagagaaaaatgcgtctaagtccttggcctttccctgttccgcatttggaagctaatcctaattaggccactgagtgtgtagatgaggtgtgtgtgcagttgtgtgtctagcttcatgtctgacagggctgcccactcttcttctcaattcccacgtggctcaggccacagacgctgcccctcagggcttttcaatcctcgagtggcttttgggcctttttccagcgtgctttcctgggaaccggatcccaggcttccgcagctttgacttggctagaagcaagcaggtctggagtctctgccaagttcatcgagtttcctctcatttcagctgagcttccagcacaaaattgggatcctgtactgcagagctgggcagagcacggaggaggagatgtacaacaacgagactgcagggccggccttcgaggagttcctggacctcctcggccagagagtgcggctgaagggtttcagcaagtaccgtgcgcagctggacaataagagtgagcatgtgtgcaagtgcacactcgtgtgtgtctatgcacatggatatgcgagtaacctgtgtgttcttctatgtagcttctgtttatgtgtgagttcctgtggttttgtgtgagtgtatgtttatacgcatgtgtgtgtgaatagcctgtgtgcctatgcatatgcatgtttgtgtatttatacacatctaaaaacaacagatgactgactttgtagtcaacagttcagataccaccatttcttatttaaaatatttatgtgtggtatatgtgtgtacatgttgtgtacattatggtgggtgcatgcatgttcatatggagatcagaggtcatatcagtatcctggattgttctccacttgtgcctttttcatttttacttcacatgtatgattctgagcgcgcgcgcgcgcacacacacacacacacacacacacacacacacacacaccatgctggacatgtggaggtcataggacaactctgagcggtcctgttccacattgctgaggaacgttgctgttgttgtcttgttcccattgctgcatgaaatatcccaggctgtctgacccttgtgtatgggacagctctgtttccacatcctgtcctgccacagaaatgttatgggtgcaccaggctgatctcctgctggtttgtgagggtccctgggatcaagcttggattgtttggtttgtgcggcagtgtctatcacacggtgggccatttcagtggtccgccacttgactttttaaagagggtccttctctgaacctagagctgactgatgaggctacactggcctccagcggcctccgtcaatcagtctccacaccaccacatgcagccattcactgcctcaccgagcttttgcatgggtgctgcccttctacctcgggtccccacactcacttggcaggcacttgactgactgaaccatctccccagcctcacattagcatcgtaacatgtgtggtcttgcagggtggacagacagaaagagagcaatctcccctcctaagtccccgagtctgttagagcatgctcagtagaaagttgacaggaaaggggatttggggggcagctccaggtgagagctgataacagctgagcagagggtgcccgaggcattacgtctaggtttacacatagtgtggcttgtgcttttcaacccaacaccatctgcaagtagaagaggcctgattctgtgcttgcctaacttgctttataattactttgttttcagcggattccacagggactcactccctctataccacatataaagacttcgaactcatgttccatgtgtcgacgctgcttccatacatgccaaacaacaggcagcaggtaaggcctcccgtgtgctctgctccctcatgtccaccagcatatccctccggcttccatgtctaccatgcaggtggccctgggtgagagtgagactcgatttagaagtcggaggctgttcctagtatgctgacagtctttggctgttactgtgggatatctgagcctttatggggaagttactgtatttttcattgatcaggaaactgagaatctagctacacagattcttttagagaaccccatgtcaaccatgctaatgatgagaacaactgtgttaaccagacaggtttctacatgtgggtaaataacttatttatagaaaatagtcactgcagtgtgggctggagctgttgctgctgctgttcctcactggaggttagctcattgtttcaatgacagtgtgtgtgtgtgtgtgtgtgtgtatgtgtgtgtatagagggttctatacactgcactggtcaacactccctcaaagttaggaagtgttgaaagcttaccgatgcctaaaacataataaagtaattaccaggctgttttctatttataagatgagttgagctttcttactgagcatggaaaaaggagagcaagtacctggctgctccaggaacttgggagtttgggggtttaaggtggtcccgtggggcagcagctccatgctcagcacctctagactctagactctgtccaggatgagctgagactgaaggaaaagtgagtgtctggaggctccaagggaaggctgttcatgagctgtctgggtgtggcttggggcatttgctttggagttaaagtctgacacatttgtttctgagcttgggtacattctggatgccacacctcccttcctgtgcagatgaaaacacagagagctctgtaccattctctgcgttggtctggctcttcctctacaggtctgagctcttaatctccctcctctgcttttttcccttttctgcctggaagttccccccaccctccttttgcccatcagatctgtattacaaccaatcaatagtgagacaatctctgattataaatagcctctgggcatcaagggctgtctgaccttcaggtatcttcgcaggtgtgggaggacacgcatttacaaatgtaaggctggtgaaatgacaccaccacagtcctgcaatcctgtcctctctgctggtacagaactaaggactgacaatacagagacaaagctttactccataaaaaaaaaggttaccccaacatctcctcttagctctgtcatgagggcactctaagaaatcccgtcctttgggaactctgaatgagtggtgttcataacaggtactgttctatgttctatgggtgtgcccaatgacagcactcagctgagttctactttagaagtggctatgtttctgatcttcccatgtctggtcacaatgctatgaaaataagcatttcaggtatcaggaaagagggagaattgtttggccaattgttttgccaagtatagttttcactgtatttttttttacatgaatttgaaatggtatattttacttagaggtgtatgtaactcttaaaactacagatttgaacaggaaggttcagtggatctgatactgtgtattaaaacatgtttcagaactcttctctcacagtacagtgatttctctgtgcttagaaatttaaccaaaggatataagcaagacacttccaggctgtgactgtggatgtcccctgcccatcgagagctcttctgggggagcatttcctgttcacttccatggctcgctactgtgttaaattaaaagccagggtactcaccatggatcctttatatttttccaaaagttgaacttcatgctctggacagcgagacatgctctgtaggcaactaataaactgaagagcaaaggtcacggcttttgttgccagtaaagggcagcttactcctggagacaggtgcagccctggagtgacagcagcagcagctcttttgtggatgtctggctgcatctggagtgcatgtgcccacttccacggtacttgccagcacgtccagggggcctcctacacgtgtgcaggtcttgtgtggtcacaggcgagtgagcgtggtctgaatgcacagtgtaaggaacacaagttgtgtgcctcatttgtttggggacttgcttggtgctgggcatggctttggcaggcaggaagccagtcagtttacctcctgtcctcgggaaggtgcatatataggaatgtgaaccaacctatagggaacagggaggcactgaggtgtgggggtggagccgagatgcagctttgacagacttctcactgagaagacatctgagaagatcagtgtggatgaggaaagatgtactgtttcacacagctcctaaattttacagccatggtcacctgactgtttccggttactgtggtggggcagaagggcctatcagaggaaagttgtgtgcctccttggcatctgggtgacagggctgaacacaaggtgtctccaagcacttcccagaggtctgctaccccagccagacccagctcctcgtcgccatagcgctttccacaagaagccggtcagagatctccccactggagatgagagccctgaggcctttgacctgccagagtcacactgtgaacgctgcagcgagggcccaggctttcccgcctgagcttttgggggacattgctcaaacttcaagcagagagggttgtccaggtgaggtgtgccaaggcctcactccacacaaacaggagctgtccaggaagagctctcgcagtgaggagaagtctctgtcagaagtgctgtcagagcaaaggtgtatttagaacactgcagctcttggcatctcccctggactttgagttttgcaagattacaaaagattaggttttctggctactagtgtaatggaattctggattcattaattaatgtggattgcatcaaaaagccaagtttcagttaattagattgaagacctatgctgcccccagagtcagcctcctgtttttgtttttgttttttttttttttgtttttttttttggttgttgttgttgttgttgttgttgttgttgttagttgtttttcagaaatgcaaaccagccggggagcctgtggtctgagccagggctctctgtgcagtaggccactcctcctcctggaactgtctcctctctaagttaaagtgcttaaactataacatatcttacaaagcattttgaccactagagtgctattttagaatgaaagaaatagctggatagaaggagagaaaatagaagcagattcctatgtaaaagggataggcgggaatgtagcccagggtagcccacttccctcctaggaccatgctctccctgatggcattggatgttgagttgcttttcctgggggtcttctgcttgtggcccacccacttgtcaatatgcccaaggccactggaacccaggaagggctctgcttgtctctgttcctttctcggctgagaggagcaggttgtatgtattagggtactttttgtgtcactctgggaggagcaggttgtatgtattagggtactttgtgtcactctgggtgttcctttcctgcacagcttctgaggaagagacacatcgggaacgacatcgtcaccattgtcttccaagagcccggcgccctccccttcacccccaagaacattcgttcacacttccagcacgtcttcgtcatagtgaaggtgcacaacccctgcactgaaaacgtgtgctacaggtgagcctgcggccccacttctcacttctcctggcttcctaactacctaacctctctccctccttcagaccgtcctccctcccgcactgtatagtctaggctgaatagccaggaactcaacctctcacgtgctggcactataacctgcctgatataattgttatttatttttggtagtgctgggaattaaacccagggctttgtgtatgctagccacatgttctaccatagagctacatttcctagccagcctcaacatgctaattatatttttgcaagcagtaattgccttcctcccttgagaaaagaagtgcatggcaggcagctcagagcagtggggttcaatgttctgctttcctgagaggctaaacagggcccatggctgccaccagcctctcagcaggacagtgtggcccatccaccaccaccaaggaagtgagccacaagcaaaagcctagagactcccaggcagggccttgggggctcagagcccacacttgctttgatgactaaaggcctgagtgtgcttcagagcccaagaccgtctttgttaggcctgctctgagacctcgcttctgtctggggctgggtctcaggaggacactaggatgagtgactgttctgtgtacactgagaggggtgctccctgccttactgcttgtattgggtgtatgggagtttatttttttttcttaactcttccatcttcagcgtgtgtttgtgtgtgtgtgtgtgcatgctttgcatgtatgggtacacacctgctgggcggaggtgcacattgcatgtgtgcatgcatgcatgcatttggagggccaaggttaatgtcaggagtcctcctccttggctcttctcccttagacagtgaagcccagagctcactgatatggtttctggggatctgaactctggtcttcaggtttgtgcagccagtgtgggaacgtgtcatctcaaaggagagagccatagctcatcccatgtcattttcttcctcagtgttggagtctccaggtcaaaggatgtccctcccttcggtcccccaatccccaaaggtgtaacttttccaaagtcagctgtcttccgggacttccttttagccaaagtgatcaatgcagaaaatgcggcccataagtcagagaaattccgggccatggctacccgaacaaggcaagaatacttgaaggatttagccgagaactttgtcacaaccgccacagtggacacttctgcaaaattcagcttcatcacgctgggggcaaagaagaaagagcgggtaaagccaaggaaggacgcgcacctgttcagcatcggggccatcatgtggcacgtggtggcacgggactttggccagtccgcggacattgagtgtctcctggggatctccaatgagttcatcatgctgatcgagaaggattccaagaatgtggtgtttaactgttcctgtagggacgtgattggctggacttcagggctagtgagcatcaaagccttctatgaaaggggagagtgcctcctgctctcctccgtggataaccgttctgaagacatccgagaaatagtgcaacgactgctagtaagtatggcgtgtgtctcccactgtctgtgcttcagcctcagaggcccagcaggttgtacagggaactccactatagtcccagggcttgggaaagcagctgctattccagagaggacgggttctctttgggttgtttgtttgtttgtttgtttgtttgtttgtttgttgagatagtatctcagggcccaggacagttttgaactcatcaggtagccaagggtgaccttgaacttgtaatccacctgtctccttcacctcataagtgctgggattacagctgtagtctaccatgtcccatttgtatggcgctggagatcacacccagggtgtgagagttgcatggtagttgagtgatccaccaactcaccgtccacagcctactgttttgtttgtaaataagagtcagtgaacataattagcgaagctcccacaaccccatgactaggaaagctgagccaacttcaaagaatgttatgaaccatttctgtaatagttgaagagaaaccagaagaaaatttaaaatatttcatgtttgtgtgatagacactacacacacataaaaatacagatttgctatttgctaatgactgggccctctttactcccttttgcatgtttgtatagcaaatattttaatttaaagatgttaaatgtgaggccaggcaatggtggcacacacctttaatcccagcacttgggaggcagaggcagccggatttctgaattcgaggccagcctggtctacaaagtgagttctaggacagccaggactacacagagaagccctgtctcgaaaaaccaaaaaaaaagttaaatgtaatgttaatatctcctattttacaaaattagacagtaagttaggaaatgaaaagagtcatctgtcaaagagagagacttctgaaaagagggggagcgttaaggtctggggctggacaaggccagtgagtcagttagcaatgagcttgctgtacaagcatgaagacctcaatttcctcctgagcacgcatggaacaggcgtggtgctgtacacctgtaatcccaacactgggcaggcagaggtgagagaatccttgctagccagcatcatcacctggtctgagaacctcaaatcgcaataaagaaacctcatctcaaaaccaaggtggacatctgaggagtgacgcccaggttgacctctgacctccgtacacacacgcatgtacacacacgcatgaacacacacacacagattaaaagatggggtcttcccatgtaacccaggctgtctggagcttatagaatatcccaggccagcttcaaacttgagaccctctggcctcagcctctcgggtgctgggattacaagtatgcgcctccatgccttaatgtgactttaacaccaaacctcagcattgtgcccaaggtaggaaacaagtcacagttttgttcccagtgattttctttgtgtgtgctttagaacaatagcaataatttgctgtttggattgcttggtgcagtacaagaagaaagcacgtttcagacatagaacatctcactggtcaatcctctcccaaggagatgcattgcgtagtcaactgagaatcactaaaaagggatacagattacacttcctgtccttccgtcccggagagtgagtctcttttattattacaaggctgtcttgagagagtagaatcagccagtatctgttggtgttggagtggttacagtcattgcaggcaatgtctatctaagaccagcgagttagaggtggtagggaccccacatttttgtagatggtgatcttactgtctgttgcgtgtggtacagagtacagccagaagtgtacgctgtacatattggaggagacttcactcccagagggaccttgggtgtgccatctgagagtcctgggaagccatcctcagagggccatgcttgggtggaggtttccctgtcacacttgaacctaatagactttgaataaagaccctctatttgcactggccagtgggccccacaaatcatggagatggtggcaggcatgtggatgggagatgctgttttcacagggttattatgtctgcgtaagtacatggggcacttgagagacgagagagcctgctctaccgtcagggatgtctggatgacttgggtaacactagggaggaagtcaggagcagcactagctgatgctgcctagccagtctctccaattaaacttcaggaagcagcttcgttctctctcatctgccaggacgtaggcatcttagatgccactgtgttaaggctgcttagagcaaagttggaaaagaggtgaggacatgtctgtggaggttggcaccgagggattgctcggttaactgtttggaatgagttcagatcagtgaaaagttgaaccttttggaacttccctcctgactgacaccagcgctccctttctgctgagtccccagcttcatgctggtctgggagaagccaactggcttttgtaaccatggaaacctaggccagatgctgatgcagggagcaagccacagctccccagctgcgctcacagccacggggctcaataataggaatgtgtgtgttcagagccaggttcctggacgcgagagtttattaaactgaaactctgtacactgcccccagggctttggggatgggggatgatacctcccaacttgaaatttcccacaaaaaaagtgatgtcatcatcttcaaatgatgtttaatgagccatgttttcctttcatggcattgtaagccacattccatcagtgcctctgagggttacagtgaccaattaccttacttgtggcaccaagccactgagctggctctctcaagttcttggtatactgtgtagactcctagtcttcgaggggagtgtcattggagcttcctgggatatcccttagcctccagggcacaggtgacagaaggaagggtggctataggaacagagggctcctctgctacctgcaaagcccctcattgatcagaagggcccttgggaccagatggacataggtggtcactcccaggaggccaggtaggacagattaggaagtcttcaggccagtgcatctgagacagttgtggcttttctcacagtccattctctcctgggcccttcctgaacacaggccacgtgttgctgttctgagttagatacaagtacccaacctggcaatggtagcgcatgcctttaatcccagcacttgggaggcagaggcaggcggatttctgagtttgaggccagcctggtctacagagtgagttccaggacagccagggctacacagagaaaccctgtcttgaaccacccaccccaccccacccccaaaaaaaaaaacatacccagaaagccttggagtctgagaaatgaggttgtctccttctttctcttgctgtactgcatccagaggagaggaattcaagttctttggagccctgttagtgacaggaagtggagggactagcagaaaacgtgcagagctcacggcttctccagccaggcagcctgccacatgagccagggtaaaacccagctttggttctgttgttctttgtcaagggcaaccatggtgaactttggattcagataccttccaggtcacttgaagggacagaggggtggctgaggatagagccaaaggggagaggggcttgcttagatatgtgcaggtggtccccagtgggatcccatctgtggtatccagggagaaagatcaaacctgcctaacagcttccctcccctcagatagtaacaagaggctgcgagactgtggaaatgaccctgagacgaaacgggctgggtcagcttggcttccatgtgaactttgaaggaattgttgccgatgtggaacctttcggctttgcctggaaggcaggccttcgccaagggagccggcttgtggagatctgcaaggtggctgtggccacgctgacccacgagcagatgattgacttactgcggacatctgtgactgtgaaagtagttatcatccagccccacgaggatggctctccccgcaggtaagaccaggaggctgggcagtgtgcactgtcaccagggacattcctgcctgcctgcaggatcctcagagagctggtgagctgtcagtggacacctgagccattggcgcactagttaaagggtttcagatgagcatgtggcatgcaccattggtgcgctaaagagtgacaccagatattgactgtgagactgagtcaccaagaccagggggtgggtccatttggctcacctgacctattgagactgagtgtgcacaaccttcacagcctgcacagctcaaatcaggatgagtagctaacaaggcagggcctgtctggagcaatgtgagactgtaggcagattctgggggccatgctgttctcacactgaagcctcagaggtgtccaacagggacagggcatctgcacataggtggtaggaagggacaggcataggtgtgggagtggtctgtctgtctgctgcagacagatggtcgtggcactcagccttaaggtgacaccactaggtctgtccaacctctgcatcctcagcaagaactgctgagagtcataggtgagtttcaaaccttgacgttttactttcgtgtggttcttttagtacaggtgtgtgggctctggtggccatgcagcttgtgtctgtctccatccggttagtcatgaggcaggccccagagtttacctgctgggaggatgcaggaggctgaggtcagggccctgctgtgtggtcatggggaaggaaggagtcctaaagttcctttcacatctgcaccacagggaccctgatccctcagagtactcagaacttaccagcatgattagtgtttgctctacatttcagttgagggggaaagacgattgctttaaattcgctcaagtttctgtcactttttaattaatttattcttctctcatatattacatcgcagctgcagttttccctcccaggcccctccccgctgctcttccccaacaaattcctgtcatatcaaaggggacatttttatgaggacagtgcattggctgtatctaccttctggactcaggacacaaaggtctcctttctcctccctcataggggcacacgcctggtcgcatctgtgccatgcccaagctgcatgcagctgccacacacttgaagcatggctgaatttttcactttaattaaatcagcttaattaaccacaggtggctctaatggccgcccctttggggagctcatccctaaatggggatcttttagaaaacaaaccactccgctctgtgtcatcttggtctcggtggttaagatgccagagtttgtaaagtctgttagattgaacttacttagcactggctcccagcctggtgggtttgtttttgtgatgctgtggatagaaccagaggccttgtgcacactaggcgtggactccacccttgagctccagccctagccccctggtctttcagtggccatgtttcctacatttgccaataggtttataaaataaaggtttaaaaagagctgaaatccttcttggtgttaaaggtccgactcctgtaaagccctcacaaggagtttctcataacctcacatttccagactctgcccattagaccctaccgccttgtcccaggaccccatgagccaaacttaagataaagaagccacaatggaagataaaaaactatttcataaaacaaaagtcaaattgagtaagagctaagcttcctctcggccttcctagaatagaagctgacgtggcctgtaagtgaacgtctttgacagcaacttttaagggcatctgtggtgggaatacagatgtgtgcctcctctgtcagcaagggtcaggtcttcagtttctcctggagacaagacaactgcagagatgagtgaaaacgtttccagacctgatataggtttggtctgctgttgctctgtaagaaactctagaagcttttaagaacgttagataataaaaatagtaacattctcattatgcctggtattttgagcacatgatttcaaagaatagaatttcctaaggaatattgaattgtttttcagctaaaacaaataaacaaaactacagagtggatgtttttgctgctgtcttttcctcaagagcatgtttttcctccaaagaggctttcttatctgcctggatctgcctataattaattctttgttttaagtgcaattgaaaatagccaggatatttattcagagacttcgcctttgttgatgcccttcccagagcacacagtcttctccttacattgctcagctgccctctctctgttctcacctctggggaaggaaccaacccagcacacatcaagcaggactctccattgagcttttttaaagttagtgttttcattcttcctgattcactttcacttctgatggggatgggccctgagaatggtatgtgctgtagtcagaagtcctctgcctgcagccctgtcacaccagctcttagctatgcaggaagtgctgctctgggtgtcccagccatgccccagcacagtcaggccctgtagtactctgttatgttagaaagagggagttcatgtatgtgtctcacacatgctcctgtgtgcatgttgctagaggcctcaggaatgctaggcaagtaccaagctgctttcccagcttacgtatgcatgcacatgcacaccaataaataataaaccttttaaataaaactgaaaactctctttaagggcagcttacattggtttcatggtcctatagttaaggatacaggatttgcctgaggctctgacatcacatttgatttgtggtgtggaaaattacctccatcttctttcataaattggctcttagagcctgtcaggaaggaaaggagttaaatgagcagttatgtgcatgtgcacacatctgtgtgattttttactatgtagtgggcctctgtgcaagttctatgagggtgacagacacggcaaaactagctaattataaggaatcttacctcagtgctgtgcctctctgaatgagaaagtgcctcattcattcatagatagatagataggttgattgatagatagatagattagctcagtaatactcttacaggatatcagtgagaaataatttgagaacccatctgcttcctcctgcagcctgaggggccttcaggttaatgggcacttctggctgtcctcaggtcagtgatgcctgcctggttccacccttcactacagagttgactgaagtcttgtgtggagctggtgtgtttgtgtgaatcaaaagccacgcctgctctgaagtcatttctgagcctcaaggacagtccagctgcctgcctccaccctgctcccagttgaaagaaaccagggccacttttggtttcttgatggagttggtgggggaagctcattaaggaatctcctgctgggccaggacccttgagtaaattctagcccatctcgggagcgacccggagcaccggggatgactcttcaaatggaaatgagctgaggaatgggctcattctggctactgggccggaagtgctgccactccctgggctgcctgattaaggtctttctgactgagattactaagtaggtgcagggcttgccaggaagtatgcagacctgagtttagatccctaggcccacaggagagcagccctgggaggttggaagcccagcgttcctctggcaagacgggaggcagagctaggaagccccagaagttcagggcctgccagtctgctgtgcatcagcgacccccgtttcaaggtggaccgtgagaatagacacccagggttgtcctgtgactttcatatgggcaccgtggcccacatgcatccacccacccacatttacacacacaaagttgttgggttttggttttgttctatttaaagatctttttctgtttttcaaagatcaggccccacccctaaccctcgcattcagtcagtgacattttaggggaaaggcatccttcaaaggccgctgtctgagaagtaatgactctccagagccatgcatgacttgccacacattgcgaatttagtaaatatgtccaataaaaatggaaatgaaactccaggctgtacatctggctcctgtgattctttgtgctttgttgacaagggtccacatttccatgtgacacagggcagcagagatttccatgggttatctggagccaaactgatttataacagtgttctataaaattaaagcttcgtgcaccatgcctttgtctgttgcctgactccctgaagtacaggaagagggaagaatgggaaatgagaaacaggaagaaaattctgttttaacagcttgtgtgtgtgtgtgtgcacacacacatgagagagagagagagagagagagagagagagagagagaggactcaaatgagattttagattacagttctaatttgttttatttgtatagatagtaaaatggctattgtatctattcctgtcttaccaaccctctaatgagtcctggtgtgaaatgttgaaactgttcaggacttgaagctctagcggccacccagccacctgacacatgctcagtcctgccatgcctgccatgcctgccatgcctgccagtgcagtgattacctgcgctctaagcgtggtaagcccataatcccagagccattgccgggttgcgtgttttcatcactctctcattctctttctctggcatccatttgtttattccttaattctctgttcacttgtccatccatgcagttgtctgttggttggttcaattcattccactagaattcccaacaactcaatggcagaaattgccaatcacttgcattgttgacaagtcagcctcgtctccactctgttgggtccctttagtctgcccggtgttattacacagtttttcttgtgagtgatttgttaactgaagcagtacccctttccctgataacaaagattgtgcagcagtttgtaagaccatcaccctcctgttggccagttccatcttacagtttacatagatgctgttactgctcgataacaggagtgcaggggcaacatggcagccatcccatgccagccaggttggttacctgtggcctagatggtggacaactaggtgtggccttcttagataacctttcgttatctgtagataccaggaaccgttgtatcacatacaagtgttacaatgcagaaaacatttttttctgctcttgagttttctgagaaaactctgagaaatggtgacttccttggtccctcacaaccgcacatgacacacagaatatgtgatatgtgctgcatgaggtgaggcactgggttcccaggagcacctgtgaacaattaactaagtggtgacaatacccatgtggtcaggtgtcaccatcaaatatctgatcataggctacagctactacagctcaacacagttgttcaattcatatttatttatgtatgcttgtgtgtgtgtgtgagatgtagccatacatgatagcgtgcatgtggagctggctttgaaacctttacttggctttcagggctcaaactcagacctccaggtttgcacagcaggcatctttaaccactgagccgtctctccaaccaggaaaaaagaaaaagaaaaaagtgtgtgtgtgtgtgtaaatcccagaaccctataaacttagaaacactcatggtcaagaactttataaggcctttgtggtttcctctgttttgtagaaaccgaaagcaaggttgcctatctttgaagtgctgtgctgcattctgaggctgtgactcttatgtacctgtaccccagatccatcttctttatgcttcttgcttgctgcccagtgcaggcttccttcagaagacttctgtccacagagttctgctggcatatcaagagtctttatgttttgtatgatccagtctagactgctttctgccgctatgatagtttcagagtctaaagtaattgtcaacatcacatactagcaggtgagaattttaggcccaagtccaaattcactcttcagtgggaagtttgacgggtgttgagtgtctaactaggaatagaagagactctagcacctaactggtccaggatggccatcttgagagaagctgtggataaagggaccctacttcagatccaagagtccagcttggccagagatgactctgtttcaagtgcttgtattatggagggcaaacagactctgctaggaagaagggctgtaagaaggcctgtgcaggtgatacagaggccttcctgaatctctgaagtcatgctgtgcatgggcagttggtgtaggtgtttgtcacccatgattggcagtagacattacctctttgttagatgtgctacaaagctaggaagtgggggtcacagtagagccaagaagtcttctatagggtaacgttaacattgccaactcgacagaatgtggagttacctgggagacaaacctagaagcttctggggattgctttgttcaggtattttgtcaatagtgaggaaaaacacatgggagatgggagcccagtgttagggagcaggagagtcaacaggcactccgtacaggctgaaactatcccaaagtcctcgtgctgagttcagaggtcagaattgcttttcagggtacagcaccaaaatatagggtgctctaaagtttcagtccaagcaactctcagccccctgcagactcctactctatccagtgcatcactggtgaccctggcctgcaacgcattcgctctcaggttatgtggtgaagagattacagccagagaagtcactggagagaggggagatgttaaaatcaactttatttttaacctagaagctagatttctattgatctctacctaggctagaaattgaatcctgaagttgatgatgtctgtgagtgttgtggagcaaagaggaaattggtgtgctgataaactagtgatcacttccacggcctacaccaacgtgttttagcttctcactgacaagaaagctcacgatgtgtctaatgctggcagtgtgctcctgcacggtgactcggtcctctgggtggaaaggaagccactgtgtactggagctgtctgaacaaatgtgtctttgcctgacagaggtttcacttacacataagagtagtagagctcctcccaccccttaacaaatgtcattttctgacaggtctttctgacatgtttgggccatctgcagtagtctaagagtagttatccagggtcccaggatgtccccagagtccactgtgagagccacgtaagctctgctttctgtctctatggcagaacacctgatcagtgcagcttaagggaggaggggttgccttggctctcggtctgaggagttacagcaggagcactctaggactcctcacatctcagaatagaagcagaggcaggcaggaagtggagtctgggccttaacctcaaggcctgtctaccagagatccatttcctcctattaggcctcactgcccaaaacaacaccatcacctggagactgcgtgttcaaacacacaaacttacgtgggtggttcacatccaaaccaagcagggatggtgaagtcaaggctcaggcaggtccgcctctgcacaggggtctctgagggctaccctgcaattcttctgtatatgcattctctgacgattcccttggacctgtggaacagaggtaaggttgagcaggtctggtaacttccattacagtctatgtagtttgacatattagtcacgggagtcaagaaaagtcttgctcattagagttagtgctatgaaagtgtcacttaatagcagttacatgtgtgtgcacatgtatgtgttcacatgcgtgccagtaaacatgtaaatgtggatgcacacgtgtgtagaaaccagaggtcaacatcaggtctctcccgcagtgttctttgccctgttttttgagtcagcgtctgtcagggaacctgctgtgatttgctagagtagctggttagtcagccttggggtcacaggtctccacctcccctgcattgagacctcaaattcgtgccacctccgggatttggggtaggtttaagggattgaacttggctcctatgcttgcacagtgtgagcacctcagtgactgagcttcatttgcagcctgagagaacaggtagctcttgtggcagaagactgtacatctatccctccctccctccctccctccctccctccctccctccctcccttttgcatttgaaaaagcctcttgcataggactttgagatgtttggagagacttagttctgctgttcctcactctgccttatgcacaacactcccctcaaatacgaggtgtgagtgcgcatttatgtaagttctttcttccgagattcaagttaaattgaggtgtgctgttggcagctagagtccacaggtgtgaattaagtagagcaccctagtctcagccatccgccctccctttgcaagcgcaggccttagaagtgtgggcagagccttagagactagagacgcacagcctgggctcccctgcaccgggggaccgctctctggaagtgacagcagacacaggtgtggccctcctactgtaatgtcccatttcgtgacttccagttagatcactggccgtgtggatgaatctgcggtcccagcgggtgttgaatctggatacagagcagaatactcatgaacttaagctctttggtaaatgtttcctcaaattccgtttgcaataaaacatcacaatccaggcaaatctcaacttaaatattgactgtcaaactcagaaaatccagagaaatataggctagcttatgaagcaagtttggctttggtggaagggaatgaagttagaaggtgaggaatggggtgtgtggtggtcagagcctcctctgaagacagcctgtgcctgtctcatggaggcttttctcctgctgctccccaagggcggcactgacgcatcctcagggttgtgagatacaaaccagactgctctgttggccggttctctcttcatggttggagccattgggaattattttaatcagaaaccttccagcatggctgcagagagcagcgctccggccggccctccaccccggtctcctgccatgtccagatcatgcctttgacccgggatctgattgcacagggtgtatgtaggtggctgtttgtctgtctgtgcttcgtgccctgtgggccttcaaatctggttttcatgtcttctggttctgatattttggtagtgtttcttattaattttctaccttaacacacacacccttctttttggtgaaagatgggtgttttgtctctaagttcttcggaagagtacctcagtttgccattctactgactggctagatattttttctagactttaagatctagttataatgtctgtcagtatcagagccttggctgctcagggagctttgctataaggactgagacagacatccattgcctttctggtgggagtggtccttgttcagtctttgggggcaggctgaacttacagaaagaactgtgaggctaagtctcatctttccccacttcctacctactcagtgccactggcctaagtacctgtctttctgcagagcactgaagagccctgctttctaggaccctctgtttgctccctgcctgctggacctcagggcctagcgttgaacttctcatggactctgcattcactgtgtcggtgggtcatgctggcatctctgactgagcctctgtgggctgtcagggcatggtgacgttgttccctccttgtgtcctggtgacgttccctctgtgcgtcctgggggctgctaagctcctgctgctcctctgcaatgtttctgaaagggactggcaagccttactccggcatctgctaacgggtggatgttcttggagcagctcttttaaagggtggctaggagacagtttttcacgttgagtgtctgagggcactgccttcagaggctgactgctgagccagcatggccagttgggtggttgacactgatgcctgggccctggtgaacaatgtcttgtgtccgtgtccagctctgtgaacaatatttgcagcacttgggtctggccatgaccttgccgtttaatagtgagcagggttgcagcatctctgggctttgatatctcgtgacagtaggcagaagttggaggaatacagaagggctttgaaaacaactaagaataacccacagcatccaaagggccgtggtccctcccactgtgcagcacttcccaacccaaccagcctatggtgtgttggcaggcaggagaaagctacaattggatcttttagaatctccgtctgactgttggccagacagcagctgaacggttttgagcatctagggaaggatgccttagagcacatgtaaggtgccatcctgttaggccccaggaagcacaggtgcacgtgcaggagagtctgctccgccatgagcaggccttgcctgagccctccatctgctcagccacgagcaggccttgcctgggtcctccaagaagctatagtctcaccgcctcttcttggctccacaggggctgttcagagctctgccggatccccatggtggaatacaagctggacagcgagggcacaccctgtgagtacaagacaccttttaggaggaacaccacgtggcaccgtgtgcccacccctgccctacagccagtttccagagcctcacctgtgcctggcacacctgaccgactccagtgccagccgctgctgcagcaggcccaggccgccatcccccggagcacatcctttgataggaagctgcctgatggcaccaggtaacaccacagcctcccttagatactaactgagcagcctggctggttctgtgatagcttgttgtgagttttggcaaacagggcaatgggatagcctcagtcacagtggtgctcagagtctagccttgtcctgttgtcagagcagataccctctgcccacccgggacacagcttttagagctaaatacagtaacacgagaaggtggtgagagctcagggcacctaaattgcataggttgtgtttaagaccaaaacagttgattctatgtgtaattcctgtctaaacattcctgtgacctacaccatagagatgtgagcctttactctggacacttgatccctgagggctctgatctggtagacctgtcaatacacaccaggagccagggtcttgcttgcctattgggctgtcccctgggcctctctgatgtatgtccctcgtctggaaaataaggaggatgtagaccccggcaggacctcctaaagaccacccagatcagcatcactgaagggcttagaaccaggcactacacactgtaaacctatacaaatatttactagaattaacaaaatgtgtagctcttcttgtctgttctagtttatgctcccaggaggagcaggaatcttttaacttaacattaatcaagtcatctgggctccaagcctctggacttgaggatcatggggtttaatacgcagcttccctgcgctcaaagcacacacagtaacacctggggcaagagtctgcagcacccctctaatcacatagaacctagagaattatggaggaaaccagaggggccctgcagccagagggatcttggcgagcatcgtctctgtcaagtgacttctcatagagatttggaaagtgatctctagaattacagtaggcagctgtgtgaaagtcggtggtcgtgccacattatagctttgctcctgctcacttgtgcactcgacccagatgtgatctgcactaggctctgtgtaacaggtgtaagtggtgtcttctgactgtacactcccgccgcatgcctggttttctgtcccctggagccaccattgtgccttcaccttcagaaagcaaatgtccccaaatccacactccttcctgtgatgggtttctgtcataaaactgagaaatctcgggcttcgccgattctcacattatctccctgattggttccattgcacattgctttgtgaatggacatagggaattttttgtaatcagcacaagtcagaatggggggaggctggactgagatgtccaaaccctgctgctcttcttcccctttcagaagttctcccagcaaccagtcatcatctagcgacccaggacctggtgggagcggaccctggcggccacaagtgggctacgatgggtaaggctccttcctgcctttgtctccccaggggagcctgtgtctgtacctgggactcattcaaatgcgttcctgtgtgtgagctgcatagaaggccacctgtaacaagcacttttagcaagtgcagagttttctgattaaatcagaggctcacactgtagcctatgctggtttctacctcatgataatccatctgtgtgctggggtggtaggtgtgtgtgccaccatgccctgctgggaaactctgtttctgtgacagtgttcctgggtcttccctgttgggttttttgttttgttctgacatggaatggacttctgagcacaagagagtagatctgaggactttgtggatgggaactctcgggaagttcccctgactcaacctgctaataggagacagctcctgagagccagagaatagtttatcattgaagcttcttcactccctgttggagaagcaacatagcagccacctggctggagaggcctccttgggaggagcctttgtgatttgtgtcataccccaggagtcaggagtgtgggtacaactggagacccttgtgaatacacacacgcatgtacacacacgtacacactgaccttatgtgggactcttgaggtagcatgtagcacagcattcaggttttagatgtgtgttgtggtgacacagtccgtctatggtagtcaacagctgggcccttttgtggacaaaacacagtcatccatggaggcctcagctggcatggacagaaaacgcctgtccatggaagagcatggcaatcatggcactgtcttcaggtgcagagcagaactccaggccaggcattctgctgtccaatttggataccatgcttttcatctcacatggcagacagaattcttcacagctaaatagcaaatcccttttctaagtgaagccatggctaagcaaggagagcagagcctcgatttgttcttatataaatgggaagccttgtgtagtctcagacccacggtggactcagctcatggcattacacggcagcacaagcacattgccttcacttccttcatttctaagattatgttttcctttttccagttcccgtatcacacaggccatcagggcagagtctagactgaatcaggttttcttttctttacatgcactagtgttcagatgtatcagtgccatgcgctttagtcaaaagtaaggccgatcatgtgctccaccagagctggaggacttgcggccttgacgctggtggtgcgtgtttatctgttgaagcttgctgtgtgtcagacctggtgaaacagcatccttttccctggagagatcgaccaggatactgtgtttccacagtcaggggactgtttcctaggacagcatcagccctggaatggtggtagcctctgtaggaaacctcagccatctcatacctgatccgtcctgtcctctgctagctggcggtgtcagaaaagaatagccggactccctctttgcaggtgcccatcacccctcctgctggagcaccagggcccaggctctgtggagtgcgatggaaccggggagcaggaggacctcttggagggaggcaggcttccaggtaacacagccctggggaccgggcctccagggccccccttgacctgtactttctccctgtctccactcattcacttggacaaccatagttgatgagtttctctgtgagccatgtgaggtgcctgtgggtggctggctggttctggggtagctatgattatagcatggcttcagataactggttataatgcctggagaaatctgtccctctgtgtggggactctgctgcctcccgtgtgcttgctgataacctgggaagtcatagtaaagtttcaaaccatcagaaccctgtcttcctccctcttgctaacactggaaattgtgtgctcaactctctttaatgtcacagaaaccaaatggcatggcccaccttccaaggtcctgagctcctataaggaaagagtgctgcagaaagacggaagctgcaaagagtcccccaataagctatctcatgtaagtcctctatctacgaccgatcgcacctgtagcaggattgatgtgtgtcagcatatagagggtggcacagcacacctgtccatggtgctctagaacatgggatgcatctcagtacccagtaggactacatatggtgtttccatgcttgagagtgtggggtacagcccagcacacagtatggcagcatgtgcccacatgtggtgttcagtgctgtgtggggttcagcccagttcagagtagggcagggagtgattgagaacataaacacattccagcacacagcaggtggcacacctgtggcagggatcagacacgtgttattttccacaaaggacactcataaaagaggataaaaagagaagggaaatgggtaagttttgtttattttctcagttcatgaaggaccacggaaagactacagcagattcctgctaaagccaacatgcacgtcaccctgccaacctcgctgttcacggtgatagtgatgagatcctgcccccagggttagctggtcaaccatttagctacttagtgggacagtgcagtagtggaaacagaaacagtccctctcgccagaggagctgcagcaacgtccctctgctgatgtcactgagatgtccgtaaccatagcagcccagcagcctgctgagagtccactgacagcaggttccttgttaatcccacagaccagcttatctataccataaaatgaggggagtcctgtaggagaagcagctttcaatgagactccttacaaaggagctgcagttgggtggtttgaaaatgtgcaggtgaaagaaacttacaaactcctgggcaacactcttccctccccttggcacatcagtgagctttgcagttcccctaactgcgcacagccattcttcctgcagccacagccctgacctggcctgagccacttcctgagtccactcacatctgcgtctacagacgtccagagtagttctgtagaggaagacaggctgtggaggggccaggttgaaaccagagaagccaggatttgcataaaggtgcaggaggatggagaaaaaaagagagatggccaagcccctaggaaatggcctggacaggagcattgtcccggctccaaagccctggtcctactggttctcgaactgggacagctgagtcggtctgggcacagtgacagagaggatctcttctgtcttggcattggtcttccctacagcatgggtgattttcagacagttagtctggaatcttcctcttgggacttcacttggctttagctccctgagagcctgcgtgcttctttgcagggcacttcacagttgcagagtccttctctgcacaggaggcatgtggcactatgacctcagaaagcacccagggactaactggacgttttaccattatgactcagacctgggtctccttcaccaaacttggagtctttaagagaaatgctatactgactgtaaatggcaggaagtttataaatgtaaactgatctcctcctctgcctgagttttatatccttctccatctatataatccttgtcagtgacatttgtgtgttatacaccagtgattgactaaagacaggatgctaagctcctgtcagtgatggaggaagcaagaggcaggacctctgcatgagaccaggcagaagcagacagatccctgggacttaccagctggaagttaaaagtcaaagatactgactccaaaaggaaatagactggtacccaaaggagcaaagcacgcacacacacacacacacacacacacacacacatacacacacacacacacacacaaacatagacacacatgtgtatacacacacacaaaactaggatattgagaaaatccatttctatatctattgctgacttagggagcacataaaattcaacccaagccttggctatagcctaatgtttggggtgatcagtatatgggggtttacccaaaggccgtctgtctatcctcttctccagattggggataagagctgctccagccactccagcagcaacactctgtctagtaacacctccagcaacagtgatgacaagcactttgggtcaggggacctgatggaccccgagctgctgggactgacctacatcaaaggcgcgtccaccgacagcggcatcgacaccacgccgtgcatgccagccaccatccttggcccagtgcatctgacaggcagcaggtccctgatgcacagccgggctgagcagtgggcagatgctgctgatgtctcggtagctgacgatgaccctgccaagatgtatgccctgcatggctatgcctctgccatctccagcagcgctgctgacggtagcatgggtgacctcagtgaggtctcctcccactccaggtaagccagcatacgccaaactgcacctgcagtatgggtggggcctgaggctgtcactgctaactgcccagccatctgatcccacagagagtgctcatctcctgaactctgctattgagttgtgtgtctcttgcctcccctctcagcctgtgaccctgatatcttttgatagagagctgcaaaccagttaatcttcagtgtctgtcagccatgtccaccctgcaggccacctgtgtcccaggttatctgtgaatgcattgtgactcacttatatatgaagtatctcaccattcctgtcagaaaccgttgtagaccctggaggagggaaggcacagcagcagctccttgttggggactcacctcactcccttatgtaagcttgtgaacaccatcacactatctctgtccctgaagcctgatggcaggccatgtactgcaggaatttggtttggggtctgtgcatgaacatgtgcacatagtaaattgcccacagagaccagaaaaggagttggaccctcttgagttagagttataggcagttgtcattcatccagtgtgggtgctggaaccaaacttgagtcttctggaagagcagtaatcactcctgaatgctgaactgtcttcccagcccccagttgggatttttaagtaagtgtctgactaagcctgatggtgcaggcctataatcccatctactcagaggctaatcaaggctgcctggggcatattccacttaaaggtcagcttgggcgtgttagtgagacctgtctcaaaattaattgatttgtttatgaagtatctcgaggctgtggtgtatgcagccccccagtgttgggggtaaagaggagctaaatataaggggattttatcctaaatatagatacagaatacatgtctgcgcatggttttgtactctggcttgacagctgtctatctatatgctggtttaaaagctgataatttcaggtttctgggttctctttgcgagactcagagaagaggctcgtgtgtcagtgtgtctcagtgtgtctcatcagggggtgtggcttctgctcacctttgctccctgtccctggtgctgtccttccagggctttgggtcactctccagcttttcagagcttccagtcacagagcatagatggacaaaccacagtggaacagtcctgtgggacctagaactctgaaaggcctgtccccaaggggtggtgcatgccggcccctggtttctggtgacaggcctctgctcctgagcagtggacaccagagagacctggagcccccctctgccctttcttggatatcactgaagaacagtgcccgccatgagtgctgggtatgaccagtaaggtcgacctacgtcctcgtaggacatacaaccaaggggtcactctctgtgccactttaactcatggaacccaggcaggccaagtgacattgccccacaccgggtgccctgtctttatttcccttgtggctaaaacttattgtcatttgctggctgtgttcatggctatctcctggtgagaaggagttcttctctaatgtctacagaaggcacaggtctcccctgagaggtccctatactggttaggaaagaagggttgattttggtttgtgatttgagggatatagtctgtcgtggcggggaggactttggaaggaaaaggtcacgtggtgtctgcagtcaggaagcagagatgaacgctggtgctcagcccagtgtctcctctttattcagtccaggacccagtgtgtgggatgctgctggccacatttagggtgggttttcaacatatctcagacaggcacacctgtcacctcagaaatcacagatctagtcaagttgacaaaaccaaacatcacacccagcacccatgtgtcttctgcactgtccttggctgtaaaccaccatggctgaggtggtgccactgaggacaactaggacttctgctgggtgtgggctgctaagctgtggtgagacagccacccttccagggaagaggacaggagcctggagctagctcctgttgaccaggacagtgggaacagaggacggggctgtgtgccaaggagacattccagctgcttgcttttcactagtgctgttcaatgcagctcagtgcgagataacattatattcagaagtcacatgagttctagttcctggatgattcccaccctcctcggaactggataaaagttggcattctgtaaaagccaccttggggtcttgtagccctgcagcatcttttcaaagttcaggccacttgtaagagacctggtgtcaagagtcaaggtacctcagggactcgtggaatctgtatagcaaagagtttcgtgttactgctaagtggaaagtgttcagtgttcttggacacttgccttcagtgcacgcccttcattaggcaaagaaagggagttgggggggggggatttctacagcagctgtctattaatacgacaggctaagggactagaagcctatgaggagctggcctgaagcacctctttggcctagggttttgtacttatagactggaggcatgagcagctgagttggaatttgagtcactgagtggcctacagcttgcctgctctttgctgtagcatttcccccagttgtatttctcagcttgctcctgccacacccgagcgtggggagcctctggacacagaggcttcccgtccagcaagctatgtgtagagaggtcacctgccttcccagcccagtggccagggaccacacgtcactgctgtatctgctatgatgccacctttggctgtcttcacagtggctcgcagcactcaggaagcccttcagctcactgctccaaaagcaccggctctctggacagttccaaagtctacattgtcactcacggcggcggtcagcaggcacctggggcggtgacaaagccttaccacagacaaggagcagcaaacaaatatgtcattggctggaaaaagtcagaaggtagcccaccacccgaggaacctgaagtgacggaatgccccaggtaaatctataaccatagtcattgtacacccttcctaccatctctgtctgtccatctgtctgtcccctggttagggttattgttgctgtgataaaacaccatgaccaaaagcagattgggcagtaaaagagtttggcttctacttccacatcactgttgatcactgaaggaagtcaggacaggaatccacacggggcaggaacctggaggcaggagctgatgcagaggtttactggcttgcttcccatggcttgctcagcctactttcttacagaacccaggaccaccagcccagggatggtaccacccacaataggctgagcccgccctattgatcactaataagaaaatgccttacgcctgatctcatggaggcatttcctcagtcaaggatcatttctctcagatgactacagcttgtgtcaagttgacataaaaccatccagcacagagtacagtcatgtgagtccagaggacaccctctgatgaggccctgcaggtgctgcctgccttctttgagaacagggcctgtcattgacctggaactcaggccagtgtgacttgccagcccttgggccccagtgaccctcctgtctccatctgcccaacattgaggttacaagtgcagaccaccatgctcagctgtttactgtgtgctggggatgggtgcaaggcaagcatttcacccatggggccagctccattcttgcctctgctttaaacactttaaatgttgggatttatgtttccgtctttaaagtcttcactttattctgatggtgacggtggtggtggtgacagcagtggcggtggtgatggcagtcgtggtgctaatgcttgtggtgatgtgcagaagctgcggtggcatgtgtcgagtgatcccctccttctaccataggaatcctgggctggagctcagctcatcaggcttggacttggagaaggcaggcccttcaccttgaactcggagaaggcaggaccttcacctgctaagccatctctgtagcccttggcttttattggtagcagagtataaagctctgctgtctttgactctgtatgcagaaagctgcctgcagtagagtcgtggtgacagctggtggtggtgtggcgtagtctccatggtgtctcaaggccaagagcaccatcaaccccacagtcagagaacacagaagcaggaacactgcctgcttgttttgtggaactcttgaggtttgattggcaggtagggggtgggggggcagatatcctatgttcgtgaaaaaaaaaaggagggaaaactgaaggtctggtattgttcagagtagcccaagaaaccctgacttgtgctctgctagaggagcgtgccatggtgtaggtgtgggctgtgtgtgcggtgtgtgcctgtgaacacacagctcataggattgcgcacacagctcatgggagcctgcacagactcttgaagaataaccttaactaatgtgccttgggctctccccattgtgattttgaagatagtgtctgtcactggcctggagcttactaagtctagactggctgagcagtgagcccaaagatctgcttgtctctgtctctccagtgccaagctgaccaccaatctggctttttttaaaatctgagttcatactaactgagctatcccctcagtttcaaatgctttctggactttcatctgactgccaagggacagcttataggtagactgcagctcctctgaacctgtgttctggtttattccatcaggatatatggtgagatggacatcatgtccacagccactcagcacccggcagtggtgggagactctgtttcagaaactcagcatgtcctatccaaagatgactttctgaagttgatgctgccggacagccccttagtggaggaggggagacggaaggtgagtgagtaaccacgaaggctttggtgcaactccaggtgctcatttgctccccacagcccttcctgtggtccaccaacagcccggtgtagagtggccatcaccgctgcctcggatgtcaaggtttggtttgtttatagtactgagggtggaaccccagggcctcacacattctaggcaagagctgcagcccagccctggcccttgccactagcaattccttcagagacaaatgagctgaggaggctggtgtggggggccattgtgttcttggagttgctctgaaagccaggctggctcccctcgggtcttggctctggctatgacctgttacattagcttatgcaaatgggtccctgtgtgctgatgtgataaagagtaggtcagtaactgtccttcagggtcagggctctgccaggaagtgacacacaggagcctagcatggtacctggacacagccggccctcaaaggtaaccagtgaggccacactgcttacctcgcccaggacctccagcctatgccctgtccaggtcggcctggcagactgtctgctccagaaatggatagagattggttgcaaccacatctatcaagccttgcattctgccacacagagctgcagctctcagcgacagcctcctcacactcaagtcagcggtgccttctcagtgaggagttcacgtctttgctttgctcctcccaagttctcctccctaattcacttcttaaaataatgcaaagcaggagctgctaagcctgatgacctgacctggagaagacagacagactgccctccaccagtgtaccaggactgtctgtgccccacacgagtgaatgagtttaacaatgcaatgtttacaataacgcagggtaattaaaaagcataaataagcaggccagtcacttctctttcaagtagctgagactggtagcagactgtggagcacacgttagtgtctggttctagaacagaccctctcccacttgtagtcaggcatctgtgcttcccagggcaagtgaggcattacctgcatggcagtgagcaccagtctgtgtatcttaccgcagttagctgccttgtgttcctggagcagcagtgccatcagacactacgcctgtccctgtccactgtgatctgagcatccacactcagctgtaaagaacttactggggtgtgaaccgggaatctcgccagaatgtctcacaaggagccttttctcaacgcttctttctatctggatcccggctagggaactgtgtgtgcttgggttcaaaggcagatgaccccacagcaagcatcatcccagaatggctgaacttgtgcttgacatgtgtgttttcttctaaaacaaattacttccccagtgccagtgagcagatcgaatgagtaaaacatgggcaatagcagggcctctagcctgcttgccacatccagaaatgttactggccgctctgtgtgtgttagaaacagtattagagtgagacgattggggttcagtgccacaaaagtgctgcaggttcggtcgagtccctgcttctttaattggaattattttagtgtatgagggtggacagcagaatcactgagccttccaattctgggttgtagttcattccagatacaatcaaggtgacaatcaggaataaccaccacaatccaccccttgtcaaccaatacaaaataacatctcatgtccacatgaaacaataacgaggccatgaatacacctaacatgatataactatttctcgtacaatctcaagcacatttgtaaatatacaataggccagtgtcccttgggaacattcttttagtgtctctacttaaataccaattgatgctaaagaaattggaagaaagacaaatgtattcttagcaaaataagacggaagcatccatattactttaaaatcctcgtttctgcaactggttccatggccttcgctggtatttataacagtgatgtcagtgccttccttatagctggtcatactactttcatgtctcttgctgttactttaaaagaaaaaaactgagaagagaaaaggggatttatttcatcttgcagtttcagattacagtccataagtgtgtggaaagcaaggcaggaccctcaaacagctggtttacagcaccctacagacaagagcagagagaagtgggtggatgcttgcttgcttgtgctctgctcagtttctccactctcctgcacacagtttaggcgcccatgcctagggaatggtaccacccacagtgggctgagtcatccctcatcacttagcttaagacaacctccacatacttgccacaggctaatccaaagtagacatttgagacactctacccaggtggtcctagagttatgtcagttgacaaagctaacccttgcaatggttttgtcccactaactgtaaattcaatttccagcaattatacaaacttttgcaagtggtaacttttaagtgaacagcagaatttactggatttaaattacttctcttaagcatatttatatggctctggaaatgtcagtgttcagaattagttttgttatttagactcagttggacatccctgctgtctgttggtgaatattaaaatgtagtcatttctaatcaccatccatccacagtgtgtgcttctatgaatatcagttgcctgaaagatggccttgcgtatttgcaggagcgctggcctcactacagctccgtgtctaatctgtactagtatttcacagagtgtcagaggaggggactctgaaacccaggcatggtccaggagcctttctgcatgcttgactttcctgaaccagcagaaaactcatgaaagccatagcacaggcagacaaccctgactgcatatttatcgtagcggtttgatctagttttgagacagtcttggtatggtagtctggcctttacttgccatgtagcccaagatggccttgaactctcggtagtccccctgtctcagcttcccacgtattcggagttatggatgggcagcactactcagaccttcacattgtcaatgtccctgcctttatgacccggagtttccttcacattgctaacattcctgcctttatgacccctagttttcgttctacgggaacgtgtctccacggaggtcgctgtaccgaacactgtccgatgagagcgtgtgcagcaaccggaggggctcttcctttgccagctcacgaagctccatcctagagcaggcactgcccaacgacattctgtttagcacgaccccaccctaccacagtacgctgcctccaagaacccaccctgcacccagcatggggagcctacggagtaagtgagggctgtgtgggaggacttgcggggtacctgtggttccatgtgatcctcaaggtggatccaggtgtaacatggggtgcgatgtcagctgtttggcactatttccttgtcttctaaaccgtttctaagtagcagacttcaaggtggtttacattagacattattatcaaatactgtttttactttatctctgaaggaagtgatgtgtagactctgtaactttttcaaagaggagcagtggcatagggtggcttttcaggctgtgccaagcattcttatcggttcacttcatggtcctggtagcagggggtaacaggtaggtgttgggacacccagctacagctttgtggcctctgcatgtcacctctgtggccctgtgtcacaccacaccatgctcacaggtcagattttaaaactgtaatttttagtgtcctgtatatctgtgtgcacacacatgcacgtacacacacacacaggcacatatacatgtagagacagagtctctcactgaacctggagtttgccatcacagctagcctgtctggccacccattcccagggatggaattgtcttgtctcccctgctagcactgtggttagaggcaggcaccagcacacttggttattttcatggctactggggacccaaactcatgtcctcatgtgtgcacagcaggcatttacccatggagccatgtctgcagccagagtgtgatggtttctatgcccggctccattcctgctgcacaataagcctggcagtttaactataaagacatattcaggttgtttgtcaaatttcatcatagggagaactatctttagaaccagtttctgcagtgtatataaacatcccaggctatctgacataaggcttctagtagtgtctcacaagctggtctgaacctcaccctgtgcagtgctcagtgtggagcatggtacctgcctgttataaagtctctgagtttccaaatagcaaggcaaaagctcagacagacacctctgtccctaacccccaccccacccccacactgcctcttttaagacagggttttgtgtagcccaggatggccactatgtgtctcctgagagcttttgtgaagctcttgaagttctgttttatgctcttgttatttttccgtttcccacatacaagtgggttctgtgttgccagggtttctattcagcccttctattgttcccctatgagagacacagggtcttagcttcggtgtcttaaaatagtggtggtgatgatggtggtgatggtgctgatggtgctgatggggataaactccacttcttagctattaggttcttacaaggactgagcagaaaatgctgtggttttcatgtgttctctgctcctgggagactccctccctaagtgtgaggtcccctgtcctgacctcatcccaagcagcattgcactttggttacagcggagcccagtgatgcagcgctgccatccaggcccacagtccctgtgtacggtttcacactgtacaggcctgacagacggacggtcagtaacacaggcctgacagacagacagtcagtaacacgggcctgcctccgcagtgttgtacagagagtttcactgccctaaaaagctagttccttgaatatccctcctaccctcctcctgtggcaagtcctggtctcggcggttcctgtgttgctgcgacgcccggtagctggagtgtgtggcgttcatgctgcctttcctagtagcagcagttgaggcagctctaagcctttctcacctatgaatcctttcagaactgcccacagcctacagaggaaagaagcagatgcccccgtccctgtggctcctcccagggccctcgcttttgggcgcactcccttacttggtaatgtgcctcccggagcctgaccctgctcagctcagatgctgctctgggatacaaatgggaactgaaatgtgtaactgtgtgtaaataagaagccttgcaatagcatgtagtgacatctcccccacaaggcctctgagtccctcccgactgcatccccatgagccttaagcatctcgggtccaggtgggggatgctaggccctagtccacgagtgccttaggaaccatgacactttccatctgtctccccaagatgcccaaagggaacacagatgccctctgagaatgtggccgcagactgagtttctacagtgtaaaccctgatccccatgaacaagtgcctgggaatacctcttaaagagacctaaacattgtgtcacatgaagacttggagtgtccttgtgacgtcttctagcttgggtagctatttttgttaaactgacccaacgtttgaccttgggaaacaacagggagcaacctgtaaaactcacattcaagagccatgtggttgctgtcagggtggcccctcagcgtttataacaataccaataaagtgagacagtcaggacagtggagtgacaataggaatccacaagactggtatccagacatagagagcatcggtgggcagcagggcctacacagtggccacacttcagagtctaagttctcctgcagtgtggccagggatggtcaagcagggacattgccagcttctgcccagatgctatcttaagagtcagtcgtgtgccgccacatgctctgcgactacgcctagggagctggtggccagggagctagtcagtgctgtcaccagctttctacctgggtctcctgaggcacctcaaggctttagagagttaggtttgaaagggtagctgtgggtaaccatagcaagggagtcttttctagaagccctcaagcctggagaagagagcaggaacagtgtgtgacgtcacatgcatggcggtgtctcctccttcccactggacgatgggcagtattcatctgccagccctggctccacatgggtctttgctggtttcgctgtcctctgtcatggactgtacttgctggcttcccagtgtaaaagccaagttatgcctgcagaggtgttcatgtcagttaaagacttgtaacagacttgctggtttgaaactttggacaaaaaattaactttaaaaggtagatcttattcctaattaacttatttctactcagtggaagaaaaaaaaagttaaagtatgcctgattttgatgattgggaaaggcacatgtgcctcctgggttgtctgagagacagtcacagcctgaggctctccctgctctggtcaagcctcaggcagaggttcaaatctacccacagtcagccctagcttttgtgccactagtgtgtcagacgtctgccagctccccctgtcactcagatctcaaccacgtgtcacctccttagacaggacttcgtctcacggtgcatcacctagcctgtcttctgcagaagccccatctgtctgtctcctagtgacagagcctcagagctgagccccagctgtgtctcagctgtcccactcatgattcaggatggagcagtcaccatctaaaaacatcacaggaggctctagctggaggggacttctcagcagtctcctctccctccgttcctcagtgtcaagtctgcaagtccccctcactgtggaggggacagtgactctaagcagcttggcctgcgtcttccgcccttgttccctggatgtctgaaagtgggaggaggccagggtgtctggttatgcaggatacttcccaagcttccagtgtcacttagtggtgactgccctggtgtgctcctgtgagcagattccagggctggccaagatgcacctgtctgcatgcccagtcactcacatcatctcctgtgctccagcattcttatttgtgcctcactccagaaacagagcatgacttacttagcccaagtctgcccaagtagacttgctttgttgagtagctgcaggaatgatcttcccacaggacaatgtcaactgcacctcaccttctgaattagagccagcgctgtcccttcccttctcactaggcctccatcccacctttgtcctgtcatgtcagccagccactgtgcttactctactgacaccagccactgcctttccctagcaccggccagtggccccttcattgtaccccagagaaggcctcagacgaggaacctaaaaatcatgagtgttttctctcccagttcctgctccatccttactgctggcttagcacttgacaggggcagagcgcaagcatgagctgctgttagtgtagaggtccagagagcggctccatagtgttccctcacaggagagactgggagacactggcaggcatcaccactctcagcatggtcgcctggaaacagccctgtctggttggtgtcactgtcactgtctctgtgagaggtctgcccaggctgcagttgtggagtgggagcagactgtgggtatccttcaaggccacctgtgcaaatgctgcctgtcccattccagatgccagggcctcacggcgccccagaaggatggaggcgcagaaatcacaggtgcatttgtttaattacgcccctgaacttaattgcaggttcagcctgccaggtggccattactttgattggtctcattagtcagatgcagccacaagcagctgcatgcagtgctctgggcaggttcaggaaaggcactttgaaagtgtccggtcaggctctttcagaatttattctcagatgcataaggagttcctaacaatgagggttattaatgacctaagcgcttactgagaaaggggattgctgggaaaaccgtggccgcacttcaggaagtgagggagcaggtgaggcagcgtaggcctgtcctgtggaatcaggaaagtaggccagcagccacttcctcagaggtcatgaggaggcttcctttctccttccagtctgttaactgaagcagcctcaccgctccttacgctgtctcagatgtttgccgttcagctttgcaaacctcgttcctcagactttgtagctcctcagaaaagatgtggctgccagctgtctcaaggcagcaggaagctgcagcacttgttaaaggggaccggctaccctgagaaagcaggggcttatctcagggcactcagatctgggtacttcagaaagcctctgtaagagagtgaatgttccacaggactccatgctgcccccctacttgctttccagtgcccagttggtctcaggttggctgcttgtgacaaagctctgtctcgggtgatagcatctcaggggtccctgttttggcagatcatgttttacagtttcctgggctactttataagagtggatggtagtgtctgtgctgtaaccaactctggggactgtggtggtcaccgtttgtatctgagtcgggacatgctttccacactgactgactctgaccccaggtggatcagcagtgcggtgctgtgactgactgattctctggggatggtggtacctgggcagggactgatggactaaaggatcacagactaacagactctacacagggaccagtgctactcaggctgtgaccagctgattgtgacagtggtagtacccatgctctgactggctgactatctgtgaggacagtgactaatgacataataggttgattgactctagatagggactatggtgtttatatgggactatgtgcaaatgacgcagcggagctatgacctactgactatgggtcacagtgctcactctgtgactgactgtgtagacagtgactgatgggttgagagaccagttatctatatcaggggctgtgctgcatctctgcacatgtgtgcatgtgttaaagtacatgtggcatctctggttccatgttgtgaccgactggccttctgactgactctctgtgagggcagtggtacccatgttcagacagacagactgactgactgtcagactctgggacagtggtgcccatgctgtgactctgggtggagacaggctgacttacactctgattttgtttctacttagatgagttctggttctcggatgggtccttatcagacaagtccaagtgtgcagatcctggcctgatgccgctgccagacacagctgcagggttagactggtcccacctcgtggatgctgcacgagcatttgaaggtaaagattcacccacacccagggtctttctgtgtgcccagggagcatgctcctgcactgcagggcctgtgctgcagcctaggagcccgtctgtgggttggatcatcttgcaaatgttgaacactctgcctatatctggagatgacaggaggggaagcatttagaggcggccagccacttgataagtactcggcagaggtctaaatccctaaattctgttccatggaccaactgccacctgacgcacaagccccttttcctcctcagcctcgttgccctgtgggaaaagcaaacctgcttgcctagctcatactgtctcaccttgaagcacacccgggtgacataggagggacccacatgaggccaggccggagcttccaggtttaacacagatgactgaagcaggattgcttgccccttgcagctctctatctctgtgggtcttggctccttttaagcctatgggccactgtgggtgaattgagcctgtggtcagttggccaccgtgggtcagctgagcctgtggtccctgggccgccgtgggtcagctgagcttgtggtccgagggccgccgtgggtcagctgagttctgagagttctccagctagcatgctgcctttggtcagcagtgaggctgtgactgtccagttgaagctgcactggggagcagccctctccagctttttgggaactgtacgcacagtagatgaagaccctgcttccaggagttgggcttagtgggatgtggggccacaactcttaggaatgtttgccgttgttcacttgtattgtctttctcatgactgtggccaaaacctgacaagcaatggcttgtgagaggacaaacctcctttatctcatggtttgagagggacccttgacagcatggtggtgggcagaccttggctggggagtgggcagtgggtgttagttcatacctcagtggactaggaagtaggccaggctataatgacccgcctctcaagtttctataacttcccaaagcaccatcccagctaaggacaagaactcaaacacactagccctcaaggacatcctacatactagcccatgggaacgtattacacactagcccattgggacattttacacactagcccccagggacgttttacacactagcttatgggaacattttatatactagcccacagaggcatctcagacacactagtctatggggatattttacacactagcccacagggacatctcagacatactagtctatggggatattttacacactagcccacagggacatctcagacacactagcctgcagggacatcttagacacactagcctatggggacattttacacaccagcccagggggacatctcagacacactagcctgcagggacattttagacacactaccctatggggacattttacacactagcccagggggacatctcagacacactagcctacaaggacatcttacatacaatctgacacttcagcattctttctgctcccatctttatagcagatgaattgattgggactgttcacagggctggccttcaggcctcatcagagggtgtggccctagggctcacagcctccattggctcctcacacctgtgacatcaggctttgggaaacaggttggatcatctcccagaggggtgtcaggttacagaaggcaaggactgctactgtaacccatcctctcctcttgtgacctagcctgctgaagagaccttctgtttacccatgtctctggggcgcgtgtctacagggtgggacgggggtgttgctccaaggcaggattgctgagaggggacactgtaagtcaacatacccttcctacttcccactagtgagtctctccctccaggaaacagtctcaatggtgtccatatacttaattatttccctgttacaaactgctgaaggtggtggattcagactttagtaccatgttgatagaagtagcagctagcacatctgcaaacagtttttttgggggggtgaaacatcagtgcaactgattcctccagtcagaaaccttaggtcagcagccatgacatgcaggagagcttgcctggttgaactcacgagcactccctcatgacaaacactcatgggacgctgatctgagacttcagttgccgtaccttcttaccccagcacatgcgcggtagaagggtgggatgaggctcttcagcaatgcagctgcttccctcccaggtgcttgtgttcccctaagtcaccccaggaaactccctggctcaccaagccaccttgagtggggtcttccctctggtttgtcaagggtgtgtctgcatctgggatgaatatgtttccttccaccaacttatggacagacaacatgattcctacttagaaaatcaaaacaagaatccctccctggaagttgtgtgtcccgttgacgtgcctcattcatcaccagaaaggtcatgttcatcttcactgagctaaagcgtgggtgcttggatgctgtcatgttattcaagagtacagccaaggcaccagattcaccacccccattacaactgtgtgttactgagaccaccggataagtcaccagcaccctccagagaggaatgtgttcccgggcttgctgaccacaggcagtgagacaattcaagaaactagagatgaaacttgaggtctgaactttggagatgtgtgatatattactctgataactggctaagaagaattaaggactgcagaggggctggggagactgtctggtgggtaacatcacgttcagagtttgaattcccagcactacatcaaagctaaacactgactgcacacctataacccagccttgttggggggagctgaaataggcaggtccaggagcttgctaaagaaggaatgaagtaaaagaaatccgttttaaaatacagcagcaagtaaggcatccgtgcactgtgtagacagagcagtagagtgttgtgtagacagagcagtagagtgctgtgtagacagagcagtagagtgctgtgtagacagagcagtagagtgctgtgtagacagagcagtagagtgttgtgtagacagagcagtagagtgttgtgtagacagagcagtagagtgtgtctttggacgctgactggcatttggcagacatggtcccaagtggtacaaacagagcaagatggagttgatgtgagagaggaggctcctggggctagagcagattgccatcccctggagaagtcacaggttctgtaaggcctctcttgggcttgtgtcatgggaccttgtcatgtttggggtcttgctgtcccctgcagaatgcataccttgcccatgcctgtcatcccctacttaaaacctacgcaggaggtgaagcgcagcctcagtgcctgcctgggcagcaggaggagatcctgactcaaaaagcgcagggcttggatcccatatcttgtatcacaagaaacagaactctccctaggaaactcagacacagttccccagtgccaggaattagcttcgagactaaagggaacctgtcaccagaccatctatagatggcaactcagaaagtccctagctaatggcctcctctgcccgtgccctagctgactctggtggggctctccctcaacacagtgcttgttgggctgtctttggaatggggggaggccatgcacctggccctgctctgaggcctctgccaggctggctccatttgcactgacaacgaggtgccgcctctcctcaccccacccctcattccttcacactttctcattgcctgttctctgggtgacactaaagaaagattaaaagaagttattgaggaatgtccgctgcataggaataaatttcatggtgacataattgagtatttattgcaagacacaataggggatgaagaacaaagggcaaagtgtggaggtcactgaaaagccaccgagaatgttccaaaaccaagtgtcactcagaactaccaagctcagtgagttgttttcagtttcaaagaataatggtgcccttgtgcaaggctttcctgaaatctagcggcagctttcttatgtaatagaattctttttcaaatctcttaaaaagagagccccatttagacagcctgggtctgtaagattgcagtgagaaagcatagtgaactgctgtagtgggtggggattattcattgttacagtcgagagtttaactagtttaataaaagaaaagctttaattatagtaagttatagtaggtgaagtaattaagagtgattatcctaatttcttaaaagtatatctaatggaattgggaccgatttctaatcagagataagacttgagagatcctaacacagtcttgtggaggatgtagcctgattcccagatagtctacaggatgcagttgggaatatgctgatgagcagggtttcctcagaagttaaacaagaagctgccttagtttctttctcattgctgaaataagatgccctgacagagcaatgtgagggagaagcatgaactctgactcacagttcctaagagaatagtcccccgtgcagggaagggtttgcattgctgtgagcagacaccatgatcaaggcagctcctatgaaggacaaggtttacttggggctggctcgcaggttcagaggttcagtccattactataaaggtgggaacatggcagcatccaggcaggcatggtgcaggaggagctgagagttctatgtcttcatctgaaggctgctaggagaagactggcttccaaagtcttaaagtccaccccctcggtgacatacctactccaacaaggctacacctactccaacatgaccacacctcataataatgccactccctgtgccaaacatattcagagcatcagcaaaggcatggtgtggttgcccacagcattggaagctggttggtcccattatgtccacgcacaggacacaagactaggacctggatgtggtgtggctctgcatttcgctctgagagggaagcaccaatacactgctggggcgtgggaaaatgcagcctaagaggagggaggccaaagctggggttccctgactccaaggcattcagtcaccactggaaaccgcacagaggagttgaaagggaggatcagggtccacaggccttagatgaggagctggggccaggggtctctttactcctggacttccagacgctgctgggtctcagggaattgggaacagagttggatcagggccagggaggataggaaactcgggcttagctcattggcgattgtccttaccctggcagcaactgtctgggagcatggaggggccttctgcaggagacttaagacggcatgactctgtagacaaaggcttcctccatgcttcccacagcagttcttgataagagagacagtccttggttccacactgttcatggattgttcaccggagaaaatgagtgcttaccgactcctcagggtggaccagagattagataccttttgtaggaagggatgtcggggaagggaagctcactggctgagccctcagggtctctaggcacctcatcagcatggagaactctgtcctgatctaagtgaccataggtcaccttcctatgtaaggagcgtggtcatgtgacaggggcctggttggcagcaggtgaagctcctaccgtcctctctgggttctccggcttccaacccgctcagctttaccaggtctctaggcacagtcactgccccacaggagctggttgcaggaccaggcgctagagtcccagggccctcagacaccctcgtcttccagcaagactccacctcctaaaggttctaccaccttccctagcagtgggatcaaatgttcaaaccgatgagcttatggagagcacacatgcagaccacaacaggaaccccctgaacccacatcctttactgtttgcattggggtccctaacacatcaacagtgtcatgtggaaaggggggggatgaattccaggggcttaagactgccgtcatgcttatacacctagtaggatcaaatggaaattattaaagattctaaaattgccatgcagtggtggcacatgcctttaatcccagcactcagaaaatcaagttccaggatgctccaggctacatagaggagaccctttctcaaaatacaaacaaacataaatctagaattaactagatgagcaacttttcaaagtattcctgatttttagctactatttttatataacaagccatcccgaaatgcatggctgccgccatcagcactctatgccctccagctcagccacgtggttggttctcctgcttcataggccaacagggtgcacgcatggagcttggctgtgtccagcccatccagaggaccccactcctgtgcatgtctggaatagccgtaccctggctgaactctgcacccatctggggtcgtggtgctttgttgtatgtgatggaatgataacggcagttctgtgagggcttgttgtctgatctgagacatactaggctgtgataccagccatccttgtgggtcattcaggacacaaggacagtcagatacaaggctggggctgacaccaatacctcatggtggggtggcatgttcacacagcagaggaaggtctggttggctcagatcccatagacagtcactggagcagccatgaaggacagtttaagccaatcagctagatccagctatgtgttctttgtaaatcaagccatcctcagaatcacaatgagaaaatggagccactgttaactgtagagtcttaatatagacaaggacaggaatggatagaatcctctgtggtaaaaatgacagtcctttttgaattaatttgagataagtgcagtttcaatacagctatctaaagatatgctaagaacttaattgcacccatttaaaaaaagatgaacagtattcaacaagaaacctattataaatcaataataattaaaatagcataataatgattcaaaaatagaataagtccttttgaaaaaaataaagaatataagcatcagaatgtatttaacactaaatgagaatgcaatttatatacaccatttagatttagaaactagaaaagtcaactttataaaagtgaataataatcaatatcaccatttggaagctttaattacagaataatgagaaaacatgaaatataaaatggccatgtaaaaacatccataagtattaaacatttcatgaacctgaaagagtaagttttaaaggggacatgtgaactgtggagaaaggcttataatgaacgtggtagtgaaagccaggatgtgtccagtgcgaaaatgagcatcagaagacgccacctctgtgctgaacagctggtgtgtgtgcgtgtggcacactgaaaaagacacacggtaactaactgtgcagacgatgaagaatacacccagtaactaagctggcctgctcagagtgggaaatgctgctgctgctctagggagccacaaagaacactggaagccagtgtcgtcgttctgtggattataaagcaacccatcttctcattcaagcacggtgacagttcatacccagaccagaaaaatgtaccacaacccctccccaaacctgaaatttcactcctaagaactgaatgatagccagttattcaatataaaataatatagcgcagttagaatgaatcagtagataagtgaccagattgtaacccaaaaggcacagtgtcagaatggagccatctccttggtctaggagagggtgatctgggtgctaatgctgtcaacctgggccactgactcccctgtgctgtgacagtcctttaagacctggctgggtcccattcaagcttgagttgtttatttcccattctgtttggtatggaatgtgataatgccctttgcctgtcagagttcctgaacagaactgtagatttgcctaacacggcaagatcctttagccgtccaccatgtggtgcccagtttatcgtctgctgcttgagatgtgtttctatagagtcattttcttaataatgcttccactttccaatggttcaagagcaacacagctcccttagaagctgcctgtgggatctgcccagcttcgggaccctctccccaggtgctgcttgcactttcatcagccctgtgatgataatagggagccgcaggcactcgtcagtgctctgtgtggccgggctgcggtatcctgtaggcagtgtgtcacatgcatttctgataatgtatgaatagtgtgttcacttaaacccaggtgtatcaggatgtggcctcatgaacaggatcaaagccaagtagaagattctggctgtgggtcagactgaggcagggagggaaagtggggtctctttaaaagtcctagcagtaaagggctggggagagggctcagtcagtaaagggctaggtgcacagacgtgaggacctatgtgaaaaatcacccatggtcactctgatcagtgccgcacaaggcacggtgatctctgtaccaggagagcagcggctctcagccttgggtctctccagccagctagctcaccccagtcagtgagtggtccaggccagtgagaggccctgttttaaaaacaagattgacagcatcctaaggaatagtagtagccagagtggacctctggtctgcacacacacctacatacacatgagcatgcacgtacacacaggtcctggagttcgtggctcccgttcatcgttagaatgtcaggagcactggtgtggttctaagagttggtgccttagatgctgagcaagcctgagatgtggtcatggtccaagtacatcgctcattaaggtgcaggttactgcaccatgtgcctgcagctgaggatcaagtgctacatgggtaatgcagctccctgttgggctgagtgggtacaggatctctgtcatgtgtcagagtgtcggagtaggtcagttaaaggacctgcatgcccgtggcaggtgttaggtgggggctgtgcagttggcaaaccctgatgtgacgagtcactggatgggcccagggcaccatgagcttctgcgcctttagcgctgtgtggctgcagtgactttccatcatgtgctcctggcagcctcagcaccactaccctttttaattaactggtagtatgtgaccctacatcaaccgaacaggcaggtcacctcattaagaggcctgcacagcagccagcaggagacagagctcccagtgcgcctgggtactgctcctccccgttaatcagtccctgtgagaagggagggcctcctcagtactcgctggcagatcacatcccccctttcccagccgcaaattcatgcacgcactcagtccaggggcagggtgatgctctgtaaccacaaggtgctttctgcctactgtgcagcgttgctggccagcctgagttctgggtcagagttcagtcccaagcggctgggctgctcctttttccttttctttccaatccaacttcctggaaacagtgaatgccaagttcataatgcctgtggtaggaggtcctgagtcttacttgcttgtggctattgctgctggcattgctgggacctctgagcttcgtgcagtttctagtgagaggccccagctggctgctgtcaccaccactgttcttaaattcaaagcatggatcattcctgtcagtctgaaatgatggcatctgtggttgatccattgtgtcagacactaccacccgacttctaagtaggacacatgaaatgttacctcaccgtggtatgtgacactatttaatacctggctgtgtctttacacattcagagacaagagaacacacacctattcaaacatatgccagcactctatgcatgctgtactcacacaaccccgtatttcaagccttagaagggtccctgagatcctcaaggtcagagagatcttcctgttcacaggagaattctcaatcttatttcaggtcttgactcagatgaagaactcgggcttctctgtcaccacgcctcctacctaggtgattgacacgcgttcttgctgttttgtagcctgttttgtattccatacgtctgcacgcctgcatggtggtccacatactgtgttgggggtgcacagggacgtgtgccctggctgtcctgtctcgggaatgttctcgagctcatgggagcttgcagcagggtccatctccatggttgtcaccagccacgtcatccagcttgctaaaccacacacagctaggagctttagattcctcggagtgtggaaagaagaaagccaacttgctctgtagctgtggtatatgcaccataccctccctgtggagggcacccagcctcatgcttcttcattgccaccggcttgcctgagtttctgtttctccattttgtttcaaacagggcattgtggtaaggagggtcagcagattccattcagtaaattggtctttacaaaatcacgtgaactggtggctctcaccaacctcctttctttctgttcctcatctccagaccagagggtagcctccttctgtaccctgaccgacctccagcatggacaagaactagaaggggccccagagctgtccttgtgtgtagatcccaccagtggcaaagagttcatggatacacctgggtatgtagaccctccctcccactgtcccaacgcttagagaccctgggccaggctggagagagtctggcagtgggactaactcagatactagaaatgataacacttgtctgtgtgaccatcatactgcatagacagctgcctaacttctacaaaagcaccaggcactgactctcatcatccagtcttggccagccaggccacacgtgctgtaggacctgcctagggcacagttcttcccagaccctgcctacagttgacaatatatgagggatgcacccccattcgtgatgcatgagctccgtgaactgagtcatggttaacttgctggggaacctggttctgtcttcaggacaaaagcaagttaggaaaatcatgtctacatgtggctcccaggacttacctctggcccacctcttctccatttaaataagcctggttttttgttttcttagcagccttagtgtcttaccggttctcagttcatggtggtagctatgaacttgtctcaaatcatcaacttacacataaaattttcagtgaaaagtttactaacatgaacacaagcaatgtcctaaccttaggtctcttaaattctctttattgcaccatttatcagggagcgatcgccctccacactgactgggaaagttaaccagctagaactgattctccgacaactgcagactgaccttcggaaggtatgtgattgctggagtccacagacagaacaaagctttccccacagtcagcccctttaattcctgcaaatagttacatgagaaccctaagcagacctggatccaaagaggttccctcagtttcctctcatcttctcactggcagctggggtggggttttccctgaaggtacatagagtcctgtacacatgcctgagggtgtctgtgccttgtaaactcgaggtctccacataaagtaagattctgcgttgttgcttgcaacagccacatgtaagtcaacccaaaggagtatcagttactcctcaaagacaagatctccaagagcccagtcagctctcacagtcagttcagtcagtcagtcagctctcacagtcagtcagtcagctctcacagtcagtcagtcagtcagtcagtcagtcagtcagtcagctctcccaactcagaacagctgccttgtacatactcatgtgccagtttctccccagaggagcaagatgctgcagtgcccctactgtgctgggtgtctttgctgcccttggaggcagagtggagtgtgagtcacagagagccccagaagcctcctggggcgtcggcttggtttggctgtgggagatgaggaattataggtagtgtaaaagtggatatggttagccgggcatggtggcgcacacctttaatccaagcactcgggaggcagaggcaggtggatttctgagttcgaggccagcctggtctacagagtgagttccaggacagccagggctacacagagaaaccctgtcttgaaaaaccaaaaaaaaaaaaaaaaagtggatagagttggtccaagccagaaggaactagtgaagagaattaattatacaagagtaaagttcttatctactatgcaggacctaggatggaacagcttatgctgtttgctaaacacatgtgggtctgtgtatacatgcacactcatgtgttgacacactttcctctgatggtcactgtctcccaccaccagctaaggagctagagctaaggtcaaggacaggggaaacttccagggtctatttagctgagctgcccacaaggctttgcttccacttcatgttaaggtgatcctgatagagcagtgtgtgtgtgtgtctgtgtgtgtgtgtctgtatctgtgtatgtctatatctgtgtgtgtctgtatgtgtttgtgtgtctgtgtgtgtctgtatgtgtttgtgtgtgtgtgtctgtatgtgtctgtgtctgtatgtgtgtgtgtgtgtttgtgtgtctgtgtctgtatgtgtttgtgtgtctgtgtgtgtatctgtgtgtgtgtctgcatgtgtttgtgtgtctgtgtgtgtgtctctgtctgtgtgtgtgtctgtgtgtgcgcgctccatacacgtgcatgagccagctccagggacctcctacccaagtctgcctgagctaggaagtttcccaggccctgggactttgttctaacccagcagagcccccaggaagcagacgcagctcaccgctttatctccttcgcagatgaggacactgagacagttgagtttaactaacttggtctagataagaaatcaagagagcaattgagacacgaggccccctggggtgtgaggacatcaggggtgatgtgatgcactccctgatgagtccatcaggaaacagcgtgagctgcctgagcaggtatataccagcacagctccttccttgcaggagcacttgggacagaagacatggcggcgtgggacaggaatagctgggggtgggaggtgatcatccaggtgggcttagaagacagtggaggggtgggcaccaggaagcttcctctgaaaacaggacatggcagtgggccagaaagtaaaacacgtgacactgctctagaaggggctgtggcatcagtgctgaagtgtggtgcgctgtgggttggagagagaagaggaaccgggctttagagttgtccattagtggtgaggaattcttagagacaggacacatggacagggtaaagagttaggggatgaactggaggctgttgaaggatggaagtagacaccctgaggaggtgaggtgcgtccagtagttcagctgctcgcccgctgaggggcacagcaggaacagtggctgctatgactgtcctgcccctcagctctccagagctgaagcttgtcatgtagttctcatggtagaagcccctaaagcagttaattggaaagtcctagtgtgtagtcttgagaggcaaactttgaaggccagtgtggggctccaccagcaccagaaggatggcgtgaggtcgagcaattatcccagaattagcatcgcagctgccacactggtgccagtctcaggcagagaagaaggcaactggagacgccctgcaaatcaggagggttctgccaacctagttgcctctctccaggtggcatggggcggtaaagcttctgattgatagacttcctacacagcggctccgctcctccttaggaacggagggagccaggaggctagagtgactccagggtctgtgagcagcaaaacccaggggccctcatgtagctcaggggggcaggtggccagctgccctctaacaccatctgtctccgatccacacaggagaagcaggacaaggcggtgctgcaggctgaggtccagcacctgaggcaggacaacatgcggctgcaggaagagtcacagacagccacagcccagctgcgcaagttcaccgagtggttttttagcaccattgacaagaaggcctgatcagctcgctgctcctcaccttgggaccacgggctggtcggcctgcctgcctgccaccctgcctacccgtggtcccttccaagtcagcaaagcagtttttacatgtgctttccatcacctgtaggtagatgtctcactgtctgtctgtgtctctactcaccccagcaggcaggtcaggggcctggactcccgcatagctgcagcagaagatgaatgtaactgctggtggatgctgacagcctgtagccgagtggtttccctgacgatgctcgggtctccttcctgtggggagagaacctaggcaggtgacctgcagagatgctaagccagtggactatggcagggctgtagggctgtaaaataactatggagacgagaatcagacatgtactttaatgttaaaggtgctctatttttcggatgtacagtagttttatttccacagccgcattatcatagcaataagaagggcacgcagtaggcggtctgcagagctctgtcagagacggaccctgaagtttaacactagcacgaacgctgttgctgtagagacgtatttatttgcaggaacaaacggtgcctgaatattaacagtgttctgaattttttttaaaagagatgcatatgccttgtgaacggctggacctgtcagtagtcactcctgcgcgcgtagtttgctttcttgtagttgctctgctgcagtcagtcagtctaccctccccgatagagcccccgatgctgagtgccagcaggatcctgtgtccgacaccagatctgtttatctttgtacagaacctctgataaagtgtcttgtatttaacactcttatttaagcttatttaaccctaacttgttaattttatatgatttttgtttcacctgcgctagctgtaaggcgggaggcaggcaggcagtgactgagctcacctggacctgactgaagcaggtgggcgagctgaggaccggatgctgctggctaacacgttgtttgtattgcttctccatttttaactgttatatttgagatgaacatacattttgcttttttaataaatgttcaaaagaagtcaaca

SEQ ID NO: 480 - DNA, 6609 bp, Mus musculus
cgcggggagcgcgcccatgggtagcgcgggacggcggcgggcggcgaggccctggcttctgcgcgccggccctggcggggtccagaggaccgcggctccgaggttgttgctgctgcgggctgtgagctccaggctctgccggcggaagttgcagtctttttaggcaaaggaatgctaacgacagaagtattaaagagtgctgccgaagccgggacagtgtcaccacagcccctggagcacactcgtcgtggcctcagagaaaccgtgctttgaggatgctgtttgcgtttggtgaaaaaggcaaccacctttctgtctctgtctgttacagtgctgtgtgacgaccatggagggaggctcacaccactactgctgataactgcttcctgttcctgtggacatgagtgatccaaggccgtcacaggcagagaagcacaagcttggcagagctgctgccaaactcaaggacccttccagaaccatgcaggctgatgattattttgctcggaaatttaaagccatcaatggcagcatgggacctgctactttaaacacttccagttcgagtgagggcggaggaggtgggggtgggccagccaatggtaccccagcagtgcccaagatgggtgtgagggccagagtttctgagtggcctcctaaaaaggactgctccaaggacctggcttgcaagacgctgtgggagagtcgttctcagtccagctatgagagtgttacctctatcatccagaatggccaaaatgaccagggtgacaggcagccagaggagcagctggacctggactttgtagaagcaaagtacaccattggagacatctttgtccattctccccagagagggctgcaccccatacgacagaggagcaacagtgacatcaccatcagtgatatcgatacggaggatgtcctggaccaacacgcagtcaaccccaacacgggagcggccctgcacagggagtatgggagcacttcatctattgacaggcagggtctgtctggagagaatgttttcgccatgctccgagggtaccgaatagagagttatgaccctaaagtgactggctcctttgggtttccagatttctttccctgtgacactgccatctcccccagcctccatgcagcagcccagatttccagaggagaatttgtccgcatctcagggttggactacatggatggcggcctcttgatggggagggacagagacaagcccttcaagcgcaggctaaagtcagagtctgtggaaacctcactcttccgaaaacttcgggcagtcaagagtgagcatgagaccttcaagttcacgtctgacctggaggagggacgcctggaccgaggcatccgcccatggagttgccagaggtgctttgcccattacgatgtgcagagtatcctgttcaacatcaatgaagccatggccacgagggccagtgtagggaagagaaagaacatcaccacgggggcctccgcagcatcacagaccccggttcctgtaggcccagccggaggctgcgagtccccgctgggcagtaaggaggacctcaactccaaggagaacccagatgctgatgagggcgatgggaagagcaacgacctggtcctcagctgtccatactttcgcaatgagactggtggggagggcgatagacgcattgccctctctcgggccaactcagcctctttcagctctggggagagctgctcctttgagtcatccctcagctcacactgtaccaatgcaggtgtctctgtcttggaggtgccacgggagagccagcccatccacagggagaaggtcaaacgctacatcatagagcacgtcgacctcggggcctactactaccgcaagttcttctatggcaaagagcaccagaactactttggaatagatgaaaatcttggccctgtggcggtcagcatccggagggagaaggtggaagatcccagggagaaggaagggtcgcagttcaactacagggtggccttcaggacaagcgagctcacaactctgaggggagcaatcctagaagacgctgtcccctccacagctcggcacggcaccgcccggggcctacccctcaaggaagtcctggagtatgttatcccagaactgagtatccagtgtctgcggcaagcagccaactcccccaaggtcccagagcagctgctcaagctggatgaacaagggctgagcttccagcacaaaattgggatcctgtactgcagagctgggcagagcacggaggaggagatgtacaacaacgagactgcagggccggccttcgaggagttcctggacctcctcggccagagagtgcggctgaagggtttcagcaagtacccggattccacagggactcactccctctataccacatataaagacttcgaactcatgttccatgtgtcgacgctgcttccatacatgccaaacaacaggcagcagcttctgaggaagagacacatcgggaacgacatcgtcaccattgtcttccaagagcccggcgccctccccttcacccccaagaacattcgttcacacttccagcacgtcttcgtcatagtgaaggtgcacaacccctgcactgaaaacgtgtgctacagtgttggagtctccaggtcaaaggatgtccctcccttcggtcccccaatccccaaaggtgtaacttttccaaagtcagctgtcttccgggacttccttttagccaaagtgatcaatgcagaaaatgcggcccataagtcagagaaattccgggccatggctacccgaacaaggcaagaatacttgaaggatttagccgagaactttgtcacaaccgccacagtggacacttctgcaaaattcagcttcatcacgctgggggcaaagaagaaagagcgggtaaagccaaggaaggacgcgcacctgttcagcatcggggccatcatgtggcacgtggtggcacgggactttggccagtccgcggacattgagtgtctcctggggatctccaatgagttcatcatgctgatcgagaaggattccaagaatgtggtgtttaactgttcctgtagggacgtgattggctggacttcagggctagtgagcatcaaagccttctatgaaaggggagagtgcctcctgctctcctccgtggataaccgttctgaagacatccgagaaatagtgcaacgactgctaatagtaacaagaggctgcgagactgtggaaatgaccctgagacgaaacgggctgggtcagcttggcttccatgtgaactttgaaggaattgttgccgatgtggaacctttcggctttgcctggaaggcaggccttcgccaagggagccggcttgtggagatctgcaaggtggctgtggccacgctgacccacgagcagatgattgacttactgcggacatctgtgactgtgaaagtagttatcatccagccccacgaggatggctctccccgcaggggctgttcagagctctgccggatccccatggtggaatacaagctggacagcgagggcacaccctgtgagtacaagacaccttttaggaggaacaccacgtggcaccgtgtgcccacccctgccctacagccagtttccagagcctcacctgtgcctggcacacctgaccgactccagtgccagccgctgctgcagcaggcccaggccgccatcccccggagcacatcctttgataggaagctgcctgatggcaccagaagttctcccagcaaccagtcatcatctagcgacccaggacctggtgggagcggaccctggcggccacaagtgggctacgatggctggcggtgtcagaaaagaatagccggactccctctttgcaggtgcccatcacccctcctgctggagcaccagggcccaggctctgtggagtgcgatggaaccggggagcaggaggacctcttggagggaggcaggcttccagaaaccaaatggcatggcccaccttccaaggtcctgagctcctataaggaaagagtgctgcagaaagacggaagctgcaaagagtcccccaataagctatctcatattggggataagagctgctccagccactccagcagcaacactctgtctagtaacacctccagcaacagtgatgacaagcactttgggtcaggggacctgatggaccccgagctgctgggactgacctacatcaaaggcgcgtccaccgacagcggcatcgacaccacgccgtgcatgccagccaccatccttggcccagtgcatctgacaggcagcaggtccctgatgcacagccgggctgagcagtgggcagatgctgctgatgtctcggtagctgacgatgaccctgccaagatgtatgccctgcatggctatgcctctgccatctccagcagcgctgctgacggtagcatgggtgacctcagtgaggtctcctcccactccagtggctcgcagcactcaggaagcccttcagctcactgctccaaaagcaccggctctctggacagttccaaagtctacattgtcactcacggcggcggtcagcaggcacctggggcggtgacaaagccttaccacagacaaggagcagcaaacaaatatgtcattggctggaaaaagtcagaaggtagcccaccacccgaggaacctgaagtgacggaatgccccaggatatatggtgagatggacatcatgtccacagccactcagcacccggcagtggtgggagactctgtttcagaaactcagcatgtcctatccaaagatgactttctgaagttgatgctgccggacagccccttagtggaggaggggagacggaagttttcgttctacgggaacgtgtctccacggaggtcgctgtaccgaacactgtccgatgagagcgtgtgcagcaaccggaggggctcttcctttgccagctcacgaagctccatcctagagcaggcactgcccaacgacattctgtttagcacgaccccaccctaccacagtacgctgcctccaagaacccaccctgcacccagcatggggagcctacggaatgagttctggttctcggatgggtccttatcagacaagtccaagtgtgcagatcctggcctgatgccgctgccagacacagctgcagggttagactggtcccacctcgtggatgctgcacgagcatttgaagaccagagggtagcctccttctgtaccctgaccgacctccagcatggacaagaactagaaggggccccagagctgtccttgtgtgtagatcccaccagtggcaaagagttcatggatacacctggggagcgatcgccctccacactgactgggaaagttaaccagctagaactgattctccgacaactgcagactgaccttcggaaggagaagcaggacaaggcggtgctgcaggctgaggtccagcacctgaggcaggacaacatgcggctgcaggaagagtcacagacagccacagcccagctgcgcaagttcaccgagtggttttttagcaccattgacaagaaggcctgatcagctcgctgctcctcaccttgggaccacgggctggtcggcctgcctgcctgccaccctgcctacccgtggtcccttccaagtcagcaaagcagtttttacatgtgctttccatcacctgtaggtagatgtctcactgtctgtctgtgtctctactcaccccagcaggcaggtcaggggcctggactcccgcatagctgcagcagaagatgaatgtaactgctggtggatgctgacagcctgtagccgagtggtttccctgacgatgctcgggtctccttcctgtggggagagaacctaggcaggtgacctgcagagatgctaagccagtggactatggcagggctgtagggctgtaaaataactatggagacgagaatcagacatgtactttaatgttaaaggtgctctatttttcggatgtacagtagttttatttccacagccgcattatcatagcaataagaagggcacgcagtaggcggtctgcagagctctgtcagagacggaccctgaagtttaacactagcacgaacgctgttgctgtagagacgtatttatttgcaggaacaaacggtgcctgaatattaacagtgttctgaattttttttaaaagagatgcatatgccttgtgaacggctggacctgtcagtagtcactcctgcgcgcgtagtttgctttcttgtagttgctctgctgcagtcagtcagtctaccctccccgatagagcccccgatgctgagtgccagcaggatcctgtgtccgacaccagatctgtttatctttgtacagaacctctgataaagtgtcttgtatttaacactcttatttaagcttatttaaccctaacttgttaattttatatgatttttgtttcacctgcgctagctgtaaggcgggaggcaggcaggcagtgactgagctcacctggacctgactgaagcaggtgggcgagctgaggaccggatgctgctggctaacacgttgtttgtattgcttctccatttttaactgttatatttgagatgaacatacattttgcttttttaataaatgttcaaaagaagtcaaca

SEQ ID NO: 481 - protein, 1699 aa, Mus musculus
MSDPRPSQAEKHKLGRAAAKLKDPSRTMQADDYFARKFKAINGSMGPATLNTSSSSEGGGGGGGPANGTPAVPKMGVRARVSEWPPKKDCSKDLACKTLWESRSQSSYESVTSIIQNGQNDQGDRQPEEQLDLDFVEAKYTIGDIFVHSPQRGLHPIRQRSNSDITISDIDTEDVLDQHAVNPNTGAALHREYGSTSSIDRQGLSGENVFAMLRGYRIESYDPKVTGSFGFPDFFPCDTAISPSLHAAAQISRGEFVRISGLDYMDGGLLMGRDRDKPFKRRLKSESVETSLFRKLRAVKSEHETFKFTSDLEEGRLDRGIRPWSCQRCFAHYDVQSILFNINEAMATRASVGKRKNITTGASAASQTPVPVGPAGGCESPLGSKEDLNSKENPDADEGDGKSNDLVLSCPYFRNETGGEGDRRIALSRANSASFSSGESCSFESSLSSHCTNAGVSVLEVPRESQPIHREKVKRYIIEHVDLGAYYYRKFFYGKEHQNYFGIDENLGPVAVSIRREKVEDPREKEGSQFNYRVAFRTSELTTLRGAIDAVPSTARHGTRLPLKEVLEYVIPELSIQCLRQAANSPKVPEQLLKLDEQGLSFQHKIGILYCRAGQSTEEEMYNNETAGPAFEEFLDLLGQRVRLKGFSKYPDSTGTHSLYTTYKDFELMFHVSTLLPYMPNNRQQLLRKRHIGNDIVTIVFQEPGALPFTPKNIRSHFQHVFVIVKVHNPCTENVCVGVSRSKDVPPFGPPIPKGVTFPKSAVFRDFLLAKVINAENAAHKSEKFRAMATRTRQEYLKDLAENFVTTATVDTSAKFSFITLGAKKKERVKPRKDAHLFSIGAIMWHVVARDFGQSADIECLLGISNEFIMLIEKDSKNVVFNCSCRDVIGWTSGLVSIKAFYERGECLLLSSVDNRSEDIREIVQRLLIVTRGCETVEMTLRRNGLGQLGFHVNFEGIVADVEPFGFAWKAGLRQGSRLVEICKVAVATLTHEQMIDLLRTSVTVKVVIIQFDGSPRRGCSELCRIPMVEYKLDSEGTPCEYKTPFRRNTTWHRVPTPALQPVSRDVPGTPDRLQCQPLLQQAQAAIPRSTSFDRKLPDGTRSSPSNQSSSSDPGPGGSGPWRPQVGYDGWRCQKRIAGLPLCRCPSPLLLEHQGPGSVECDGTGEQEDLLEGGRLPETKWHGPPSKVLSSYKERVLQKDGSCKESPNKLSHIGDKSCSSHSSSNTLSSNTSSNSDDKHFGSGDLMDPELLGLTYIKGASTDSGIDTTPCMPATILGPVHLTGSRSLMHSRAEQWADAADVSVADDDPAKMYALHGYASAISSSAADGSMGDLSEVSSHSSGSQHSGSPSAHCSKSTGSLDSSKVYIVTHGGGQQAPGAVTKPYHRQGAANKYVIGWKKSEGSPPPEEPEVTECPRIYGEMDIMSTATQHPAVVGDSVSETQHVLSKDDFLKLMLPDSPLVEEGRRKFSFYGNVSPRRSLYRTLSDESVCSNRRGSSFASSRSSIQALPNDILFSTTPPYHSTLPPRTHPAPSMGSLRNEFWFSDGSLSDKSKCADPGLMPLPDTAAGLDWSHLVDAARAFEDQRVASFCTLTDLQHGQELEGAPELSLCVDPTSGKEFMDTPGERSPSTLTGKVNQLELILRQLQTDLRKEKQDKAVLQAEVQHLRQDNMRLQEESQTATAQLRKFTEWFFSTIDKKA

SEQ ID NO: 482 - DNA, 137622 bp, Homo sapiens
gtgcaccaagcgtctcgtggggtgtaaggcctgtgaaaatatatttgagtataaaatattattggccgggtgtgttgactcatgcctgtaatcccagcactttgggaggccaaggcgggcagattgcctgaggtcggaagttccagaccagtctgaacaacatggtgaaaccccgtctctactagaaatacaaaaaaaaaaaaaatagccaggcttggtggcgggtgcctgtaatcccagctactcaggaggctgaggcagaggaattgcttgaaccagggaggtggaggttgccgtgagccaagattgcgccactgcactccagcctgggcgacagagcaagactccgtctccaaaaaaaaaaaaaaaaaaaagctattattattctaacaaaaatttctgttgcataggaataaagggcagtatttttgtaaatacctgccataaaaaaaaaacgttaaattaatcaacagtaggtattgttcattcaatgttaatatccattttcttctttatcttagtgtgggactttaaaagggagaagcagcagctaacagtcctctttttatacaaggaagaatattatatgttctgtgtaatttaaacatccattggttttatgaaggatcttaaaaaaatgttatatttattgaatttaaagtttatttgtatatatgtaagttagcatacatatacagttacataatttggacacattagaaaaatacaaggaagaaagcagaaagcatgcataaggctacttgtaagagctaaccactatcataatatgggggtgtttctttcctgtatttttatgtatatagatttttaacatactttgtttcatgccttatataaacctttctgtatatggctgtttacacataatattatattataaatcctcaagttgatgcatattcttaaaaaattgggattgtgtagttatttattttatatatgtactatgtttatccctgatcactgactgttaagactgtttctgatttttcattcttgtagttttggatgaatatttttctatataagtttttaattttcttattataagtctcttattttcttgggtagatttttcagatgtagagtatttgaacattttataggacttaatatatattaccttattggtgttcaaagagagctgccagtttgcatctgtctgtagcatgtgggacatgcatcccccagaccctcaccggcatggggagtgtgtttgtgtgtgtgacatgcatgtgtgacacactcatggacttttgtaacttgcttggtcagaagtggtatactattgtcttaacttcatttcttctatgactcattattcatgtgcatgtcttacccagctaagcttcctgaagattaggaagctctttcattcatctttcatactcttcccacccacagcatccagtacagtgccctggtagaactgaatacgttgatttactgaagtaacaagagggtttttttatatcagacaataaaccacataaaactgttcagcaaaactcagtatcttataactcaagtaaatatgggaacagtgcaaagatggctttcagtgtgtgtgagtagtgaatggagtttgttgtgtatttgctgctaaaattactgtttttaaaaaatcaaatactggactgttgtatggattggcaggattttcttttcatgtcctttatgccaagttgaaaggaagcatcttcagatttgaaggctttgtgtttatttgttgcattttaataaagaatacagtgatgggacacgctttgcacagtttagttcaatttttaacaatattgattgatgttagttttgttgaacaccataatacagatactttgcaagagttttcactgtggattcaatggaaaataatattagtgagaacagaatgttttccggaaggattgtattttttttaaagctccagcctgccagttttcttataaaatgctcatgttctcttctttgctacccactgtcactaaacattcatttaaagaataggacagattattttttatgatttctaaatgaaattaataagtacagtctatattggttgacattaagtagaaattcttttctccttttgctgtgttttcctcagacataaatgcctctgcttaaattattaattggaatgactgatttcctgctgtgccatctgtaattcaggggtcacattgctgaaaagatgtattaactaataacctcctgagagaaggaggtgagggctatctctttttatctctttctgatttaaaaagatttaatgggaagcagtcaatactcacagctgttcttctgtctccttcaaaaaactccatgatcaaaattatctatttaacaaaacagccctttgtttattctatttttgacttacagaatgatgggcagggtagcagtttactaccagaaattggttcttgttccttattgacatacaggaagtttaaaactttacaaaagccatattctaatacagtataaagtctctcaaataatttcaaatgtaagttgtagttgggaagagaatagtgcttccctggagattgttttgggcaactcactcagcttctaaaagcttttctttgcctcttggagaatcagcttaaacactgcagtcagttactggtttgtgttctcttattctttgtgtgtaaatcagtgagcagtcatcctatactttgtaaacctgactatttcctttactgtgttcctttggaatagttatgggtttcattcatttgcttaatttcaaatcagtatgtttgtcaataaatatacactcatatattacattttcagctatttcacggctttagatcccattgaatctttagaataatcctttgaaatagataaaattattcccactttacagataggaaactgaggctcagagattacagatggctttaccatcatctcagcagcatatagtagagctggatatttgccgagggcccatatgccaggacatgtctatgtcttccccatgcttagagtttagaagaggatagcagcaaacaataaactggtatagaatagtctggtgtaacttagagtaaaaaaaaaaaaaaaggcacaatgctatgggggccacttagacccaaccttaaggtttgagaaggctttttaaaaacatgatacgtgaactgaggtgtgatggataacacctcttagtaaggcaggaaataaatacatcttgaagagatgtgggcagaggtagtgcatgtacaaaggataagaacatgaaggtcaacacatgggagcatggagggtggaaatccagcagctgcacaaggggctggaactcatggaccaaatcatgagtggcttgtgctgccttaaagcaagcagctttattcagagggaaataaggaactgttgaagggtttcattataatctaggagaactatgatagtggttctaactctggtcgtggcagtcaagatggagaaattgacatggatttgaggagtatttggaaggtaaaatgggcaggattgaatgtgggctgtgaagggaaggcaggatgagcactgggtgtttgggttgggcacctgagtggttggtggtgcctttccctgagctgggcagaggaggaacagatttgggtgcagggaggggtaggcaggaggacctagactatcttcctgcaactgtgagacatctttggacttgtggataaggatttatgagtcatcagcatagagatggcatatgagactatgaggttggcacaagggaatgtataaaattaaaagagaaggcaggctagggtaaaccctgaaaaacatcagcatttaaagacaacctgaggaggaggaggagccagccagcagaccaaaagagacaaatgagaatcagtgtgctccaagcatgtgttatgatactgtgtcgactcaggactttgggatactttggtctgcagtcatttcaatttaaatggatggatataggttagtgatgattgtcaaccgagtgtcaggcatgactgggagtagaagcagtgactgtgacagaccaggaccccacccagatggagtttaccaagctgctttacttacagagtcacccaagagctccatttaacaaacctttgattgggccctttccttcactatgaagtacaaatcagtataaaggaaactcataatatgggtttcttgtggagactaaatccttcagggtttctttattgaggtcctgctttactccaatgaaaaaattcttaactacatcaaggagatcagcttttctgggatgtcacttgagaaattcctccaaatagcacgtggagtactttaaaaattagttggcctaacaccagtgtgaactttccagcaagaaaagattttattccccttcgcagatcataggttacccctatgttataaaaccccaaagaggagaattctgctggtttttatgttctcatgttcaaaaatatttatctctggtaccaccccagtgtttaattcaagataaatgtttaagaacttattttcatgttcagatctatcaaaaacttaccaggcaaaaatattattgaacttgtatatcaatttattaccattattatttaatagtagctacttatcaaattgtcttatagctttgattttcgtattctactgtaataggaatgtgagttaatgggttgttttatagccatttggttataatttcacttaataccaggcttagtttttggtaaatgcattttaggtgatcagacctcaagtgcgagcagcacctcagctcattgattgtcttcttggccacagagagagggtaaaagtgggatcagtttgttcttccttttattccctgtcctattatccatattagtattagagctgttgggatactggcatgaaaaataagcattttttttactatagttatacttgtattataaatctgctatataattttaaccattttttcccttgaatggggctcgtaatttgtgcattttgtggttttcaatccatttgctacagctgcattcctgataagtggctcaattagaactctaatattggtcttaaagactcactgatgtctcatggaaaacgtcgaaaaacatcttatttaaagacaattatgcttaaatatcaaatgctctccatttcttttctatccctttaaaattattaccaagacagttagcatgagaacagctccttcatgctctaaaattcttcaattttggtcggtggccttccctagcccttcctcacttgggggcaccccactacctgtggggtttctgtctgggtttttaaagtgcttgcagaatgttggtgataattatttatttttactggggagcaaagccatagaattttatgaaatgcaagaataattggaaactatggggagaagaccagtgcccctcacagtaaaaattagcttaaagaacagaaagaaaactgtatgtagacaaaatctagagatctgttttaattagatcattcgaaggcaaactccgtcttctcaccaccctccagatggtcagaatctaggtttaggaaattacctggaagaaaagatattcatgttgctgacaaggtcacaggcctcatatagaagattagtctgtcatctttataaagttctagggaaggtattaaatgagtctcagattttccttgatgtttgtttttcctcaagctgtaccagcttagaagtatgagtccatttaactattcacttaggaaagcagttagtatccttgtgcctttaattagaataaggcaggagggagcaggtggtaccagtggcactcaccatatacatgtacaatgaggatccagtttattctacatctttttaatatttcgtttcatagcacgtttgctttctaaggaaaaataccatggcctttttgtttgaggactctgcatttgccagtctgaaactctcataactggttttttacaatctgttagaatgacaaaatgatgtaaaatcacagagggggaaggacaggtgtgattcacagctgctcacgaagaagaaggcatgtgtgggccctcgcttcatatggcttcttctctaactcggacacgaagctgaggtggccttttgaccaggtctttagattgcacggtttccatgtgccatccagttttggagtggtaccattcacgggcaggcatccagagccccaggaagctggctgcatgccacctacagaaaatggagctctgcacacagccgcgtagccacgctcacaagaggacagagactggtggcaggattggccgttttattaactaccatgtttgggaatgggccttgggtctactagaggaagctgccgagatgcttagaagatgaagtatgacattcttttctttgtatacaattagaagacatgtctgtaatcacctcatttggctggtacggaagtgggggtgggaagctgttttttcagagtggagtagttgctgaattttgtgtttacctgttgtaaggatttgggaaaatggcatggagcaaacagtgtcctgcaaagtgttaacaaccattcataggtatttgactttataatgagtgattttctacaaagttatatcaaatgaaacttttgtggttacaatatattgtaaaatatattcctataaccaccagaatttttcatttaaatattttctaatataaggacttactgcctaatatatttgtacagtaatttgttaatttaataatatttattaaacatctaccacatactagaaacagctccaggcaccgtagataaaatggggaagaaaacaaattcacagaactttctcctggggagagacacacagagagaagcaggaagtccttagaaggcatggaaatgggtgtttgggaagtagaggacaccatgggagtatgttgtggagtcacccagttgcggggagagagatgatcatgaatggttgtcagttcagctcaagcagtggatgctccatttagagggaacagctgggacacaagcctggagagtgggctgtttgaagacttgaaagacgcttggtatgtctggggcagggcgtagaaaacaagggaggagggagagagattaaagaaccacagagtttccacaagctacagtagagcaaaatctcaggggaggagttacaaggagatgggatccgggctgcatcccaggaccaataattgtggccaggggaggaggtattcttaactggccacgtgttaggtgtggagttagcctcacacaaattaaatgattctccaaagcaattcaagccaccattaccagaagaaaggggagtggattttagataggaaaaatcagtagctgtccactaaagctaatgttcttagcacaaacaagttttcaaaattcacaacagaaggaatattctgagatacctttaggaaagaatttcacatgctctgagtttgctatagttttcatcctttgtagtgaacctaatgataagattcagcataaattcatctatttttaatttcgtatattatttatattgtaaaatctttatttgagatgggatctcactttgttgcccatgctggggtgcagtggtgcgatcatagctcactgctacctctaattcctgggctcaagggatcctcctgcttcagcctcccaagtagccgatactacaggtgtgtaccgccacgccgggctaattaaaaaaaaacaggtttttgtagagacgggctcttgctgtgttgcctgtgctcatctcaaattcctgggctcaagcgatcctcctgcctcagcttctcaaagtgctggcgttataggtgtgagccatcacacccagctaatctttattttttgactatatattggtgtcttccattttttcacaagatatgtgtaataaatattttgtaactttaatttcatctgttaaacattgagaaagctacaaatgttagaggaatgtgaaagctcagaagatagattttcaagtaagaatctgagcccagtaaattataatagctagtcaggttttccaggactaattattatcttattctcgctaatcctagttttaatatttaatagtttctctggtttattttgcacatctattagttggtggcttaaactcagagcttccctgtggagcgtggtgaataggttacaagtgtgaggagatgccggtttgctcttccctctgggtggtgggttgagcccaaggtggtcagtctgttaactgtgcctctagtctgagcatgttcctttttgactcccttgtgctgtacagatactggtatttcaatatatgccatgacacggaaaagaaaggaaggtagggtttgtcctcattatttggatggcatttattttataaataaaaggataaaggagtttcaaagcaacaattaaagtggttctttgcatttcgtggatgcgtttgttaatgtcatttctagttggggactggttatgtacaagaatacaactttctagtgcattatgccacaagtgacctgtaaaataaagacccctggaaatagaaaacactgcaatttacccgtatgtttgtagacacttgatctaattactcttctctttaattacaaatatttttctttgaatttattctttctttatttagacacagacattttcaggtgttacatattttccaaactcatgacaggctatattactcattggcagaagaatgaaagaatcactttacctcttctgaacaaaagctataatatagctagttttcttcatccttcaccaaagcataaggaatattaataactgtaattcggtttgaaaatgttaaaatcccaactagctaaacagcataaaaactctttccagtggactcctaatggctttgagatgagcatgtgggaatgtcttagaatagcagatatttttcttatggtggcagttgctttctccctaccataaaaaaaaaaaaaatttagggatgacaacgtatcgtctactctcagagctgttccataatggaggaaataaaatgatattttaggatatggcaaacagggaaaatgagtagtcagatactgacatgcacaggacagaacagacacactatcccatggttttcagaaagataagataaatgactgcatcttacctaattctcttagaattattgtgtttaaaaggatcaaggatgactggattatagttatttcctacacagtttaggctattatcaaatccattcctggagactgaaaaactgacaactgaggtacaagaaaacagcttcttacccagtatctcactactgcaatgtatttgatgtatcagataccagatccttgaagatctcttcccacttaaaggaggatctgtgtgagttctaatttgactacaagtgatcactatgaaaactctcttgttaatgtcttgtattgaccattttgctgtgggacattttgagtttaactgttttgaaagaaactaaactaataatactgaaacccattatatacatgacttgtgctgctcttgtagccaattcatgcattgaaatacttcatgaatccctagtttaagccaggctaccttaatagttaatgctggtacacagctgaaaggcatggttcttggcttagaggaacttgaagtcagtgagttggtaaacagcaattagagataaggaaaattactctgttggatatagatggagtgctgtgggatcgcaacattctttgcttagatgcaattagggtgggagacatcctaggaaagtttcttagatgagttaatacctgattgtatggtgtgaattttatctagctatgtagagaaggaagatggtgttccagggaggagtgttacgaacagtgctgtggatcatgaaacttcgtgggcagaagcagaggggaaagacagatacgaaatttatcatagaatgtgttcaacttgaagcatattaattgctaatggctacttcctatctcttaattcaggtgaaggaaatactcatgaccagccagatgtcttaaggaatgcttttgaaaagaacagaggcgtacaacattattacgacaacagagaagcaagttggctttgaagaaactgtattctgaggatgttgtttgctttgggctaagaaaagaaaaaatacaactacagacaaagcctttatatctgcaagtattatggcgtggtcggtagcaatgtaattagatttacatcagtcttcctggtgagacttggaggctcttcctcggtagacatgagtgacccaaggcagtcacaagaagagaagcacaagctaggcagagcctcttcaaagttcaaggatccccctagaatcatgcagtcagatgattattttgctcggaaatttaaagccattaatggcaacatgggacccactacttctttaaatgcctcgaattccaatgagactggcggtggtggtccggctaatggtaccccagctgtgcccaaaatgggtgtgagagcaagggtgtctgaatggcctcctaaaaaggactgttccaaggagctaacatgcaaggcactgtgggaaagccggtctcagaccagttatgaaagcatcacttccgtcctgcagaatgggcagagtgaccagagtgaaggtcagcaagatgaacagctcgatctggacttcgtggaggccaagtacacaatcggagacatctttgtccattccccccaaagaggacttcaccccataagacagaggagcaatagtgatgtcactatcagtgacattgatgccgaagatgtcttagaccaaaatgcagtcaaccccaacaccggggctgccctgcacagggagtatggaagtacttcatccatcgacaggcaaggcttatctggtgaaaacttttttgctatgctcagagggtaccgagtagaaaattatgaccacaaagcaatggtcccttttgggttccctgaatttttccgctgtgaccctgcaatctctccgagccttcatgcagcagcacagatttctaggggagaatttgtccgcatctcaggattagattatgtggacagtgccctcctgatggggagagacagggacaagcctttcaaacggaggttgaaatcagagtcggtggaaacatctctcttccgaaagcttcgaactgttaaaagtgagcacgaaactttcaagttcacgtctgagctggaggagagccgactggagaggggcattcgcccttggaattgtcagcgatgttttgcacattatgatgtccagagcattttgtttaatatcaacgaagccatggctacgagggctaatgtggggaaaaggaaaaacataaccactggggcatctgcagcatcccagactcagatgcctacgggccagacaggcaactgtgagtcccctttagggagcaaggaggacctcaactccaaagagaacctggatgccgatgagggtgatgggaaaagtaacgacctcgtccttagttgtccttactttagaaatgagactggaggggaaggcgacaggcggattgcgctctctcgagccaactcatcctctttcagttctggggaaagctgctctttcgaatcgtcactcagctctcactgcacaaatgcaggtgtctccgtcttggaagtgcccagagaaaaccagcctattcacagggagaaagtgaagcgctacatcatagaacacattgaccttggggcctattattaccgcaaattcttctatgggaaaggtaaggaagagccatgggcgtttgcatgtgtctcgggagtagttttttaagaaccagtcacaatgttttgctttgtgttggagcaccttcctcagagtgtccaaggccatagtccactgggcctgaccttgttctccatcatggtccctccatagcttccaggctaattttttctttagaaaactgcaattccatgcctttgtttatgggtagtccttaatgtgtaaatgcccttttggtttctctttctgtcattctttgtctgccaatttgtgatcatcacaaattcagacttgatttagatttcatcccttgtaagaagtcttccctgattaattctgtcctcctcctattcctctgaataatctcttatgctgcttacagtggaaaattctgtgtttccctcacctctctaatctttctgtactttgcttctccagcattgctgtatgtgttggacatgttaaatctttgttgaaagaatgcctgaattaccacaacagacaaattttgttttcatgtagttctatagatgggcttaaatgttaagacacaagtgataaattatttaattctatgtcaaataaatggtttttgctttacgtatatcttcaggcttgaaggatgcattcttcagaggtcatgtagttgaatcctcaacctttaaataagtgtccctaattatcccagggctaggagaatcttctctgatttaaagacctacagagaaacaggttccacatgtgtcagtaacacatgccgaggaaaacactccggcacctctcaccaccttcttattgggtgcagctggtgtccttcacgccttcattatagtgcagcttacttttcagagctatatttttctgtcttcagtttcacccgtcagccctcttcctgctcccagggatccagggataacctcacagagtgcctgaggaggcagagggtgggccccgctactctcctcctcctttttctcagtgcataaactattctgcttctagcacagatagctgggagctcactgtacttttatttatttatttatttttttactttaagttctgggatacatgttctgaacatgcaggttttttacatagttatacttgtgctatggtggtttgctgcacctgtcaacccatcatctgggttttaagccctgaatgcattaggtgtttgtcctaaagctctccctcctgcttatgagtgagaacatgcagcgtttggttttctgttcctgtgttagtttgctgagaatgatggtttccagcttcatccatgtccctgcaaaggacatgagctcattcttttttatggctacatagtatccatggtgtatatgtatggtagtttctttatctagtctatcattgatgggcattggggttggttccaagtctttggtattgtaaatagtgctgcaataaacatatgtgtgcatgtgcctttatagtagaatgatttataatcctttgggtatatacccagtaatgacattgctgggtcaaatggtatttctggttctagatccttgaggaatcgccacactgtcttccacaatagctgaactaatttacacccccaccaacagtgtaaaaatgttcctatttgtccacatcctctccagcatctgttgtttcctgactttaatgatcgccattctaattggcgtgagatggtatctcattgaggttttgatttgcatttctttaatgaccagtgatgatgagcttttttcatatgtttgttggccgcataaatgtcttcttttgagaagtgtctgttcatatcctttgcccactttttgatggggttgttttgttcttgtaaatttgtttcagttccttgtagattctggatattagccctttgtcagatggacagattgcaaaaattttctcccattctgtaggttgcctgttgcctctgatgatagtttcttttgctgtgtagaagctctttattttaattagatcccatttgtcatttttggcttttgttgtcattgcttttgctgttttagtcatgaagtctttgcccatgcctatgtcctgaatggtattgcccaggttttcttctagggtttttatggttttagattttaatttcatcagtattggtttctgtcttgagaatatttgtgtaatttttgactgtagtttgttttattggagtgggttggggagggtgggtaacacagaccttaggaggtcactctgtccacttcagtcccttataacgttaaaccactgtgaagcctgtttattactttttctcatggagtatagacttaaaagaatttgtctgccagataaattgtgattattaataattccccctcctgtttttgcatcaatccagacttagcatgtcttttgtaatcacattatgacaacatgaatcagagaaatgatctgatgcaataaagctaaataaacagatatttacactgcatctggtcacttagtgtgaattgtctctctgtcctcatactgatgacataataggactgaaatagttttgtcaacagatcttggtcccctgttgtgtctcctttcctctcctccaccctgaatttcggtcttggcttcaggtgtgcctcagtgttaacaccatagttacttccttccagccagtggaatcaaagaatcctggacctgcttttttgtctctgctgtgaaaataactcataaccctcatgcccgtgttcatgcagaggtatcacattatatcacactgctcaaggatgctctctaggtggaagttagttatttttggaaagggagatggagagataggcttcctaattaaggttatttttattgatgaagccatggctgccaattcttaataaaataaagtctgttggatttattatgccctgaaatccccaggtaattagtcattctggctagctgagttttgtaaatagtttgtgattcagactttgaaatactagaacataaaattatatatatgttcatatttatgccaaaacttagtgccagcgtctcattcatatgctgttgcacatgtctgagtgtaagtggaatgaaaaactgttgttttgtgcaccccggtcaccaccatttgattcattaatgtccccagggtctgttccccgagatgattttaggttgctagattctgttagttttcttgactgctacttgtagtttttctcttgaattctcaactgtcacttcttggtagttttaaagactcctctgcaagtgatttatttcctccaccttttctgatgagctacttagtttttcaagagcattgcaaatgacatcatcaaactgcttaggtttgaatgtgaaataaataagctccaaagaagaatctgagtgtagacaccctgtcagtgaattgtgggtggatgtacgcttatcgtttggcattttggtgctgttgggcacactctctggttctgagctttgcagtggatttataaacgagtcagaaagcagaattctagactatagtcacgcatcagttaacaacagggatatggtctgagaaatgtgttattaggcaatttcgtcattgcgtgaacatcatagagtatacttacacaatcctagatatatatctttattcatatatatatatatattttcatattgaaaaccaaatgtcccagcaccattactgaatatcagacatttccccttattcatctgcactgccaatatcaagtgccatgcatcagatttctgtatatgctccatcatgattttatgggaccaccgtcatgtatgtggtccattgttgaccgaaatatccctatgcggtacatgactgtgctttgcaaagcccacaaaatgagggagtggggaggcaatccgtgaggtcgctttgtcttcagtgttctgtgattctgtgctgtggaaggtgctgttgtgcctgcagatgggctcgggctggggaaggagcggccaccaggagtgagaagaaggccgagccccggctgctctgttctctctccagcgcagctgtgaactgtgtcctgcctcctcctatatttagctcttcccctgtggtccagtgtgacttcaaagtgaaattggttacaatggcatctgctcctgctcttgctggtctcttgttgagccattaaggactccaggcagaggcagcagcccagattcttaagtgaaaagtacagtgaggtggaggcctcctatggtgtgggagtagattcccattcccgcttcagccactggacacagttgtgcaagacccttctgtctgcaaacatcatgagttgggtgagcttcattgtatttaaaaacagagggcctgggcagactggcacagataacgatgtttttgagatagcttttttctttcccttttttgcttttcccttctctcaaggattttctctttggaaactgactttcagggatctatctttcaatactttccagagtgcttttattttgttctgtgcttcagggttctgtgtaaaacttcattttcaagagaattaactggctcccaatcatggcaaatgtttaaagtgcgatactttaataatgtgatttcttctttattgggtagttaatgtgaaatgtctgcttttgatgctgaggtgtatttctgtgacacatcatcactgaaaggctgttgaataactttgtgaaaggatttctgcaggggagtggcaggacacaggaaactgtgtgacaacatcgcttgcccaggcaaatccatctgtagctttcagtgaaatagcttttcttttttcttgaagacagagtctcgctctgttgcccaggctggcgtgcagtggcgcaatcttggctcactgcaacctctgcctcccgggttcaagcaattctcctgcctcagcctcccaagtagctgggattacagacatgtgccaccacgcccggctaatttttgtatttttagtagagatggggtttcgccgtgttggccaggctggtctcgaacgcctgtcttcaggtgatccacccacctcagcctcccagagtgctgggattacaggcgtgagccaccgcacccagccaaaacagcttttttaaaagcagtgaggatagtagcaagtagagtgaatgcccaataagtcccttcctttcacgggcgataaccatgaagacacattggtgccgtttgtcacattactgtttctctgatgggactcattgtgaatgtgccatttgctgctgctttgagctttgcatttgtgaaacaggctgtgacaaagggtcccttagatagggattctagttgtgcttgaccacggtcagtcatgtgagcatcagtgagtctggtttccattgtagcagagcagcaggctttgcctccttctggacctgcttggcactgcacactgccaccaacagtggggccagtgctggaactgtgtggcagagcccagacactgtgtgttgacacgtgaggtctcccccgcttggtgacgaaatccttaacttgttaagaagttgtgcacctagtgggttactcaggagttctaaaacggttctgtgccctactttatgccacccagaccagaatagttctaggaggcaaagtgagtaatatttgggtaaagagaggttaaaaccagatgggaggatgaagctgggcctccgtggtgactcaggagtgaagtgaaaagtggctaaatcattgtctgagccttcgggaacgttgttttgctagagccattctgctggcacaggagcgcgtgttcctctgaatgtagtgggggaaaatgcggaatcagattgacgaatctatatctttttttcatttagaatttttaaatggtatataaatgtcatatgatggttatgggaaaataagaaaatgtagaaaagcaagaaataaagtctccccaaattcatcagctataatcaccattaacatttcgtcattatccttgaaggcttttctgatgcaaataaatttatgtaaatggagcttactcctgctattactgtggaacttgcttttgatgatcacccttccatgtcattatgtatagaactgcatctgcattttaagagccattatcaattatcgttatctgcactgaatgcatgaggagatgccaggtatttaccagccatgatctgggcagataagttaatgactgtgtttgctttacttgagagagaaacttaccagcttgatagaagcacagtaataggggaagatgcataatttcctgtccccttgtagatgcaatacctctacaaaacaacttaccaaatacattagtgaatgtccatttttgtaaagaaatctttacttgaaaaagtaatttatctttataagagtttaagtcagtgtcccaccaccttcctacttggatgtgggctgcatttagtgactcacttgcaaaaggtatcttatggaaagacagggacaaataattttacaatggagtagcctggcaaacactacctccctaggtcaccaaggtcaccatcaacagtggtaagtcctgtgggtagcttgtaccccggctatgaatgactcttctgcaggcttcctctccaaatctataaccccagtacaattaggggaaaacattagaaaaattccaaatgaaggacattctgcaaaatccctgactggtacccaaagctgtccaggtcatcaaaagcagggaaagtcggagaaaaaaaaaaaaaatcacagaccgtaagagccttaggggacatgacaactaaatggaatgtggtaccctgggtggaatcctgtacagaaaaaggacattccattaaaaactaaggaaatctgaataaagtatggacattagttaataacataacagtattgattcgttcatcataacaaatgtaccaaaataatgtaagatgttaacaactgggaaactgggagatgggtataagggaactctgctatttacagcttttctagaaatctaaaagaattctgaaataaaaagttaaaaattttacaaatgtaagtcataagtgctcatatatttaaaattatgatctatttctttaagacaagaagaaagaatttgtaagtagttcctataaataacaaagctttatgttgctttattgaacgaccatagaattcttgtaagcagccaacttcactgtttctggtaactgctctcttacctagctctttgtaaacccaccctttcctccagtgctaatttttatcattagtattttaactgaagaataatatgttgtatgtaaatcctgctaaatgaacaaattgattcttctagaatttgtgtaataaccctcttacctctcttgataccaatttaaccgttttttggctggggaattatctttctgccattaggtaaaagtgtccatccattttaattatagttggaggtcaactcttggtaaatagaggtctgtgaatggcgggcaaatgacatcacttaaggcagagtgcacactgaggttcacatcccaactcaatttggggcaaatccttgaactactttgtgccctagtcaatcatctgtaaaatgggatgataataatacaaatcccccctgtaaagggcttagagcagtgcttgtcaatagcatgcccccctgcttcccagggttacttaaataaatgtgtaagacttttccctctaaaaagaaactattgttcacaccactgctacaggctttagagggcaatactttcttttagtggttcaaagatgaagagagaaacaagtagaaccatatggcagagagggctggggaaaggtgtctggtgaagtccatcaccccattccaaacacactcacttaagtgtcactaatgtgacagttgtaggcgggcctacacctttacatatcaaatgaacttcactgctgagtgatgcatggctgcatttgctttgaatttcatgcctggtagctgttttttccttctgattttatacagtcattgacgaaaattaatagggagttggacactattaaattcatacgggtgaacagagtgccatctaacaatagtactattctaagatacacattcctccctctgaagacataatcggctgagttcttcacctctctccctggccagtattgcctccccaaacggaggtcccgtcaagtcccacaggcgcccttaatggggaggaattgcccagatacacatgagattcagcaccaagggctgtggtcgcacgggctccatgtggccgtcggtggaaaacaccggggctttctctcttgcagaggtgccgtatctggacagtcacagttcccatacaccacagtgttgcaggaacccacaaagggctgtctgtatgctatttcaaaacctactgactctctggccccaaaaagtcttcagtcagttactggggaagaagaacgaatgccctattatttccctgggaaaaggaataagacttaatatttctttacagtttgactcacatggcgtttaactgacaacacttgttggcattttgctgctggtacagtaagttggaagtaaaggtctttggagcattagttcttaaagaatgtagaaacttagtttaaacactttgtatttgtttagacccaaaatttatttcactatttgtcccacttaattaaaataaaagctggacagccatcccgttatcagtgggctccacctctcttctttgaagtggtgaggcctttcatactttcctagtgttttcttcttccttttgagcaaatactaaccatacaggttatgaaaagaagcctttaataatctgccttccttccttcttcagtcttttcatttttcactctagctttccttgaaatcatgtttttcaagataccgtttttatgtcaaggatacatttgttgtctcatctttaagttgtgttcactttcctgtattaattaatttttgtaatttaaacctttgcatgaatttttttagcctcaagctgctttccgtgagagaacactagagccggactgtctgggtttgcatcctcactgtcccaccagattgtgactttgagcgagtcacttaacctttctgcctcagtgttgtttgtaagaatagttgtgcctcctcataagtagacaggatgaactgagtttatttttgtgaaagatacttaatattattgtcttcactgtaatgccttggatttttcaagcttagcaaataccttggttaaatttgggtcaaaagagcaaaaatttacatgacaaaaatctatgtttttcaaaacttcctggtaaattcggtaatttaatccaggaaacactaacaaaggtgtttgatacttcttgaggttgttgagttacttttttttttttgtctttctgagatggagtctcgctctgttgcccaggctggagtgcagtggcacgatctcggctcactgcaacctcaacctcccaggttcatgcacttctcgtgcctcagcctcccgagtagctggaactacaggcgtgcgccaccatgcctggctagttcgtttatttttagtagagatggggttcgccatgttggccaggctggtcttgagctcctaacctcaagtgatccacctgcctcggccttccaaagtgctgggattgcaggtgtgagccactgctcccggcctgttgaattactcttgtggttttttgttgttgttgttgttgttattttttgttttgagatggagtctcactccatctcataggctggagtgcagtggcacaatcttggctcactgcaacctctgcctcctgggttcaagcgattctcctgcctcagcctcctgagtagctgggattacagacatgcaccaccacactcagcttatttattagtattttttaggtttattgtagagactgggccttgcagtgatgcccagactgatctcaaactcctggcctcaagcaatccttctccttctgcctcccaaagtgctgggattataggccggagccactatgccctgccctcatttacttacttattgtccccttttcactttttaaaaaataactctagagtgttcgaaaaaagggaagtgatttaaaatacacataattgtttggagagaaaggtgaaagaagatacatcatagataggaattgaaagagcatttaactgcctatgtaacccagatcagcagagagtaggcaattaaatgatcaactagtggttgagagaacaaagaacctttaaaatgcattttatggcaaaatagcaagctagcttctgctgtgcatattaacaaagtaaaggactggaaggtacaggtgcacagttgtttgtggccttggtgtacttataaatggtgctgtggtcactggatgctaacagctttgataaatcctgtaaggcagagcagtgagtgaatgtcttttacgtacctggcctcaggaggccctgcagagttgtgatccttaactggtcaattcattagtgagttaccacttaaacctctcttctaagatatcaccgtatctagaaacagcttttgggctagggtccaatgtaccacccctgcccccattttttttccctgtgagctaaaattattatttatttctttactgaacagttacaatgcaccacagaaatgcactaaatctcatcttcatttcctgcactgcgatcttgttagctgattttttttatcttgccctgttgtatttgcatgataggtggattttcattcagcttctcaacagtcttttcataccttctgttctgccaaggaaggatttcatttgattcacccttgaagcaattttatggaaatcttctgcccggaataagaacagactctgggtgggtgagggtctgaatgcacacaaccctgggaagccttgctcgttgtcctctgcccaagatgggaagggcctcttgccatgcagataaacaaggaggtctttcctgaaagggggatgcaggatatcatttgaaaagggcaactatttccctcctggtggttatgggagggggcacagtctctgtatgtcctaatggtatgtggagatgccctttataaaagctaggcagcgtcttacattattgaatagaagattttgatttctttggaaacacatccaggtaacctactgtattctttggtgaaaccaaaagcattgtgagcccttagaagatggttaggaggcataaaagctgtgagtctgcaggtgtgatgcttgtaaacagcaggaacttcatctctgtgttcgcaataagaaagtggatgtctgtgtgagacagaaagaggaaaatgggtctgtgacatagattggcaaggtaggcatgaagggaattttttttttaattcacctgccatctttgataaaaaggggaatatacaaattttagattcccaaacttttaaaagtataatttatgatagaaattactcagtgaagtatatacaccacttcttaaaaaagacttctgtgagtgcagtgtaacctctcaggtgattctgggtcagcattttgagattaaaagtgggaatcaccttcaggctgacccatgaactgtgccggagttttgggctcaaaatcaaaatactcgatgatgcagtttattttatgtgcgctcttttgttttgatttcttttttttgccagtaacatgcctgctgtcaactataatacccctcccaggtcaatgatggtgttatatggattagatacattaggagccgggaggattctgaggttaagaaagggtctgtaactaacccaaggttaagcacgtgataagtatcaaagcccagattaggcaaccagtaagtaagctttttataattataacattgcacagtaaatgggtttgagactgctggttaaataaggcaaattgaaaacatgttatctcttccccttccagaataccaataaaaatgacagtgaaggaatttaaaaaatgggcataatgccacaaagtaaaaaagctccagggagaagcagccgaaggaaggcagggtatatgaaagcaggtagaagagcaagaccactcctagtagattgagagagccggcctcctgcgtcccccatcatgggtggtcacgggaagagggtagaggccatcaagaagtgagtcaggccatgccacagagccaggcacccttggataagggcttaggggagtgaaaacagggctggttacatgctttataaaaggccagattctctctcctccccctgtagccagtttactatttgcccctctctcaggtgggaaataagatttattctggagaaatggaacaacaggcccagcaaagggcaggactaaggcacttaactaaagtgggtacttagtgaaagtcaacacaatgaggtgctcagccccaccccattatttgggctcaatatttctagacaggagactggaggtgccttccctgggacactcactggcccaagaagaagatgcacctgtcttatggctggaccctgcctgaccagcctaacaaggcacagctcagagatgcggtagggtcagtgtcagaccacatcaatatgatgaatattgtaataaagtgagtcgcacaatgtttttggtttcacggtgcatataaaagttgtttatactgtagtctactatgcagatagtgctatatctaaaagaacagtgtacatatcttaatgtaaatgcttcattgcattagccgggcgtggtggtgggtgcctgtagtcccagctactcaggaggctgaggcaggagaacgtcgtgaacctgggaggcagagcttgcagtgagccaagattgcgccactgcactccagcccgggcgacagagcgagactctgtctcacaaaaaaaaaaaaaaaaaaaaaaatacttcattgctaaaaagtgctaacaatcaccgagccttcagcaagtcaacctttcttctgatggaggatcttgcctccacattgatggctgttggctgatcaggatggtgggtgttgaaggttagggcggctgtgacaatttattaaaacaacagtgaagtttgccacattgattgaatcttttttaggaaagatttttccgtaacatacgatgctatttgatagcatttgacccacagtagaacgtctttcaaaattggaaactctgccactgttgaatctaccaagtttatgcaatattctaaattctttgttgttatttcaacaacgttcacagcatcttcaccaggagtggattccatcaaaagaaaccactttctttgctcatccataaaaagcaactcctcttctgtataagtttgatcatgagattatagcaattcaatcagatcttcaggctcaatttctaattctagttctcttgctatttctaccacatctgcaatacttcctccagtgaactcttgaatccctcagagtcatccacgagggttggagccaccttctaaatttctgttaagtttatattttaacatcctctcatgaatcataaacgttcttaatggcatctggaatgatgaatcccttccaggtttccaattttatctgcccaaatccatcagaggaatctctatgtatggcggctatagccttacaaaatgtatttcttaaataataagacttaaaagccagaaatactctgattcatgggctacagaatgaatgtggtgttagcaggcatgaaaacaacagtaatctccttatatatttctgtcagagctcttgggtgatgagatgcgttgtcaataagcagtaatattttgaaaggaatgttttttgtctcagaactagtactcaacagtgggcttaaaacagtcagtaaaccagggaggctgaggcaggagaatggcgtcagcccgggaggtggagtttgcagtgagccaagatcgtgccactgtactccagcctgggcaacagagcgagactccgtctcaaaaaaaaaaaagtcagtaaaccatactgtaaacagatgtgctgtcatctaggctttgttctgctgttagagcacagggagagtagtttggcataattcttaagggccctagggttttccaaatgatcaataagcattggcttcaacttaaagccaccagctgtgttagccactagcaagagagtcaagcctatcctttgaagctttgaaactaggcattgacatcctctctctagctatgaaaattctggatggcatcttcttttattagaaggctgtttcatctgtattgaaagtgtgttgtttatcgtagccactgtcatctgttatcttacctaaataacttgctggctaacttggtatagcttcactccatcagcacttgctacttcaccttgcacttaccgcgtggagatagcttcttaccttaaacctcatgaaccagcctctgctagcttccagtttttcttctgcaccttcctcacctctgtcagccttcatagaattgaagagagatagggccttgctctggattaggcttttgcttaagggagtgttgtaactgcttttgtcttctatccagaccactctgactttcttcatatcagcagtaaggctgttttgcttcttaatcgtgtgttctctgaagtggcacttttactttctttcaagaactttttctttgcattcactacttggttcactgtttggttcaagaggcctagctttcagcctgtctcggctattgacatgccttcctcactaagcgtaatcgtttttagcttttcatttagagtgaaacaggtgtgactcttctttcattttaactcttaggggccattgtagggttattatctggcctaatttcaatgttactgtgtctccagggaaagtagggcaattgatgagtgtaatttttgtctctttcctatattattacccccacggcactaaaacattttgaagcaggctatgtttgtatccccagtatttatcagtttctggcacacagttgagacatccactgttcaacatttgaataagtgaattaaagtggattaagtatatttggaaggctaaataatggactccagaggtgtccaggtcctaatccctggaatttgtgtacactccctcatggcaaaagagactttgcagttgtggttaagttagggatcttgagatagggagatatcctggattatccaggcgggacctggctgggacctaaatgcaatcacaggtgtccttataaggaggaaaacagagggaaatttgactacagaagagaaaggcaatgtgaccactgaaacaagatgctagactgcttgctgtgaagatggaggaagggccatgagccaagaaacgtaacgaatgtaggtctagaagctggagaaggcaaggaaatggatttttcctctagagctgcccaggggaatgcagtcactccagaaccttgatttttgcttattgaaactgacttctgagctccagagctgtgtgcagtaaatggagttgttttaagccagaagtttttagaaatttggaaatttgttacagcggtaggacatgataggtctcttgccatgtaagttccaatagatatataagttctcagttttataaatacttcaagaaattgtattgctccggtcactgagagaaatgcctgctgcagcctccaagatgcttcacactgtcttatcacttcctggcatgaaatgagctacctccttgtttttatttcgatattcctgcttgaggtcagatataaccattacttttggacaataccagaggagtctacttttaggtcagtgattcaagaacagtttattaggcacctgtcatttattaggcactacaacactagggccttgggatgcaaaattggaaggatttggcctttttggaggtgaggggagtatttccagtggaaatgatgtttggattgagtcttgaatcatgagtaagaagaatgtcaagtgaagaaaagtggaagacattccaggcagagggagcaggattggttccatgaacggtggagtgtgcttccctagacctttgtgagtcaggggatttgtgagagaagagcctggaggaagcttgggatgatatcactgaggaatgtaaaggagaagatgggtaagtagttggaaagatagaagatagacattcatataagtataaagacagagacagaatcaagctggagtcttgagaaacactcatgctgtaaggagaggccagaggaggagccatgccagacacccagaatgaaagaccagaaagcaatctcacctggaagggagatgccatagtagtggaggagtagagggccccagccaagaagtgagtggccactagtgtcatatagcagacagctccggcaggaggagacctggaagatagttgaatttggcaacaagaacttgagtggagctatagcatggcagaaagtttgatgcagattgaggattaaatagtaattaaggaaacagtaatgagagagaaggatgatgacttgaggaataggtactgtccccactgacaggctgtgggggagtgaaatggtcatggcgtctgtctgtgcagaaggccccggtccatttgcaaggaccactggcccttccccccatcgactctgcctccctccagtttttaaaactgaaggtatattttatgtacagtaaaattgacttttctaaaatgtgcacttctgagagttttgagaagtaaatatggtgttaccattgccacaatcagtgtagaatagctttgtgacctcagaacgttctcccatgcctcctctgtagttggccctttgctctcccttccagcccctggcagccatggctctgttttctgtccttgtggcacctgctgagtatgagagcagtacacatatgatcattttatgttgtcatgtattagaattagtgatttgattttcttaatctggggctctctatcttaccataaaaggtagttttatgtatttacttttgtactccctacaataatttgaaattcttttggatcttgttatggggctcatcaaataccaaatatagaattgagtatttttgcaagtaactttttgaaatgtgttataagaaggaagcttttgtcttatgactgttgtatttttgtgtgctttgttaatatttttcttaatgcatttggcttatgatgcatttggcccattgagggaaaaacgaaagttattgtcagcatggttaactaactgcaactgagagtattccaaaatgatttagttttaagtttaaaaatgcattttccattggatctactgccatgggtccagtaatcactaatgccagcttaatatagtgacagtatactacttagtttagtagtctgaagtagacaattaacttttagtctatgttttcattgaatatcttttttttttttttttttgcctgcttctggatcagctcttcttaaaaccagatctttgtttatgtatgcttaatgtcactggagctttttatgtttgtaatagttaccttagccattatcagtacacaatacagccatgcatcgcttaagaacagagatatgttctgagaaatgtatccttaggcaatttcatcattgtgcaaatgctgtagagtgtgcttacagaaacctagatgggatagcctgtacgtctgtggtattgcatattactcctaggctacaaacctgcacagcatgttactgtactgaatactgtaggcagttgtaacacagtggtaagtatttttgtatctaaacatagaaaaggtatagtaaaaatactgtatgaaagatcaaaagtggtacacctgtatagggcacttaccatgaatggagcttgcaggactgactaaaatccgctctgcgtgagtcagtgattgagtagtgagttaatgtaggacattatgctactgcagactttataaacactttacattaggcaacactacgtttataaaaaaatttacttaataattaaccttagcttacagtaacttttctactttataactttatttttttaacttttttactcttttgtaataacatttagcttaatgcacacattgtacaattgtacaaaaatgctttctttgtatctattatttctcattctgtaagcttttttctacttaaaagaatttacttttctgaacttttttttggctttgagtaatatgttggattcccatgtaatgacatctgtaacatcactagacaatagtagtttttcagcctcatgataatctcatgggaccaccattggtatatgtgttgcgtcgctgaccaaagcagcattatgcagcataagggatttattacccactaaaacaaataggctagtttccttttgtgcaagtctaggactatataccatatcaataattcacctttcatctttttttttttttttgagacggagtcttgctctgtcacccaggctggagtgcagtggggtgatctcggctcgctgcaagctccacctcccaggttcacgccattctcctgcctcagcctcccgagtagctgggactataggcacctgccaccacacctggctaattttttttgtatttttagtagagccgggatttcaccatgttagccagaatggtctcgatctcctaacctcgtgatccgcccgcctcggcctcccaaagtgctgggattacaggcgtgagccaccgtgcccggcccccacctttcatcttttaaaatagtttacttgctgcttctacccctgactctaaagggaaataatgtcagtactaatcccatttggttgcaaacagcaaataggtaaatgatttgccttttgaaggtctagccagtgttcattagtggctttggatagtgtgtgttctgagtgattcaggtgctgttttcctttgctgatctctttctgttttctactttctcagcaacgtttcttattccttcagaaatcattgtggcaagcattggcataaccaaaagcctttggaatacctataggtttccttcaagtttgcagatgttccctgtattatgtttctttgtagccaaaaccttaagtcagggtgaaaaaaaatcgattttttgaggctacacctgggagaatggacctggcagcagttcattaagaaataaatgaataacacctggaggtttgcgtttaccacctgctcacatgaatgattggtgtgatggggctgctaaaaatagataaatttttaagctgcattaataagcatttgggtaattgctcccactattttgtgtattggaccatatcttgaatgttgtgttaagttcgggtcatttcagaggaaacatttaaaaagtttgaaagttgcaatgagatactttggctgcttttaacagagctcacagacaagaaaccagcagtctaaagggagttgctcacagagcagtaagcttcatgtcatttgaagggttcagaatagagtatttgcttcataagtagcggctattttctggaatgttctccccatgttcccatggctgaaacaatgcccacacatagtgattgcacatacgaggaagagacaaatgtgaccatctcttaggaaagatgtcctggagggatccgtgtgttagatggacagtatggcctcaggtgccaccctttccgtgtagatggaccagtgattttatgtgaaagcaatgattagctgatgacattttaaaccaagttataggatttgtggataaaatttgactttagaaactaactgaccttttgtgtattttctgttgctaaattgtgccctggactttatgaacattataagctttataaacattatgctgttttagcgacattgtaatgaaaaggcgatcttagctacaccactgatcaccaagattaatctggctggcttgtgtggctacttaggtcatctctggtgccctcattcggtaaaagatgatgactttcccagacggagggaaactgttttcaatattgattctacaagtagccatgttcctcttttgacagtttctaagaatgacaatacctctttctgatgatgctattcacatgatcacaaaataacaattttgggttagggaggcttttgctgttcatgaactagtgaaaagcagaatgagaggaggaagtaattgaaaatgagatgtaggcgtgcatccgaactggaaaccagaagacttgatgaaacagatacaaggaaatcactgtgtatgagctatgtggtatttcttcagagatttgatacacaaactaagagatatccatcctgctctttgttcctttttcattcttttgatgccaccctctctcttccattatagagcaccaaaactactttggaatagatgaaaaccttggtccagtagcagtcagcatccggagagagaaggtggaagatgccaaggagaaagaaggatcccagttcaactacagggtggctttcaggacaagtgaggtaatggggctgcttgccgtagttattgggctaaagtctaaacctcctttggtgttactgcttcagtttgttttagatagggtactgaatttattttttttaatgttaatgattgcaacatttaagataattaaaaagggcattgcagtattttattctaaatgaaaaatttggaaacatgccatggatattaagtggctgtattagttcattctcacactactataaagaaccacctgagactgggtaatttatgaagaaaaggtttaattgactcacagttccgcaggcttaacaagaaacctgactgggaggcctcaagaaacttacaatcatgacggaaggtgaagtggaagcaagcacatcttatcatggtggaccaggacagagagagagtaaagggggaagggccacacacttttaaaccatcagatcttgtgagaactcactcactgtcatgagaacagcaaggggaaaattcacctctgtgatccaatcacccctacgaggcctcttctccaatttgacatgagatttgggcagggacacaaatctaacccatatcattttgcccccggcccctcccaaattttatttccttctcacattgcaacaattattccttctcagcagtcccctagtcttaactcactccagcattaactcagaagtccacagaacaaagtctcatctgagacaaagcaagtcccttccgttgatgagcctgtaaaatcaacaacaggttagttacttccaagatgcagtgggggtacagggatgggtaaatgttcctgttccaaatgggagaaattggccaaaacgaagaggctacaggccccatgcaagtccaaaactcagcaggacagtcattactacccacgctttgttacattgaggacccaggttagattcttgcttgtcttgcttttagtggaaagtgagattcttgtataaattatacaacatgtatagctaaataggtagatattgatttatataaagaattaagtctgaagctgggcatggtgacacatgcctattgtcccagctactcaggaggctggggtgagagcatggcttgagctcaggagttgaggctgtagggcagtatggttacacctgtgaataggccctgcactccagcctgggcaatatagcaagaccctatctcttaaaaaagaaaagaattagatctgtccagcactttaggttttatccttttagctcattttaattagagggatatatatttgggagatattccagaatatgtattttggttaactgcttctagatcagagaaaacacagagcccttttctagtttccagctgcatgaacatgtgtacccctgttcatcttatctagtacgtaggtgtcccagtgacctaggctctattctaggtataagtgagataaagcccctctcctaaagtgacatattttaagttatagacctatgctgttcagttcagtagtcactagccacaggtggctacttaaattaaatttaaatacttaatttaatttaaatgttaaatttaaaataactgaacaaaattagaaatccttttccttagtgacattagtgatttcgagtgtttaatagttgatgtggctaggggctcctgtattagtatagatagagaacattgtcctcgttgcagatagttctgttgtccagtgttatggaacattatgcaaacgttaggtatccttatgactgccatcaccccagctcctggtgttagtagtctaaggactcttaccagagtcagagagaggttggattagaaccagttctcttgatttatggttctggggttttctctctcatcatattagatcttaggcacgtgctccaaatattcattgcatgtttctgtggtgaatttgaggacatctaaaaagtcatgagacaaaatttagtggcaattttctcagccctgaatcaccctgcccatggataccactggctgctgctcccctgttcagcctcgggaatggtcattatggaaaattaaatgtaagataagaaagggagtggaagaaaagaagatggagagatgggagaaagggaggatggaagaagggtgatcatggtcaggtccaggatcatcatgtctggtttcctctctgtgtgaaccttctcatgtgggttcagagttgtaggaatgtcctaattttcatagcattgctctgccttgcttcttctcattcttaggcatacatctgctcatttccattccgcctggcttgttcctgatctttgtatactgttactgtttaaagactccttgagtgttgattttgtttccttaaatggaacactgtcgcccctttcactacactcagaaagagccttgcttctctttttcctgtcttaaggcagccaaacagttaggctgtgagtaggtaattgagaatcaatattaaccgaagtcttatgttttgtcactgcagcttacaacactgagaggagcaattttagaagatgctataccctctactgctaggcatggtaccgcacgaggactacctctcaaagaagttttggaatacgtcattccagagctgagcattcagtgtttgcgacaggcttccaactcacccaaggtctcagagcagctgctcaagcttgatgaacaaggggtgtgtataatgtgagattgtatgtttgtgtgtgaatttgtgtctgtttctgaaagttttggagttttcccatccatctttcttgtaagatcatttattttaaatgccttagaacattttctctttagtttttcccaaatatgtttttatactagtttggaaacatgatgccattatagtataacacacctcctgctgagttgtgatttttttttgttattaccaaggttttggtgtgtcccagcttgcaagagtgcatctgattgcatgattaatagaagtcaatagtagtttttttccagggtttaaaaatctcttatggcccttttcctgaaccaacatttattcttgtctactatgtggaaggcatcatgctgacagatgggtgtgaacagcaagcgttaggaagattgaagctgactaagacctagtccctggcctatgaggacagtaagactaagagcagaaaggcctctccaaggcagaatctggtaagagatcttggagaggtgtaaatgtagtgagtaccttggggaaagaagaaataacatctggctgggcaactctcctgaagaggtggcattttaactaggcctttggacttggatagaattctaagagggagacatgagtagttgctgttttaggaactatgactagtttctttacaaagagaagagaggtggtgaggtggggtggggtaggggaagtaagacgagactagaacaaatgagacctggtatgctaggccaaggagattgcccttgattcaggaggcagtggggagccattgaaggttttccattaggatgtgacgtgatcagagctgtattttaggaagattattctggtagaagggaattgtacaggccgccgaagatagagactgatggctatgtggagatcaattatgtgattattgacattgtccaggagagagttaatgatgaacaggattgagatggtggttcagaatatggaaaaaaggtctttaagtttcaggtgcaaaataactcatagaggaaactgagcagtacatgctcaagtgcatgcaatttattttaaatcagtggatttgtttgtaaagccatgattttaaaaagacagtgacaatgtatatttttagaatttcccaagtaggattcttctgcatgttttagagggaatatgaggtatttcttggttgaccaaataatactgtggttaaagttgaatatttggcaccgcagatggctagaattctaaaagtgatgaaactaattggtctaacaagttaacactgcattattagcaaaaagaagcagatattgtaacactcagaatgaataatcttgagatctgtctcaggaatgaaagctgacatattaaaaaaaaaaaaccatactctaaacttgagcaggtgacttttaaattgcgtaatacacagaataggtttaccattatgactggtaaagtatgtggaatatatgaaatgttcatgaaacatatatatgaacaatatatgaagtgttcatgaaacagttgatgaaaacatgttatggcgggatagagaggatacatcggggtgggttgaaagtgcttaaagttcaggcaggcttgatgagaagaatagcattcatttgcatgttgtaagagagttggtgaaaagaaggtgccacccatgtggtaggtagttcttgatccctttgtaggatatgtcagttctccctttaaaatatatcactgtactacagagcaggtgcctggtggatgaagctctcatttggtcccccgaggctgctctagaaagttttacagatggttcatgttccccagaagccctcagggctctgccactgccaccatttagggcttcttttaccgagcagtgaaaagagacatcatggcagctacaagttgactgatgtaaccatcagtctctatcctcatcagcctattttaggcatcagtgaatgtggctacctttcttctactagaagaatcttcctaaaatatagctctgatctgccacatcctaatggaaaacttttgatggccccctattgtcttctgaatcaagtgcaagctcctttcgaatgtctttgtagtcagatagatctagaagctatccgaggcagttctaaaaaccaggcattttaagtatttttgctgaacacctatttacagtctgatgtcaatgaatgtatttagaaaatgggattctgctttgataaaaccacgcatttcgtatctctagtagtagttcatgggcttttctttagattttatatttgtttgactttggtatactttcttaatgatgttcaaacttaagcacactgtgccattttaactccctaaaactcttaatggtatcagattcccattgtacatgaggaaaacatactgtttatgttcatctttaaaagagattgggcaacttttttaacatcccagtttccaaagaatccttacaaatcgccactaacctgttagggtggtggagagtttattccaagcggtgctgtttctttattcattttcctaatagtaaatcttcccaggaagggatggggcaattttgttattgctctaagggtttgttaatcttgaaattatatttaaaatacaacctaataatgggctgggcgcggtagctcatgcctgtaatctcagcactttggaaggccaaggtgggtggatcatttgaggtcaagagttcaagaccagcctggccagcatggtgaaaacccatctctactaagtatacaaaaattagccaggtgtaatggtgggcacctgtaatctcagctactagggaggctgaggcaggagaatcacttgaaccgggaggcagaggttgcagtgagccaagatcgcaccactgcactccagcctgggcgacagagtgagactctgtctcaaaaaaatatgtgtgcgtgtgtgtgtgtgtgtgtgtgtgtgtgtgtgtgtaacctaattacatatattgttagtttccgctcttttgtagtttgcagtccatcctggtttatcatgtaaccactgagtatatgtactctgtacaagacacttttcagaagtaggagatactgtgggtgtttagatcattccttctgttccttcagtttggttagatgttttgagaaggaagagtcaaacactgtggagaattttcaggaaagtaattattaaacaagacgttttgctactttatctacataatttcacgtctgcagttctaaaatcccatttttcctttttaaaaaggctatcccaatgtatttaataggtaaactcataaaattatagaggatgactgtaaacaaagtgttatttagacgaattatgacagctcactatcttagaatattatgaaatccttaacagagttattcattggttcttaaggccaactgccccattcccctcttgtcctctcaccccagatatatatgtttactcaaatatcagatttgtttcaaccgaagtcaagcaggtctaaataaatgagattacatgcttagaacaagtagtctgagtcaggagaatggaggggaagggatttattgcacactcaaagatatgctcgagacaattctgaggctttgttttcttctcaccttcatttgaatgtaaattttcttgtcaataataacaaagcttctggccttggaaatagagcagccagtttttatcctgtctcagaaagaaaatgggacgtgggttggatcctctgctgtctgggcagtatgtatgtgtgtccagctgtcagcactgaagccatagggaattttgacaagtggatatttttagtttgcagcagtgcttatgtccaaatgcaagcctagttctatcccaggactgtgggactggcacagctcttatcaaacagttaaataaaggttgctgcaatagacttaaatgttaggcttagcttgagatttaatgaagccttggtctgagagaatgaggaatgttaagtgtatggaatctggagtccctcctttacttcatattatgatggagctgaagaagtatgttgctagccttctgatataccccgggagtatttagttgataccacatttcagttgttttccaggtttctgaaagagactctggtgagagagatatctttactgaacatttcattctgtttcattattcatttcattcttgttttactggaatcagcccttgttgtaaacaagccacaattctttactgtgagtcactggagagatttctgtctcctaagtttcacctggcaaactgatcaaaagtaggcatgactggcaaatacctgtgagtggtaaacttgtgtcactccatgtgtgtagcaaggtgttttctttggagccagagtatggcagctgtcctaagacatctgagggccttgaaatctgctttagtcacatccactgattcccatgggcccaggagcttcttagatggaaatgcaaatcctgttctagatcctgttaggatctagacacaggctggtgtgtccgatggctgggaagagaggggtgtgaagttgacagtacaacagtcagcaatgaggtctcatgaaatttcagttgtccagttgtttggcctttgcctgaatgagagttcacaagaaatagcaagcccacaaggctctccgagtcagagaggaagtgagccaggctggtgacggttctgcttgacataccatgcacaccctcggctcccaaacagctctactccaggactcctcatttaagagctggatgggaggagaggaaggggtttcctcttgcagatgccagagcagactgaggcaagctgcctttgcgtgctggggcaatggagacaaagatggccttcagatgatgtggcacatggcactggcaatggtctcaggtgagcaggaggtaaaggaatagaggatgggcgaacagggacagcagccaccagagcagagtgacctccgaggatgaggatgatggtgcagcaattctactgggtgcagaggaagcagtggacactgagatgcacaggcactggagtgagttagtattcttcggtattaacggtggactctaattacagccagggccaaataaccagggagctgaaatcctcttctcacagtgaaagagaagtcaactaacatcgttgtccatgatgggaagtggtcattttcaggccacattttagtattcatatagattccaacaatcacagatgtcacgaacatctgtgtaataattggtgatcataatagtttctctaatgcactttaagaccctgaaatgtcttctgagtcactcaggagcaaataatgtttacaataaaatgaggttaggcatttttattgtacttaatatttttttgaagatgattgtctattctcagtaaatgtggtatctcattgacttagataattgagttgatcagaaacattgattcctcaatctctgggtgaatacaaatttttcttcttgaccctactaaagtagtagctcaataaattcataatgttaggtattgagtagtgtatgcacaccatctcatatccccacactcaaggtacagatcatttttctcgctatgcagttggggatctcctggccttgacagggtcccaaggcccatgaactgcaatgccatagcatccatcggtataggtagctgattcagtcagattgtaaacaggtgatatttccttttatagccttctcatagcacttagtcaagatcggaatgcattcagaatatatgggtagttgactctacctgctcaactctaagtttatccagcatgtggtaaatgtttcctgatgtctgctgaggtcacccaggcagatgttgcatgcctttcttgcatagtatgttgtcattaggtaataatatggatgagactgctgtcatcattttgctgctcaagggaaatgagtatcattttgccttattttactaagatagctatgaattttgattaaaggttctgttttacagcttgataataaaagtgaacagtgttgtggattgatgtctttagagaattggcgatgtctgataatctgtcagcctttcaggctcagattgctggtagtaagattaagagctctgattgcatgagtgagaagcagttcctctttgggggacataagaaaggtgtgaaaatgcctccagtttcttactggccttgggaggaagtcccatggcttccaacatgaacctggcattgactgtaagataggattacagcaggagctcctcaattgctattggattctttgtggtacactgtatatttagcagatgttttcaagatagtaaaaaatgtaacaaatgaatgtaatcgtaagccagagttacttttttatggcaacaaaacattttaatgtttgtatacatatatcataatttccattggaatcctacccttaccagaccttaatttgatttgttttttccttatagtcttacatatttacaagaaatatataaaattcagataaagaaataaaaggtattactacagagaaaaacttaaaggtttgtagcctttttttctttccgacttagaagataaccctaattactatatgaagtgtgtaagatgaagtatttccacagttctatttttaagtagatacttgaaccttgacttcctatcctttttggaaacctggcaaatcccaaatggccacagccatacatttaatttgttagggtttctgacatgtctccagctgtattctggggtttctgggttattatttgtagcatctttcacagtggcagttgcctactcttttgcttattcacttatgggaattgttctggcatgctttcctagaacaattctcagcttctgtagttttaattttactggaagttagcttgtctgatatgctttgccaagtaattatatttctcccccatttcagctgagctttcagcacaagatcgggatcctttattgcaaagcaggccagagcacagaggaagagatgtataacaatgagacggcgggaccagcttttgaagaattccttgatcttctgggccagagagtccgactgaaaggatttagtaaatatcgagctcagctagacaataagagtaagtttaatgtttgtgtgtgtgcacatttttaattctccaaaggtaggcatgcttcataaatccaagtaagtgatcacatgccctcctgttcccggccccagaagcagcctagaaagcttatttggaatagagtttagatttcctcagatgaacaaaggaaacacatttctcaagaggtatgtgcttcaccttgtaagctcaaagggtcaattctttttcctttgtaacaccagcagagagattccccagtgtttcatgaagaattgtttaatattttcttctttcttttaccctaacctcttctattacacccttgtttcagtataccaaggacaagcactgcatttatttctaagagacaaaatattaacacatccattcatgctgtgttattgggcttattttgttcatttccagattcatgatgttaaccagggaggtggaacagtgattaaaaagcgaatgcatcttcacacaatatccccttataacagacttgcacatgtaccccctggatctaaaattaaaaaaaaaaaaaaaagctgatgcatcttatttttcaaggattttatttagatccccttgagtgggacacctactagctgtacagtggcggattgactgaccaatccaaaacatgggctttatgccctcctaggatgcatgaatttgtctaatatctacacatagataatcatgtttctcatgatgtctgtaagttctatatattttatctttgtgctgttatttagttgctatgagtatctgaaatagcaggcagagtaatttgatgcatattggaaaattctgcttattatcaaacaactaagtgcttgctctttgaacgaaaagagatgaacagatagtctaaacttggaggatctgaaggagcttcttgccccaactcccagtaggaatggtgaagtggaagttttctgtgtgggagcgtcagggtgtggccgagctgggattggaactgaggtggcctgatgccgtgtcttcctgccttctattctccttggtcaccaagccctgtccccaagtctgctcaacttgggactgtcactgatactccatctggatgagggtggtgcctatagtcagttctgtttttagacctgtttttgaaagtagcagttacaggatagttcacaagcctctgcgatggtgtaaactcacacatgggccccctagttgtccactacacacgccagggctggagtttgactgttacattatatgtataatgcccatgcctcagacataattcatggtacccaaaatatgaatatctatatattttaagaaagatgaatgagaccttttctgattttctttttttttttcaaactcctcttttctgcaaacaaccattcacccactagagatgctgatattctgtccttaaggatgtccctccaggaaaaccactgctgatgtgaactcttattactgtgattgtgtgttgtctctcttcagtgaattggactgagaaaacatttaaagaatttctgatctgtgtcatctgtaaaactacaacgtagataatccaagtattttcctacatgtagaattcacattggctttgcattttgatgacagaggccttatccttgatacattgcagatgtagtattaagcaccttagctcaaggagatgagaacgtaacaactagagtttgatatgttgactttaataataaatctgtaagttatttttatgagcaaggcattctgtgagatggcaaggaagtctgacattcttttagtagagaggagatatgtaagaattaggtatgggagaatggtcagataaaaattatgtctttcgaggaacagacaaaaatcttccttctagaatttgggggactttagttctggttagaagacttaggtcaaatctgggcctcagattcctcacaaggaaagttcaggatgttgggctagaatatctgggatttccctttcagctctgaaatgggttttctctcttgaacacaaaatgaaatgggataggaacataggggatttgagccactaaggtgctctgttaactagagcagagtacagaatcccagccatgaaaagcctttattgagctaggtgcagagaatgataaaattgatagcctgtatccctttttgaatagaaatatttatagcaaaccccagaacaacaagccttgttagtctacattctccattaccttgctgatgtttgacataaaaactttcagaatatttaattttagaaattcctcttttagtatggcttgagaaagacatattattatcacattttaagaagtacttttccccccgcaatgcatctttctttcttccttgcaatttcctaaatctgaaacctaatatcagtcagcatttctctttccgaatttgaaccaccctgacagcagtgttgtgatgggtgtcattgaacataccaggccttctcatcatccagcctttggttttgtcatcagtgagtccattattcattgaaggagcatccatcctgccctgagattgtaaactgtgcttgctcacatccagagccacgttcactgtcaaggttccgagccaagagaattaaaatgtaatgttactttctaagaagtcctttgaaaataacatatatgtgtttaataaatagttaaaaggaatttttttttggcggggctgatttatatataactttttggatgaatattctctccatctgtaaattaatttattggtaactatatgtaaacactaagtattcgccttattcatgaaaatgccttttatgaatgtcttttggagcatctaagaactctataggatattttttctaaagagttttcaggtctgtttctgaattggatatgaatattagaaagacatactacagggttcagaaagaatataataagtccgtgaaggttgaatgttttcgtgtttttaaagtaaaaatttagatttttagattaaaaaaagattaacttaaaatgactacttagaggtttccccaacaaacacaatggaataaatgatgttaacaacactgtttcttgttgcttaaaaagtagagaaataagactgtatagatcaagaattgacaaagaaattgaattccatttacattttcctttttgtgtatctttttgtcttcattatccatgtgcaaaaagtcattcagaactttactccaaaattacttaactattttatagtcagcaggttagtttcaatgtgtgaaactcaatctgagatactcttattgataatacagatggagtttgaatttacaaagaatcattctccttttcaaaagatgaacagttttatgattaataggggttcaaatgtcatagttttttaacatatatgtcactggataatattctgtaagtgatcacattcattctccatattcttcattcatgtgatgtatcaatgtacttcctgttgaaagaaaaaaattaattacattcagggaaagacatattcaaaataacattttttgttctcatttccatattcaatcaatcctatttcatttttctgggttctggaagatcaagtgccaagaataagaattaactgtaaacacacacacacacacacacacgcacacacacacacgcacacacacacacagatgcggccaggccatctgccagtttgtcacgcccttcagataattgcacccagacctggaccagcttctcttctccactgctcacctgtgcacttggtggcaaaaacacttcgctttcagtggatcacctaaatccacactgtgagggcaagaacagagaagaaaagcgaggaaactaaaggtgcagtagaaagcggtggggaaggaaaggagcctctcagtccacagtcctggagcgggagtggtagaaacagtgcttgatgaaagctggatgggcagcatccagatactggttgggtagagcttggtgttttttgttttttgtttttgcaacagtaaccttttaaatatcgaagcactaattttgtagcagcttaccttgcttctgtaattcatctttgttttcagctgattccacgggcacgcactctctctataccacatacaaagactacgaactcatgttccacgtgtcaaccctgcttccctacatgcccaacaacagacaacaggtatgtcctccccagcctggagctttttacgctgagtatgaaatctgaggtgggcccactgatgatattgatgcatgtagaacttgcaaagaatcagtgagggtttttcttgaatagcattaatcatctttgactctttgatcatttggaagtatttgggctttaaagggcgtattgttgcacttttttcgtataaaacttagaaactcttctgcactcagatctattgcttgctaagcaaaatcttttctcaggagaaacttgtctcaactatatgttaattacgaaaaggccaaccgtgttgacctgacttcggtttttgtgtgtgggtaaatagcttatttatagagaatactgtttgcagttgttactggtgctattttcagctgttcctctccatttcgtttttgttgttttaaatggatttattggccaaaatttcttgacctttttaaagagaaaaaaatcagagtgcatcatgctttgactacagccactcagtaagaattaagaacctttgaaaacttgaatgatgcataaatcattgtaaaataatttactttttggtataactttgagtcaagccagttttttttgcaaagattactagaaattatggccatttttatcttacgctagaaatagttgaaatgctttgtctactgtgagcttgagaagacttggaggatcacttgagataggaaaggacctacgtttgggatagacgatctatgggatagctaaggctccatttcacatcttgtttagaatcttctgggctctgcccatgttaagctgaagattttttgaagaatattgactgcttgagtttctgaatatttgtttacagaaaggtttgtgaattactaggatcttataactgattcattgacataatttaattttagggatttgattgtatttaggttaaatccagagttaaagtttgttttcacatttaggagacagttctctgaatgtcacttaactgatactcctttgctctaaatatattaaagcaccaaggactacataggaatagctcaataggtatttgtcaaatgagtgaaatttaattgtcacagagaatttttcctttttaaaaaagactcataaaagtatataaatttagtctaattctgcattttttcccaaagaggaaaccagccaactacctccccttctcccatcactagttggaagaagccccttagcctcagatcctccagctaggatgagaaagcaggcctctgacccccagtctcttctcatggtaactgctagctggattttcttgccattttccatctcatacttatctcaatcccttgtcctttctgaattttctagtgttttctaataatcatagttcttcctaccaccttcaaaaaatctatctctgtattacacatctgtgtatttttaagcatagacttaaaatcactagatcacatgtatgtatttatgtatattttaacctaagggattttagctctcaagaatttatttgcaataatgccgagcagattcactggatcttaagaggcttaatttagaccaggacagttgtccagcaaatacttgtgaatcattcagtaattaaactctgtgggagttgttgctcagaaaactgataggggttactcaagccaagaaaatctgtcagtacgttagcagaaatagagccagtgacttttgacccccgtcatcgagtattcaaaccacaaagcctttccagttccctgattacttgagtcattggacttcaggctgaattggccctggcatttcacatgtggcaacctccagagatttgaagtctttgcttttaccacaactcaaaactggctttcccaccccctttcattgaagcgtaatcaaaatctgtaggcattcgagttttatgtacctgacttcatttcactgaaactagccttgaaaaaattgtatgcgcaaaaatcaggacagcaaagcagtgaaaatgtagatgcaactgggggatagaggaggatgtgtgtgtgttaaacttccccaactggaaagtaaaagaaaagtccctgtaagttgaggctatacattccaaactcgagaaagctgggatttgtatctgttttgttccctgaagtgtccctgtgtgcccagaacagtatccagaacatggtaagaagtcaacaaacatttgttgaatgaataatgaatgaatgagtgaacctttcttaggagatagagaattaggcaaattaatgcatgtaaagcacttaaaatagttccaggcatggaactaagttttagttgttactgttttataattcattagatatagagccagtcatattttggatgacctaatttgcattttattttcctgtctccagtcctaaagatctattatgaaaaactaagactctgaatggttaagaaagtgagagactaaatttatcaattatttcagaaaattattttttgacatttaatattttgcaatcacaggttgtcatcagaatgttctgtttgtggataaataatgccacttgcaatctggggacatgtgttttccaaatttgttaatgagttgtattgactccatttctctcaccctcaccatccatgcccacaaattatgttaataccaaaggtagaaatgtctgaaatgaccagctgggttcatgagtgcaatttgaagccacaggacttagcaaagttaactggcccctacatgaattgtgcctgtaaccttggcttcttacactacagttggtgaccatttaactggtccagactcgtccacatcagatctaatttcttgtgttccttcttgtaataaatcaagctggatgccaattccaagatgtattaaaagtcttcagagagtttaccacagttgcaaaagagctttaatctttggaatggtctctgactcttgcgtagaaaaactcaccagaccaaaagaatgataagaaaccctgctcttggagttattttctctcttcaaaagttaagtcctgcaagtctctctgcatctgtctggcagtccatccactttttccagggctgtcttcccctgtgtgctttccttctgcttgccctggagacaagtcatggttaagccatcgtgggatgtcatcagtgggaagagcttcacaaattagctttaaacttcactttggcaacgaaattttttcttcaaagtagtcatataaagtagaggtgcctcagtgcctggcacacagtaacctattttttaatgtatgcgtaacattttagctgctgtgttgggaaggggtacctgacgcctcgtggaggtatctaatgagtaagaccaagcccctaggtttctgagatgctaattaaaggatactggtcttcctctagtaatgggcttgacaccaaagaggtaatgatgttgtatttgggctaagcctggagcccttttctccatagtggatagactgattgtaagctcctgccttaaagagtttgtgtacttccttaagtccctagttggtgttgctaaggactcatgtaaatactggaacaacctacctcactaagtgcgatgagccttgggtcctgcctatacttgggttcacctatacataatactatagaatattttggaaggataaaatgcttacttagctttccatgagtagctttattcccagaccctaagtaggagcatatacttatactatatcacaaagattgttacttagagtgagggttggtattgcctagtgacagaaagaagaaagagacatttatatcttcataatcctgttatcatctttactttgttatgaagtcattaaagatctgcattcttagattattttgtttcttcctttgcaaagtgttcaatatttcttaattcgtttgtacatttgctcttgttattggtaaaatatcataattatatgaaatgataaatcagtgagaaatccttcaaacattaattaaatgtaatatcctgttcttgcccatcagaaatgagaacagttcactaacattcacttttttgcaggaggtgggtgagacttttctttcttttgtatttatgtggtaaggtgtatatgttgcccttccttagttattatttagaatgcttttctacattaactttttccgtaggaaactctatacgcctcttaaaaatcaaggcataattctaactactggtgcaaactcttgagtatagtttatttgaggggatatgtgtgtttatgtacatgcatatgtatgtataagtgcaaaattagggccatctccctaaaagaggaaaagccaaccctctgggtgaaggggaggagctttccaggcaagagattaggaactgcaaagttccttgggtgggaaccagttgttctgtaggagggacaagacgctgtctatatggtaaggagcaggtgatgaggtcggagaggtaggaagggatcagtcatgtcagaggagtctttgtcagccccctttttagtaacaggatttagattcaaactcaaggaccaggactgagaacttgtgtgcgtttagagaatatggatttgcttctttctaaagaccttctctggagacctgcagatgaccttcctcttctctgactcttatgagcttctgaatcatatcccggctgttctctttcatgttgtacagcctgctttcccccagcattgggtgcaaaacagtttgtttctgtcttactgggtttaaaataataatttaacaaatgaacccatatacatagaggctagcagatactgtctaattcagctttcatttttcacccaagtgtgctgtctgatacttattttcacttcctggcttttttcttctcagtttgctttttgagttttttcctctcgttaaaatttttttttttactgatatataatagttgtacatattttggggttacacgctgtattttgatacctgcatacaatgtgtattgatcacatcagagtaattggcatatctgttaccacaaacacttatctttgtgttgagaacatttcaaatttttttgcagctgctttgaaatacacaataaattgctgctaatgacagtttccctactgtactgtcgaataattagaacatactccttctatcttactgtatttttgcactaagttaaaactggtcttgtgagatactggtttgtttaaggaactgaggctaaacctacggccatatatggtatttctgtagcatctatatgcttttgccatggaattgggtgaagactcacattttctctttccttgtcataacaagagcttattcctgtttcacagctggaatcgagtgttagaaatttagtagaaatgactatgtaaatctatctaatacaatatttattaactcactgttgcagttgaagacactaataagttggttctcttgacatcactgaaaattgtcattagctttacatacctagaaagaagttcgccccagaagatgtcattcctacaattccctcaaacaaatagtaccgtcaggttttgccagcctgcgttcgtttgtggtttgccatcccttttccccattcacagactctgattgtatagaatttcattgaccagttagaaaaaagcataaactaaatactaaagaaaacatttgcctttaagaagttcaagaaattacttatttcatgtttgacaaagtcctaaaacagaaaaatgaataatatttctgttaattttccagatattttctttagtctctgaagcaaattcaagcattctattaatggatagtgttcatttttcttattatattctccttcaaagagctttagattttacccttcctaatgaatcttcttgttcccgcctccaatcgtttatttttttctacaaagtgcattatgtggccatggttaaattaactagacttttgaaaacattttttggcccattttacaaagcaaaagaatgtgtctagaaagggacaacagtggtttggcatgttgtcaaggtaaccagactttaacttgtgctttaacttgtgctttaaatagtcctgtggtgaagtatagaatcagacccatcatgttccttcaggaggaaaagaaattggataggaataactgtgcaatttgctgttgcagtctcaacagccatgaagcactgactaacaaggccctccctgcaccctgtgtttaatggagagggctggccaacatgaagccacaccggcaatcactcaggaagtaggaggcgctgaactcactgcctggccttggccaaagtgagctccatcttttgacagtctgagaattcctgtgtttcaagggcactgaataaactagagtatgaactgctgtgttttgtagtctacagatacattgaacacaatgatgggcatatttttaaaaactattcctgatttttccttgtctcattacaatgcctatgaatcatgtatttcaatttttggagaaaagagtaaagaatgtccttgccaaagatagttttcactgattatttacatgcatttgaaatggcacattttaaatatctagcaaactttttaaaaactacatatttaaatgaggtggctcattgtgtctgtattatgatgtactaatgtatgtttccagacttcactcagacagtaagatgatttttgtgtgtttataactttgaccatggggatttaagtaggaatttctcagcatatgaatcagcagtttaactggcctgtagaaaactctgaaagaatgaacatttcattcccacttttccaggccttttatcatgctaaatcacaagtcagggacctgacaatgaaatcctttttgtatctgagtttaaaaggctttaaaagttgaacttaatggtctttacttggaatatgcgctgtaggtgccaaataaatttaagggtaaggtcgtggtctttcatattgctagtaaaaagagatttactatctgagattgtcacattccagcaatgacatcaccaagttgtgtaaggattgttgtatgtattaaaactgaagatcacaaacttttgagagcacagatctatgccttcacttgcataagcttaccgagtgcctttatgtggatttattggcatgtgttcataggaaagaagtggtcacaattttaatgcataatgtgatgtgtcagtaagtgtatatttggattatttatttgttaaacaaatgtgtattgggtacctcctttgcctggcacaccattagaaactaggaaactgaaaatcagtatgacacttctgtgccctcatgaaggttatgacctgatgcagaagaagtaaaccaaccattaggagacagtacaacaaccagtgtaatagaaataggcccgggaaataggaagtttccttcagatgaaatgggatctacagagacaactacattgtctgggagaaacctggagggaagggggcattcttggcagaaggaacatcaaaagtaaaggcgttggtcaagtgttactgctctgagcatcattccccctgccagatttgtgatttataaaattacgaatgattgggcttctggttattaatccagttgaattctgtgtttctgaattgcattttaaacggccagggttcagttaattggtttgtattattgctcaccagaatgacagtgttctgtatttttgttgcagaaatgcacgttactttactgtgggagcacaggatacaagctgaagcccgccggtgtgatagtgtaggacttttcagcaaacctgtaccctctcttggactttgtcttctagagcttaaactacaacatttctcaaagtgttgtgagctctaacatgctattattttaggggtttaaaaagaggaactggataaagaccaaaaggagagagagtacaaattgaattttaaaataaaagagataaacttaaatatttaggcttttctttccacgggtcttttggatgaagcccattttgctttttctatgccaaatttaggagcactgacttccaaagaatgactgtgctttttaaaaatcactccttcaaattgaaagatgagtgaattatatatatattttgttttaaagaaaaacttatttgtaactcttcactttcttgaccacagctactgaggaaaaggcacataggaaatgacatcgtcaccatcgtcttccaggagcctggggcacttccttttactccaaaaagcatccggtctcactttcagcatgtctttgtcatagtcaaagtgcataatccatgtaccgaaaatgtgtgttataggtgagtcagtcatccctgatctatcattctcccaggtttatttcaacagggcgtcttttcccaaaaatatctttgtttgccaattattatttgcaactttgtgattttctaattactcagacactttctgtaagaaataattgccttcttcccattttatccccttgaaaaagtgaaatgcctagcactttaaaatggtggattacacatttcctctgtttttctcctaaaaacttgagccagaatcaatagcttaattggtatcctcctctgagttggatgaagtggctggttaagtgcttatctaggagaagtaagtatagtggcagtaaaacatttcttttcatcaaagatcttggatctttgcagggctgctgaaacaagaggttaacacttgttgggtgacttcaaaaggccacatgcgtgccttggaatcccaagactggctctgacaaggcctgcttttatacttaaccactactctcagactctgtcttaggaaatcttagggaataactgcagccaaatgatcatatcatgtggggtattggtaaaacaatgggtctttgaccagagtttgaaaccagctttaccacttatcatagggctttgtgtggcttactttatttttcttaacatttgattcctcatcttaaaattgaagataatggtaatgatagtacctacttcagtatgttgttatgatgaataaatagcttaaattatgtaaaacacctattggagttcctgacattcatccaagattattttcatttatcatcttaaagcagtagttgccaattcagctgcccactgggcctagttcagagacacgactattccttgtaagaaagtgaagactacagagcttgcttcctaaaggcacaagagaaattagtctgtatttgagaagttgccattttacatcccaccctacagatgcccaagccatcttagaacaaagtctgaaaaccatcagttcttaccctgaattttacttcccagtcgccttattaaacatagccctagtctatggctctactgtgctgtgttctaatgcagtacacctgtcatctctatacttccctccatagtcattcttacgcacatctgggtttcagaccactggcctaaatgctcagaactactttttaaaagtgatatttgaaagaatatagtatctactctatacaaatgataggcttaaaatagataatattggtacaaacctggtgagttggcctttttttcctgggagctcatccagcgaatggtaattctgaagaataaaatgaaccttcctaattggattgggaaaactgaagtataaggctttatcgtattgtatttggtgttattttatgggtggctatttttaggtcaaatggagtactttaaattacttgctatctttatgcttatatcatgaggtaattcattagcacaaaaaattgtaaagataggcaatacctgttcaatttatttcttttaggttttccggttttaattaaacaactctgtttaattaaaaaactgagttgtttaattaaaaccagaaaacctaaaagaaataaatgtttttgaatctaattaaatgttttgaatgtatttaattaatgtttttgaaaacaccacagagatctcttacatataacaaagtacattgccttattttttctgtgataaagataccatatgccaatcattcagagatggagtcattggtttttaagaaaccacattgttattactaaattaacctttactaatgagattcaaatgcaacatcagttcaagtgcctaacatttttggaagtgcctcatcagcttcgttgatcttgcttaaaaacatcactagtatttcttgaagaatcaataataatcttgagtaatcctgtagtcacatgaattccataacattttatgaagctgtccttactctatctcatgaaataaggttggcatgcccacattttctaaaaacaccttattggtctgtttcatgtgatactcctctaaatattccaatggagaaataaattcattaaaataatttccaaggaaatggtatagtccagctctacagttttcttaaattttgctatgtcctaatccagagtggcaagctcccgtgaaagctgtttttctcctgagcttttttcgggtgttgagtggcagcgtattcttgctgacgcggacccacggtaccaatgccaattcataggccttacagctgtcagaaggggctgtgcggttgagatcaccttctctaatgaaaatcgtgcagcctgtcaggtgtacctgcctgagcagaagaccacactcccaccctacagagggagtcaggcctcccccatgagcgcagcagaatgctcgagcagttatgctgggtccactggaactaggagaaatgaggcaacacccccagagccccacgaaacatctcactttcagcctgaaaatatttaaaaagcagacataacaaattgcctatttctttataaaagactctttaatttgtagctaatgttaagctgtcaggcatttatgtttttatgtactttccaagataaactctctgcaaaatgctcagtaacggaatgagagaagtcttggtagctaagagtgaattaaaagtggagagatacctatagaaaatgatgactgccattttttagaaaatctaatatgtaacatcttctgacaaaaattaggtgacagggttaaatcatttattaacacaacaactatgatagtaatagtgacagtaacagcaacaatttgggtaataaaagctttacatgcattattttctatcatccttacaatgggcttttgggtatgatactattttaccgtccattttacagatgagggcagggaggcactgaaggattagtgtagttagctcagtcactcaggaggtggtagagctggattccctgactccgggagttacctgactccagtttgctcctcacacctttctttattgtcctttggccagcaggccttgttaaaaccctttcatgtgcatattaaggaatgcttatctttctgtttgcttttgctggaggggccttaaatatctaaggcccctaaatcattaataaatgctatcgagttatttgggtgaaataaggagctctgatgtaagttctcgtttccacacaatgggaattatctgaatctggcaaaagaatatttcttctgaacttgactctacttgaaatgttaaggatcctatgagcttttgtaaccaagggtctctaattgattcccatacccagaatatcataacaatcatggaatagccatgcttacattctgctggttttcttgtacaactttgagatgtgcaagaatacagtttattgaacaagaatatggcatacattgtacagagaatctgcaattagatattagggtctataattggatacacaaaaaatttccctactatataatggagtcaccatgtctctcttatttactatgtgacaccacagtggagcatatttagataacaagaaatttcccctgacattgtagcttaagtgcatgcaagctgcactcagagggtagcatgagatctacagagttaatgcaaagaagtaatgcactggagtgccagatgacatttggccgcctcagcgttccatgggtaaaatactgctagaaatctgtactcactgttgaaagagagaaccaaatttaggagcggtgatacattggtttatcgtacccaatatttgcagggcaggttgcagtgcacagagagaccctttgagctcattgacagcgtagagaagagaagccacaggatgtggttagactaatcacaagtccaaacaggtagctttaagaccactctcccagagttaacatgggggattgtgggggataaattaattcccagtctagaatggccatcctgaggatggtggtgaggggaaaatgggccacacctgatgtagatccctggcagtgtcaacctctgtgatgtttttaaggacctttccttcatttaagcccgtaagtcaagttcccacacacacataccctctggtatggtatatatactaccataaagcaccactaggtgctattgatgagttcggtgtatctgtcccaaagcaaagcagtcattgcttccctttcatatcagtgaaggacccatctagccacctgtctgtcttgccgctacaggtgattaactctgctgaagaggttgcagattaaagcacaagttagcctgcgatttttctaaagtctaaccaaccacatttcagaagaggagtttgcatctgacagaacaaatttggatggaatgtttttattccttaatttaccttttttagaattttccacaatgatgaaaacaaaacaaagattgcttcctttctttactccaacatcagcctgggcagatgtgggattaatacagattcttggtctgtggtagctactcagtaattggggtgctctcaatgctgccagtgatacagaatccattcattcacttactcgtcttaatctttcctttgtttttttgtttttgtttctgtttttgtttttttgagacggagtcttgctttgtcgcccaggctggagtgcagtggcgtgatctcggctcactgcaagctccgcctccgaggttcacaccattctccttcctcagcctcctgagtagctgggactacaggcgcccgccaccacgcccggctaatttttttgtatttttaatagagacggggtttcaccgtgctagctaggatggtctcaatctcctgacctcatgatccacccgcttcgacctcccaaagtgctgggattacaggcatgagccaccgcacctggccagtccttcctttgttaattcattagtccactgtataatttatcttatgcagaaaaggatatgagataactaaagcaactctctgatgtaggggagcgttattggttttaatagattacaatgctcgttattaacactatgcatttgatctcttcagtccctgagatcccttaaaactttgctcccataaaaccttcatttagattttcaaaatgtgatcaagtaaagtgagcatttcctttaaaaaagtgacacttaaaacttttggctcttgtaagtatgatcactctgtcccacgtcactgaatcccatgcagctaacgtgggctaaacccactttggtcagaagagctactgtttctcccagtgataaccagccccacagagttatagagtgccagcctgcttattccacatgctgtggatgtgttaccccctgtattagtttggtagcactgccgtactaatgccacaggctaggtggcttaaacggcagacttttattttctcagagttctagaggctggaagtctaagatcaaggtgtcagcaaggattggtttctcctgagacctctccccttggcttatggatggccgtcttctccttgtgtcttcacatggtcttctttctgtgtgcatacatccctggtgtctctttgtaagcccaaattttctcctcttataaggacaccagtcagttggattagggcccacccgaatggtttcacttagccacctccttaagggtcctttctccagattgcgtcacattcccaggaactatgggttatcttgtcaacgtgtggattttgagagggacataattcagcccattacacctcctgtctactaagtttaaagcattttgcttaaacaacaataacaacaaaccctgggtatgcagcaattaggagaacaagaacttgcagaataaaccagttaagttgaaagtgtgtgtgtatgtgtgtatgtatatgtgtgtgtgtgtgtgtgtatatgtgtgtgtgtgtgtgtatatatgtcaaattcggaaagatacatattatggtatcatagctcatctcattttgtttctgtttttacttcctcagtgttggagtttccagatcaaaagatgtgccaccatttggcccaccgattcccaaaggtgtaacttttccaaagtcagccgtgttccgggacttccttttagccaaagtaatcaatgcagaaaatgcagcccataaatcagaaaagtttcgagcaatggccactcgaacgaggcaggagtacttgaaagatctggcggagaactttgtcacaaccgccaccgtggatacctctgtgaagttcagcttcattacgctgggtgcgaagaaaaaggagaaggtaaagccaaggaaggatgcccacttgtttagcattggggccatcatgtggcacgtgatagcccgggacttcggccagtctgctgacattgaatgtcttctcgggatctccaatgagttcatcatgttgattgaaaaggattccaagaatgttgtattcaactgttcctgcagggatgtgattgggtggacatctggattagtgagtatcaaagtgttttacgaaagaggagaatgtgtcctcctgtcctcggtagacaactgtgctgaagacatcagggaaattgttcagcgattagtagtaagtacatgttttctattttcccgccatccttatgttttcaattccagattcaaaataactttcactggggaactgctaccatgattataccaattagggaatgcattactatttgttacagatacagagcttaattttaaatgctgggtccttttggggagttgttgaatacatgaatggtggagaagcaaccatcataaatcaattggaaaagaaaagttaagccaacctgcaaaagagaacattaagatgtattttagtagcatttgaaggaaaaacagaagtgtctgggtagaatgtctgtttatggaggctgacataacataccttcccagtgggtaattaacaacagaattgctgttgactgtatgaatgacgagtcctatctgcagtttcacccctgcatgtttatacagcagctatttttgtttaatgtgccagattaaatatattattaatcttagagccacagtttcttaagggagtttttcagaattacacattaatttagaaaggcttttgaaaagttagacttaagaaagattttcatgtatgtgatttttagtgcaaaacccttatattttatccatggtgttcagtagtcatatttctgctcccaattttaacaaagtaagaataagattttagtttgagcatataaaataaagtagtaagaataaatcaaactacttctagtttttatttttggtaatataagaaaaaaacatgctttgacaatagaatttcttgtgtgtaaatcttcccccaagaggaatgtaattttttttttaattagaaaaggtttagttcactatggatcatgagaaaaggagaaattatatccatttcttgccccctttcctcccaccaaaaatatttcctcccttttgttattagagaccatgtataagagaaggtaaaatcagggcagtgtctgctagccttggaaaagtaatttcattatttgtggactctgtttacagtaaagggcctcagtgtgttcaacagtattatcaggtatacgtgagcaagcctagataagagtttggggtgattaagtaaatgattagtttatatacctagagaattgacttgaattatactggtgagtctctggatgcattctgcttttgctaattgcaaatacttctttttagcatatccaccaaatcattataatctgtgcttctgaaaatacaacacaaataccacttcaccaaccacaaaaatgtactttccctggatatttacacatgggcttttatacatttgctattcgatggactccatcctattttcctagaaaagtgtattgtcagtgtgaccaagatgcacaatattacaaatatattttaggaattatattctgtgtctaggatgacttgcaacatgagctgttggaaacaagccagaccaaagactgttgaagggattagatcgtaagggttgatgcagagtggtagtaacagaaatgggaagaaagagaagaatgcagtcttagtggagatgttgggaatgcctgcccgtttggcagatggttaactcagtatccattctcaggtggtggaaagtggaactaaagggtctgtcttgcaggtaacagtacaggagcagaatgagagtttgttcctagagggccaggcagggctcacttcacggatgtgcaacccatgcagttgcacagggacccgctctcagaagagttcgtgcttggttgaatgctctgccattgccatcttgaaatacttactaattttttcataaggagcctcgcattttgatttttcttgtggccccacaaattacatagccagtcctggcttggagactacaattttcgtgtgataattgggtccatggaagaagtccaaatacatggagaacaccttacttcagactttggggatgttaggaagcaataaacagaggggataaagaaatagcaaaaagacaaagtaggggaggtggcaggtgattggaggaaatgagcagaagagccagagctggaggactctggaaaggctcagccaataactcttcagcctgatacatggatgataaacttcacctgataatcgcattgatatttgaaagaaggctgggtacatcttatgtgtcgtcttttgataggattgcttagaacaaagttgaaaaagaagtgaccaaaatttatttgtgttgtgcctattacagaactacttcttcaagttttagttacttcagttcatgactttagaaacatcaatattctaaaacatcatcactaactaaaaccagcagtcccctttccgcattttgctgagtcgtgaactgtcatacctgtctgggaaaagctgattggcattgtgtgcacttgtggtaaccatggaaacatcagacacagtggtgatacatgaaccagccccagtcccacagctgtacttactgtcataggtcttattaaataggtatctatgtagtcagagcatgtttcatagaaatggagtgttcattaaactgaaacttcatacattgcctctgggcttttggggataggagtatgatacctcccaacttgaaattcccacagataggtgaggtcatagtcatcgggtgttacttaatgagcccatgtttttctttcattggatgtaaactatgctcggtgagtgcttttgagggctgcattagtggtgctttaatgtaccaagtgggatgcaatccaccattcttctttcatgttcctttttgtggaactgctgttgactctctctcactcttgagtaaggtacatacactgaggcttccattgcttggggctgccctcagcccctaggagacaggcctagtggaggagaggcagcccataagcacagagggtctgtctgctgcctgccagagcaccatcctacacacttgccttgtgaacagatggccaaggagtctggctggcctgcccccaccatggatctgagtggtcctcaccactcaggcaagcataggcagttgtctgtcctcaagagaaggaccctaggggacagaacactccacagtatgtccccagggctggtgcgtagagaacatttagagttttcctaaagctctgactttctgccactgcccttcctgaacctcagagtgggctcttaagcgttagctttcaagtgctttggggtgtttttctttgcttgggatgaataaattgtctcatggtttttagtgcttgctggttgaaacttgtaatggtccacaaagtctttacaggttttccattgcaaaaatccatctagaacgatgggatttatatgcttaaaagtcaagtcaatttacctaataaaggaaaaacgggaattatctgagcccatctgaagctctcaagctctgggtcagtgacatctaagaaagcaggacacctgtatcaagaacagatatgacttagaatgaagaatgaaaccattgctttgcttctgttattttctttgcacttgatgcaaatgttaattgtgatcagctctgaacttaaatgtgtccttgtcctgtcacttggacagtttgaggaaaaggcagagagagacaggctgggctgcgagggcccaagggagagggctggcatggaggcccatacgtgcacctttggcagagccccatggcagcttgggcaggaagggcatctctaacagtctccttcccccttagatagtgacgagaggctgcgagactgtggaaatgaccctgaggaggaacgggctgggccagcttggcttccatgtgaattttgaaggaattgtcgcagatgtggaaccttttggctttgcctggaaggctggccttcgccaagggagccgcctcgtggagatctgcaaagtagccgtggccactctgacccacgagcagatgatcgacctgctccgtacttctgtgactgtgaaggtggtcatcatccagccccatgatgacggctcgccccgaaggtaaggcgtgggaggcccaagtaatgctcactcctcctttgcctctgtagcaggtggctgtcctcagtgctcctgcaaggtcctcagaaaatgcagtcaagtgtgtctttgtacagtgttctgggatgtcactcatttgtacaatgttgttgggatgtcactcattcgaggaattgaaaaggagctttaaaatatgtaatagatgataaaaaataatttgctaagcattttaatggaacattgactacattaaagctgagctattctgaactaaggggaagagcacctgcctggttcccctggacctcttatatctaagaggaaataattctgtatcacagctcagccttgagcacattaaatacttaactattcagttagaatttcttcccataacatgaagccattgattatttaaaaaatatttaacagaccaatagttgtaggtatgaaagaatgttggaacagcacaggtactctctgtggtaaatactccattctcaattgaagcttgagagatgttgaactggttcagggcgttatcataaactgtcaggagaaatagatgaaaaggaacggctagacttggaaggttcagaggcggataggtggagggctgggataagaacggggttagaaagcaatactattacattactaatagaaaataatcatgcccaacataaaatattaggccaaaaggagaaagaatgctaattaagaaggagccgtttattgaggctgtggcccactacttgtgttaatgcatgactggtggtagtatctagagcaccttccctctatcttcattcccaaatggagttcgtacaggcagccttaagagctctggcttttgagagacaaagtatgcttggaatccaggaatttgctgtgtggcctggggcaactcacacactctctctaagtctcacttactctctgtaagatgggattattatatcgcctacctcctatgatttcaatgaagatgaaataaagtaacacatgtaaagcacttagaaccttctagcataattgccccacacatttaatttagaaaaataaaactttaggggctgggcgctatggctcacacctgtaatcccagcactttgggaggtcgaggtgggcagatcgcttgagcccaggagtttgagagcagcctggacaacatggcaaaaccccatctcttcaaaaaatacaaaaattagccaggtgcagtagtgtgcacctgtagtcccagctactcagaaggggaaggtaggaggatcccttgagcctgggaggtcgaggctgcactgagctgagatcgtgcctctgtacgccagcatgggtggcagagtgagactgcatctcaaataataataataaataaaactttagcatattcattttaatttctttcatatgaaaaaataaattctgattatccaaagatagtaggattgttgggtctactttctggacttactaacctaggtcatactctctcctttctctgtttcctttcttcatcctttaagccagcactctccattagcactttctacagtgatctgtgtctgtaccgttcagagcagtagccacaaaccacatgtggctattacgtacatgaactgtagtgcaacttaggaaacgaatttttccttttaattaatttacatttaattggccacgtgttgctagtggctgccatattggatagatcagctaaaccatgatctccttttaggaaaaaaagccacttacactgtcttcctctatggttaatgtgcaaaatcttgcaaaaatctttctctattagttatcttagcatttgcctccagcctcactttctgtggccttgtttcctgtatttgcccagtgtgtttataaaataaggatttaagaaactaagttttctctgtagagtatcagtcccgtgttaagatgtttcttattgccttgcctgattctgcctagttgaatctgtctgcttttccagagtcccatgaatcacatgtactgctatgagtccaaagaaaataaaaaattaatttattaaaaatgagtcttggaaataacaaaaggcaaatcctttaggccttaaaagctaaagtactgtatatgtaaaattcttttatagtacattttccagcatttgttagaaattttttcatacagtaagatttctgtcttccttagtagaaatacaggtttttaattattaagataagaatcagtcttttatctgcctttgtatcaagtcttttatctgtcctagcagccgattactatagaattggacaaaaatgttaccttgcgcttcctttgggttaaaaaataacatttcttgcctatttttagttttggtttactgttagtaagaaatttttaaagctttcaagagatctgtttaataaaaatggtaaagttgtcgtgatatttggtatttagaaatacaatttaggaggatagaattttctacgaaatattgaattgtttttcagctaaaacaaacaaaaactacaatttaaaagttccagcagctgttatctttttatccaaggacatgtttttcctctaaggaatcagttatctgccttggtctacacataattaattctttgttttaaatgcaaattctcttaatggagctaggcaagatatttatttaaagattttgcccttgcctcctaggagtctcattaatgtcattccctaaacatacagggttttttttcccaattaatctgtaataactgtcttttaaccttagccagaaggattagaattagctatttgcctagtagcaacgttccaaaattggcacacccatcacccacatttctgcaggtcatgaaggctttaagcctagcctgtatcatttaaaactctttcaattcagttttccaattttctaggaatctgaatttgtaaatttttaaatccatatttttgttagttttgatttgttttctgcctgcaactgtctgggtgccctgataaaagtatttggtgttgtgagacaacctctcataaccagataccacccttgcaataccagccctttgctttagaccgcaagtgtaagtatgaagtgtcattttcagtttcaccctcgcgctcagcatgtttagccttctgcattattagatttgttaagaaactgtagaggaggggctaaggggaaatgggtagcacttcactccttttaaaatttaaaatacaaaccctttaaatcaaacatcctttagtactgttaaccatatagcaacacataacaggatgtgcctcaagctaaagctatacatttgacttgcagcatggaaaatgacctccaactttctcagatggactcttcgtgcttgtgagggaggagaaatattatttaaatggacatgtatatgcatgtgtgtgtttctgtgtgtatgtgtgtatatatacatatacatttttacagtagtttttaacataaacactatgaagactacaaaaatggccaaattaaggaattatgagatattttagtctcataaatgttgtgaaaaatgcttcagttcatttttgccatttatcaactcccgttttagaaaatcatttgacatgggagcccagctcctcctgtgggcagcatgagtggcctgtcatttaatagacagtttttcttgtcctcaggtcaaaaggtgtttggttttgactcagaagctgctggaataaatgcagtctttagtaggaaaagtatttattaatctgttgaatccaaagccacctgtgttttgaattcccataaaagtatttatgttcaacctaaagccacctgtgttttgaagtcccatttgccagcctaagggaggtgacagtctagcttgtccctcagcgtgaagggaagtcagagccatttttagttttccttgtggagttgcagggaacactgagcagggagaatcccccttgagggacacttattaactgatctcgtgctgggattggatcctggagtgaattcatatacattgggaatgagtggcaagaagcagtttgggaatagtactcttcaaatggaaatgaggtttgaaaggggaaccagggtgtttctcaagcagacagtctctgtggcaaagatgaagagttgctggggccagaaatgcttaattaagatctgtcttgtttttgcaagggataatttacagccaccggtatggccctggcctctggccttcaaaggtgactgacattctatcagtgtcatttgaaggaaagcatatcaacctaaaaggcggatataaaggaagtaacaactcatcagaattatgcatgagttgttatataatgtgagtgaatttagtaaatatgtccaataaaaatggaaatgaaattccttgctgcagtgcatctgtttttttgtgatttttttcatactttgttgacatactatccaaggcatttttctatataatgcaaaacagtggaaattttctcatgttatcatgagtctaaattattattctctcatcattctataaaaattaaaactttatgttctcatctcctgttttgctgtctgttgcctggtcattcaactcactgaagtatgcagagaggagaatatggaaatagaaggaaaactcaattttgtcagtttaacagtttttatttttagatgtatatctacacacatacatatataaaataaatggtgggctgaaatctggactcaagtgagccttctttttttaaaaattttttccatgctttatcccatttattattcattacaaagcagacttttttttcttcccagcttttaggttcaaggggtacatgtgcaggtgtgttacgtgggtaaattacgtgtcgtgggggtttggtgtacagataattttgtcacccaggcaatcagcatactacccagcaggcagtttctccatcctcacccttctgtcacccttcaccctcaataagccctagtgtctattattcctttcttcgtgtccatgtgtactcaatgtttagctcccgcttgtaagcaagaacatgacagcatttggttttctgttgccgtgttaatttgcttaggataatggcctccagctccacctgtgttgctgcaaaagacatggtttcgttctttttatggctgtatagtattccatggtgtatatggaattttctctttttttttttttttttttttgagacagagtctcgctctgttgcccaggctggagtgcagtggcgcgatctcggctcactgcaagctccggctcgctgcaagctccgcctcacgggttcatgccattctcctgcttcagccttccgagtagctgggcctacaggcacccgccaccacgcccggctaatgttttgtatttttagtagagacggggtttcactgtgttagccaggatggtctcgatctcctgacctcgtgatcctcccacctcagcctcccaaagtgctgggattacaggcgtgagccacggcacccggccaaccacattttctttatccagaccactgttgaacatctaggttgattccacgtttttgttgttatagtgctgcagtgaacatatgcgtgcgtgtgtctcaagtgagctttttatattcgagttccaacttatttgtatggataataaaaattagttatgtctagtgttgtcttatggacgctccagtattgaattttgatgtgaaatgtgaaaacaatacagaacaaaggtaacctaaagtacaatcactattctgagtcctctggccagtttctccaatataacattcagattgttctctcactccctaaagtaagaacataggattatagaatttaaggtagattgccttgcattcactcattcattcattcattcagccactcactcttaactagcttgtgccaggaactgtgctgagcactggggctgttaaaacggatgggacagatgtaatctgactttcaaggactccttttagtctttctggctttctaaaatgcagtagtacttattcatattttggctatttaaaagtgatttttctcaaactacagcaacaacttactacttaataataaatgtctcagggtagtgtagaaaatgctgtcaccctttccaagtaataatctacacttcagtgcccacgtgttttttcattttgaatgttgggatattaccatcacaataagaggaatgcagaggatggtggtaaagcatgagcattgtgttagactagtaaccatctcatgcttgacaggttacaccgtggctaccatagtggacagccattggatattctccccccatagaaatacattcgtcaaaaatcaggcgtcagatagctagctattgagaatcttctctgtataattttgaagtattacagtgcagtgttactcctgctctcaagctttctaagaaacaaagcagttgattttgacaagaacgtgctgagcttctgtccagtgctctgccaggtactggggatacaaagataccatctgcccctgtgtctgcttctagtaagggaggaaaaggatggaaggaagctgatgaattagtaagtgccagatagcctcacttcctatttcatacgataccttttcaattgctgacctttataagagggcttggtcaagtgtgattatggttcatatgtctttttttctacctattctgggtatctctgtttctatctgtaaattaaggaatttgttgaaaagcaagttactatttcatttagtgcctatttcatgtatgccactgccctaacctttacagtaagttatactatgtggttatctcccggttggaagcctttgatttttttatgtaccagaaagagtttgtgattcaagcgaatgagcatcaattacccctgtcaccttgttggataatttggagtattttagctattagcaagctattagcataacagacattaaaatgattaaaatatcagtgattactttaatccctagggctataaaatgattcttttacaaaatgcataatattaaaaaaacatttaatttgttttagaggatcggcttttgtttccaaagattcttttagcacctactgaaaaatatgacatagtgtaggctgcagtaactgttcttggatggttttcaaaaaaaaaaaaaaaaagccttgtgttttaggaagagccctgaactttgagtcagaggacctgagttccattgtgaaccctatctctgattagctgtatcatctttccaacctctctagcccttcttctgaaaaaatggagattttctttgtacctcacaaatttttgtgaaagtcagatgatgtatgtggagcactataaagtgctacacatgctaaggtggtggattggaattaaagaatagcattgcagtactttgtaaggcttttccttagattattgggttcacttaaagattctctgtgatgcagccaagtaaggtaaaaccaatagggaatttcagagtccagtaaatgcaagttccagtcatgggattagatgaagctgtgactgcacagtctgtggtacctggtccaactaactggtcaactgccctctctttttttgataagaatatgtattcttccctttgaaccttctcagttctctaggttttttggttttgttttgctactcatcattcccttaggactcttcccctttcttagtttcatagtagcgtaatacaaagtcatgcgtcctacttttatgtaagatgaaaagaataaaataatgggataatgatatatattgttctacagatgaatgtagatgaagggaattttacagctttaaagatttttttcaatttgaaagttaaactttaaaattccagaactctataaacatctgttatctagaactttcataaaattttatgtgccttttgcagtttaatgttggtttccccctttttgtggaaacagaagtaataatgtctatttgtaatgaacttctttcttttgaagctgtcagttgaggaagtttacatattttatgtaacttaatcttgatgcaccctctgctgttactattctgttttcaagaggagggtctaagaggttgtcacatttctaagctacacatagtcatgtctgggttttaagcctagagcccaaactctctctttaatggagatagtttggtatctagggttcctgttgggaacaaatggaaaaaaccatatggcttgactagactcaaacagtgatggtcttgacggtcagcctgcagagtttgaagacatgatttagaaccaagtccatagcctggccagcagggattccaccttccagtgtccaaattattgatggtaaatggaaggttcttccgagaaactcaaggtgttgttggaaaggaatgggcctgggtgggtggatgccatcttgggggccttcctgggtgcctctgaagttgtggaatgcatacactacagtacttggcagtgaccgtggtgtctgttaactgtgggggccttcctgggtgcctctgaagttgtggagtgcatacactacagtacttggcagtgaccgtggtgtctgttaactgtgagcaagataggacaccccctctttgctgatcatgttcaggaagccaggaagtggtggcagctgtaaccaagaagtcttctggtaggaaacttagctttaggcatcaggaagcaggggagaaagcccatgagtatgaatatgaataagttaatgagtgtcccttttacaggattaagccatcccaggaagtccacgatggtgagtgcaaaaggacaagtaatactgtttttagaatacagcagtaaaataaaagatcctctgaggatgccatctaatggaattacttgttattcttacagtttgataatgccacatttttaactaacacattttcagtgaccttcttggtctacagaatgttttgccttccagtgtatgcttttgagagagaagagagaatagactcagaaaagttattggctagacaagaaatgtgaaaaattgcacttatttttaacctggagctgactttgtattgatccctatgtagcatggtaattaggagcataagttgatgatgtgtacatttgttatggagcaaagaggaaatcaatatgcctacataaaagtgatcccacagccttatcttgaggttttttagtatctcctgttggcaagcaaactgtaaagaatgtgccagaagctagaaatgcagtttccatccattgacttgatttggtatatcgagaggaagccaagcatgtgtatcaatgaggtctgaatttttctactgtagcaggaaagcaaaagtcttttctttaaaaatgttgcagttacacacgggttgagcagcttgtttttttagaaatgtctttttgtgctaggtttttgggcatttggtctgttcgggtttcagttagcctttatttaactcatcgaaatatttgccatgtgccccatccacagcagcccccagtttgacactccacatgagctggggtgtcttgcctggtgtcctctgctaaaaccccccaagtgggagagaggatgcgtgccaagggggacgcagatccatttctgatgggcactgcagcatgaggacttctccaggctcatttgtcattcttcttttatgccttttcccatttccctaaacattggttgaattttctgtatgcatcctttaaggaatttctcatatatatggaacggaactgagtttgactaggtttgatgatcgcttatatcagtagtactaatttggcaccttagtcatagaagtaaacaaagcaaaatctagttcacaagagtagttgctgtaaaagtgtcacataataacaaaattagtttgattttaaaataaaaccattcttttgagaatagctaatttttattagggcaaaagaatgccagttcttagtattttaaaagacctttcctatatgactttctgcacaaggttggagataaaataattccacccagattctctcttcaacttaatggattgcacagatttttgccagcattctctcaaaatatgagtcatgattatgcatttatattacatgtttctttccaagcctcaagctaaattatagtgtcttataaagactacagtctatgggcatgaattaagtaggccacactactcagccatctgtcttctctttcttttttcctcttaaaaaccataccaaacaaacttgaaggccaaacaagcactggaaatgcaaagatgtctttgggttcacaagattcaaggttcacgttcctttcattcaacatataactccaggatctgtaacttcaatggtagtcagttacagttcctgatgtgcactactcaggcagctggaacctgtgagacaccaaagcctggtgttcacctgaacatccagtgacgcttagagcatcgatttgagtggaagacaaaagtaggttttcttcatgttttattatctactgtcatatctgacccttgatttctgattaggtctttggctatggggatgaatcagtagccctagggatgtggtatcttaataaacagaaaacacttggaagcaatataaatccatgaacaaaacttatagagccttggcattttataagaaaatgatgcaacccaatgtaatttgcatttactcagtttgaccaataatgtaactgttaaactcagtaaatccagagtaacttaaactaaataagagaggtgaattttactttcaggaagggaaacagagttaaaataaaggataagaactaaccattactgatgcacagagaaatcactacctcatgttctataagcaggtgttaagatttctttaggagggtgtattcagtccactctactctattaacgctaccatgaatttggtttcccaagccaaaagttaggatgttgttttttattttttctctttctctgtcccaagctccaagtactatggatttgacaagttagaaatcactttcacccagaattttacaaggatttcctttgttatattttgtaccttctagtattgttgttgagaagaatggaactattccacgcccaggtccttagacccttaggctcccacccaccctgtccccagaaccgtaggcttacttccttaacccaggagtctgaattcctcagtgatgtgttttcacgtggaccattttttattcattgggctcggtactctctggaccttttaatccagttttacatatcttagttctagaaatgttcatatactatttcttaataattttctcccccttttttttccctcttctcttttgtgatagctctgtctggtagttgccggactttttagattgaacttcagtttccttaatttttttttttttttttttgagacggagtctcgctattttgcctaggccggactgcagtggcactatctcagctcactgcaagctccgcctcttgggttcacgccattctcctgcctcagcctcccgagtagctgggaccacagacgcccaccaccgtgcccggccaattttttgtatttttagtagagacggggtttcaccgtgttagccaggatggtctcaatctcctgacctcgtgatccgcccacctcggccccccaaagtgctgggattacaggcgtgagccaccgcgcccggccagttttcttaagtttttatctctcataactgagagaatttctcagtttaccttacaactgtcttactggattttttagtgtttaattttaactctcataagttccacctcttcttcagcgatctagttgttccatgagcttcactgcagagtgattggatggtttacatctgcttgtcttttctctagagaaccatcttctttgatctctgtggggtggtgagcattctgaggccaagtttagaggaaggagaagtgaccctgggtctcatctctgccttaggcttgtcattttcatccctgttctcctctgcacctcacgcccttgactctgcatcttttctgttctctaaaaaccactgctgttgtcccgcagtggtaggggataggttactgcctgactaggccaggcgctgtgtggacctcagggcccagggccgaactactgttcctcctttctaagtaacttttatgcctaaatctcccttgtcacttggccttttgcagtgcttggtgcttaccgtccctgcaccattttggcattctgcaaagacagtggtcttccttcctactgatttttccctcagcacaccttcctctgctctgctgagccataacctttcttccattcacctccaacttacatactgtgtattagagtttcagggatctccaaattcagttggcagttgaggttgtttctgtttcttgttctccttgttctgttgtgatgattttctgaaaaggctgaaacttttactataccatgctgacagtggagttctgctttttaacagagtgatcccttgttctaatagatttctcaaagggcaaatattaggaagtgttgttgttgttgttttatgttgactctggaatgtctagggagaggcactggcttgggatgctgactggtttgccagcatggtaaattgaattctagagttgagacttatctagtcttcccgtgtccttgccgaactgcaccaattagcttcgcaggctgactttggtcaagttaagagtacgccttgcactgtgcagttggtgggaaccttaggcatagccgacttaaatcatatattttaggctaaagagtcttaagtacctgagtaatcgcttgagcacatgggaaagctgtctagcctgtgaccttttagggagctgtgatgccagtttaagagagcaactatggtaactaaaagccacacctgactttcacatgatggacactcaggttttccctgaattgtgacagcttttactaattgtgcttttcacttctctcagactcaataaaaaagtgatttgtaactctgattcctgattatattaatataactatagtttaaaatatctgttcagcttatataaatgaagtatttttaatctattaaagcttatttatcacccatgttcaatgctcttgattccacatatgcatattagttaaaggttcgatcagttctgtcctagaagtttgctaattagctggaaagacagaatttgtatatcacatgcctaacagcaatatccatcaactagccagaaccaaaaccatgaatattggatcatactgatccatcctggttgtaaatagacaaggcccccatagccaagaatggggctactgcatgcacttgcatggcttgtgtcagaaaggtgccttccttcagtggtgagggaccactgaagttcagccattctctgtcggggcatctgtgcagagcacacaccttttttaaattgtaccatggcttgccatcctttgcactgtgcagcacagtcagcaaatcttatggagaaggcaagatttaagttgagatgtgggtcagactgggagatacgattgccaggaggcggggctggagcagatcagccagctgggggtagatagacaacatgcagagagctgtggcaggccaggttcctctacagggggctgtccaatagaaagattttatctggattttccagtagccatattaaaaggagtaaaaagaaacaggtgaaattatttttagtaatatattttaactttatatctccaaaatactatcatctcaacatctaaaaaatgttaaatgattattaatgagatagtttacattattttttgtattatgtctttgaaatttggagtacatttcacactgacagcatatctcaaatcagatgctaaattttatcctgagtacttgctgtttatatttcgtaaaatgtaaagttgaaaacatagattcatatacccaagttattctaaacacttaaaaaatgaatcagagtatcagtttttaaagtcaaattaatgaaaatgaaatcactgtgttcctccaaacacaagtccatttcaggtgctcagaggactctgggtggctctgtgagccacctctggcgtctgctctgtgggcaatgtgactatggagggactggggcaagccagtgctaggcacatggtgtgcctgaaaggcattaaggagacattgaagttttcaggaagataaatctcatacaaagtttgtaataaggaggaactacagacagagaaagagagagaaaccttagaatccaccaactcccatatgttgaacacagacatggcctagttcttttggtcactaagactggttatgctgcatttaaccaaacactttcttgaagaataaagtatcagacaaaaggaagcttttctctttctatttagtatgattttttctacaagtttattgaggtgttgatgcataatgaactgcatgtatacaaagcatacattttgatgagttttggcccatgtgtgaaatagtcaccacaaacaagataatggacatttccatcatccctaaaaatgacgaacatttgcttagagggtcttatttctacggtccctgggagtggatgtgaggaccagaggcccagtcttggtcctgctgagtaactgtgaacaaggtgtttaatgtctctggactttagatttctaattaccggagatagtacttgttatctccagaaatatatttaaaatatttaacctacaagtcctggaggcctctgctgtgccaggtgttaattttttttagctgtgtattgggggtcttggaacagctgcttcttacgcattggtagttggaacattttaataaccatacggctgtattagcaggtaccagcatagatgatgtgtgtggctgcacggcagccaggaaaaaagccacaaaccgcctttctcatttctagacgcagtcattgctggcagaagaggaattgaatagtgtgggaatgtggttttattataggtgagatgctcctaagggtggatagctctgcatcattgacttggagccgggagaggcacacaccatgtgatgtgtgttgaggggcccagctgtgagtaagccatgctgacagctcagctgagagcttcccttctcaccatttcttcttggcccaacagagggtgttcagagctctgccggatccctatggtggaatataaactcgacagcgagggcaccccctgcgagtataaaacccccttcaggaggaacaccacgtggcaccgggtgcccactcctgccctgcagcccctctctagagcttcccccatccccggcacgcccgaccggctgccgtgccaacagctgctccagcaggcccaggctgccattcctcgaagcacctccttcgaccggaagctgcccgatggcacgaggtaatgctggttccgtttcctcaaggggggcccttgtaaatcactggggtgagaacttgacattgtagggagggttttgcttaatcacttctgagttagcttgttcacagcaagttggcaagcagggtagcaaggcaggccccagacacagtggtgcctggggtcgggcactctcctggccccaagatggtgctggtaaaatgcaggttctgcccaccagggtcacagcttttcctcttcatccagtatccttcctccatgtccactggctctcttccccaagatgggaaaggcaccccagaaactattctgctggagcctctagaaaagtgtgaacaggtttgagcataaataaaactgaacaatcagtgcttaaatatcatcataatgtgagtaatactttaagaggttccaagctcattaagacttcctctttgcttttctccttttaagcaaagtgagttgagtttaaaattattttttcaaagaagaatgcatacacttgtttaaaagttaaatccagtaccattggaagctggtgagggttttcagatgcctaatttgcatagatcattttaacaaaacaaaataataaatttcttattgttgttaattcgtactccttttattctaacttttatgtaacatgtaggcacggtaatgccatgagttttctcaattatgacttgtcaggctctggtctgatagaccacggactgggagccaggctggaatcacagctcttaacttacttgatgtactgtaaccataggcctggtactcatcctctctgaacctccagtttcttcatctgacaaaccacatcaggaaattttgaggactgagtgggtcaatgtatgtaaaatgcttggaactgggcctggcacttagtcagcttatataaatattaaccagaattaattgataagcttatataaatattaaccagaattaattgataaaacctgtggtcatcctctcccttctccaatttttattctttccagagtgaatgcaggagaggtgttaatttaacattcaatcatcttggctctgggtctcccaactcaaaagtcggctaagtttataactttcccatattcaaagaaatgtacatagatagccctggtaaaaggggcaacatgtagaaggaagggggtctgcagaacctcccttatttaagtaaatttaaataatcataacttaagtaaattgtattaaattaaaatttacttaagtaattctaatttaagtaaattataggagaaaaccagaagtattctagtagcaaaagggaaacttggcaagcacatcttcatcaagtgagttttcatgagtatttttcatttttgcatgtctgaaaaaaagataaaataggattacattcaagagatgtgtgaaaataaatggttttgccaaatttaggtttttctttttgcataagttttaagtatagaactaaaacgtgacttgttttaaatttcacataataagaattagtaatgttttcataattctgtattctcggaaattgtattgctgttcttctgtatttctctgggagggagtcattatctgtgctttaaatctttagacagtgagggcctgtcctgtcatacctctttcctaggacaaattgccaatcataaaccactgatatccctgggcatcaccgatacttagtttatttttccatgatttattctgtttcacatggcaatatgtttttcttccttttctttgtcattctcaaagtatatttatttgtgaaacaaaacaggccaggtcaaggggcttggcagatagttcagtgccctgttaatgattctactcaacctttcagaagctcacccagcaaccagtcatcctccagcgaccctggacccggcgggagcggaccctggagaccacaagtgggctacgacgggtactgttcatttttatcttagttatccactgggaggaacctgttttctgtgactcattgaaaagcatttactgtgtgccttctgtacctggggccatgtggggaatataataatgccagacatgcttttaacaagtgacttgtccaggttggaaagctcattatttctgtgtaagtagtgctcacttgtcgatgttctcagcctgttttttcctttttgatgaggaaaggttttcagaacatgaaaattaaggatgtgagggcttagttgcctcctgacttaaattgctgatgaggaaacgccgctcaaaatcagagaagtgggtttagcgtttggcttttttgcttcctgtctgagaagtactgggaggttgccccagcacacctagctgagagctgccctttatagtatccacgcagtccagtccgcagtagccagcagctcaggcagagcctgaggacttctgtgaacaaagacactgagttgaccaatcccaccacctctgggaagagaagagggagcatggcaccagggtgcgctcctgaggagtggtctgctggggccactgtgacttggtgctgctttgggttggagttaggagctagtcacactgattgagaggagagaatggccggtcagtgggaaggactccactctgaggagcagcttatatcactgctcccgcaggtgcactgggaaatttctctccatatgtagtctgagttatatgttttccttcccttagatgatagacagagttcttaaaaattgtatgtcaagcaactttctaaattaaattgcattttaagccaagagaggattttttgatgttggcttttttggtgttcttttttgtataaacagtaaaaccttttctggctttttctgtaaaccaaggtcttcaaccagaattctgtaaataaggatcactttgtaatgtcaataagttttcttctacttatttctatcatatttggggttttcataaaacaaagtctacttggatgtagtctagagttaatcttttttttcctttttttttttttttcttttgagatggagtctcggtctgtcgcccaggctggagtgcaatggcatgatcttggctcactgcaacctctgcctcccgggttcaagcagttctcctgcctcagcctcctgggtagctgggattacaggcgctcgccaccacgcctggctaatttttgtatttttagtagagacgaggtttcaccatgttggccaggctggtctccaactcctgacctagtgatctgctcgccttgacctcccaaagtgctgggattacaggcaggagccaccgtgcccggccctttttttttttcttaagaaaaatttaatataaagagatgtcagtgccatgtattctaagcgtaacgtaaaaatgcgacctcctccgtagcttgcaggtacattgtttgatcctggacagtccttcaacctcctggtgtcagcagcccttctttatctgtaaatggctatcatccggctgctttttctgaccctctggttaaaccagatcccacaatttcagatgcttttagcttctctggcggggctgagctgacaatttgcattttcatttgccagaaaaccagctcctggatagggctttccctcgcatagcctacttggaagccagcactcccgtgtgcatgctggcaggtggcacggttgagaaaggacaggctcaactctgtgttcttttcaggtgccagtcccctctactgctcgaacaccagggctcaggccctttggaatgtgacggagccagggagagggaagacaccatggaagcaagcaggcacccgggtaataaggaactcctggaaattgacctcccttgctccccctttccccctctctgccccctcctctcccatcacttcattttattcattcactcattcaacctatgtgcaccaagttgaggtgatcagctgggtctccagatgcaggagggggtgtggtcatggttggttgtggttgtggcacctgcagaaagtgaacactttatggtggtggttctgtatacttttgtgacatatccattggtaagaccagaaagtcccagaaccacaagcctgttcatgtttaccaaaccacttgtctgactcctggttttctttactcttttggtaatactggaaattggaaattcaactcctctctttttatgtgacagaaaccaaatggcatggcccaccttccaaagtcctgggttcctataaagaaagagctctgcagaaagatggaagttgcaaagattcccccaataagctttctcacgtaagtcctttgttcataagcccttcactggcctagccaggactgatctgtctcagcacacagtggtacagcctgattcctggggatgctcaagagcacattacctcacagggctcttagaggtgaggttaaaaaaggaaactatcttcctgatttataaaggacctcaaagaaaggttgcacagcaaattagtggcaaagccaaaattatatcctcagccttttgatcctcaatatccagtgcagtagttactaaatcatgttcccatttgtaatctgttaaccacttatccatttagtggcacaaaacagaagcagaaactgctaatcggtgtgtgtggtcagaggaactctgcccataggtagccatttactgtacagtcatcgatgatttaatcatcacggccgcagctgcccattacacatgtcagggtagagcaccgcccacgtggtagttctcagtcctttgcatgtgttgccatgtgtaccccttgaagaaaccctgggaggtgagcctcgagggagactgtagcccagtgaaacaaaacttccattgaaatgcagaaacaggaattgttggttattacaaataaagccaacattttaaagtggcttatttttgaaaatgttcaggtgaagataatttataaggtcctgaattaagttatgtctttcttctttcttaatgtgtcatcagccagctttgcagttgtcccttagcaaacacatgtgacatttcttccctcagctgtgaccgcgaccttgtcttgagtcagcctcaccgtatctatttaaatccacctttacaatattctcatattggtttcagcaaagggatacatggtgtgggcgtagttttgagaatatcagtgtatgatgaaaaggtcaaggtgatttgcttaaggatctgataggctggaataaaaaaagataaggccaaaccactttaaaatctactggggcctggctcgttcttatgattccaaagccctttgctgatgcttcagatcttgttgcttttcccagactgtgaagagaggccgtgtctgtatgagtacattgtagagacagggacatttcttctattctatttgctttttgtcttccagagactccccaccccaaccaaaagcattgactctttttcagacctatttactctcaatagactcccatttcttaaaggcttgggacgcactttgactggggctgtctcagagagatacttcgtgtttaccgtgtactttgcagcagccaagtggttctgcatatattatctcatttgcttcacacaggaatcatgtaagctcggtattacaagcacagagagggttaagtgattaaccagaaagtcctacctttgtgactggaacctaagtcttctgccctgaactcaaggctggcactataatttgtcatgaagcattttcttaataagtggcccttctcttccttatattaatttcccatgttccttcccagtttatatcacctttgcttattattttctttgctagtgacactgtggccatagttttgtgcttaatgcacaaataattaaagacttaaagatacccatttaacttagataaattatgggaagaagtatgaattagagacttctgcacaaaaccaggttgtttttgaaaaaggaagtcctgtcattgcccacattgaagagtgagtagaaagggcttgggtgcgatcccatggcttgtagctccctgagtcagggtgagaagcacctgagttcaagattcacttgagaactctctgttcctctttcttctgaagattggggataaaagttgctccagtcactccagcagcaacacgctctccagcaacacctccagcaacagtgacgacaagcactttgggtctggcgacctgatggaccccgaattactggggctgacctacatcaaaggggcctccaccgacagtggcatcgacacggccccctgcatgcctgccaccatcctcggccctgtgcacctggcaggcagcaggtccctgatccacagccgggccgagcagtgggctgatgctgccgacgtctctgggcctgacgacgagccagccaagttatattctgtgcatggctacgcgtccgccatctccgccggcagtgctgcggaaggcagcatgggcgatctcagtgagatatcctctcattccaggtaagccccacagcactgcagagtagtacctgctggtgccacctgggccctgcctgctgggatagggcagaagcctgaactgtaagcagtaggggcatcaggtaggttggtgtaatttttcctagctgtctgacatcagaggaagggcttgtttctacaatatgaaaatgtcaaagcttgcatgttaacaagtcccttgttggtgttttttttttttcctattaagtttgagtgaaaagtcaatagagatattaatcgctctagtcaggccacttatgtctctctcctaattcaacctgttgtccctacgtgttttggagaagaggtggcactcactaatcttcagaccatagtagtaggaagccatgaaggcagcatgtgcgtagagcacatgtagctccctgccgtgagggcatgcacacacttcctccctgttcctacggccctgacagcaggggaggcctgagatcatgtgtataacaatgaaagtgtgttcagctctgcagctggggttcattcagtgaagactagctaagtataaaggaactggattctaagtactctaagtgtagatgtttaatatctccttatgagtggttttaaactcctgtttgacatacttctctgcagtggttttaaaatacctaatttgcgatttctgccttcactttcaaagactaggcaaaggacaaagaaatgcatttattcagtttggctgtggacagaatttaactatttatagcaactaccactgtcatttttctgcttgtttccaaggccttccctgattcagctccaagttactctctgactcctgcccacaatgctggagggcagagtcagatgaactaagaatgggaatatttcttgcaggtacctagtgctatgagggagcatttctccaaatgatggtgctcaaggcagacctgtagcagtcacggtgaaaggctttttatgttcctcaggctccccttcaaagtcccccctcaccccaccactgccaggggatactgagtgtcattcagggacctttacattacaagttaaagaaactccatgctgattggttcatgccaccagggtcatattggggcttatgtaaacaacaagtctagcacttcaaggttctgcttgacccagcgtctcaaaatgatactgcccaggaccaggttgcctccatcttcccactccacatgaccatttcccaaaatctcagcattcttctcttggctgaaaacagctgtgccacctgcagacctcccacagtcacgctcgtctgtccccgggtagaaagtggtttttttctagtttctgcagaagaaacaggtttctgccctctccaaagccaacccctgcccccacaccacccccgtatctcctcacatgttcctagctctaatcacgtggttagggggtagcatcgtctacggcacttggggccctcagcctgggctgggggtcagtccctgtcaccaagctgtgcagctgaggaatggcaaatacagccactgccccagaagagaagcaggacattatttgacctggagaagggggagtggatgccagagagtagaaatcatgtgtgtccaccatgcagagggagcttaggatatgaagattattttcaaaatagacattcctactactttttttaccagttctatttaataatttgacttaaaataggtttagtactaataactaatataataattaaggattatcagtgaatttggtcatctgaattattcctggcttaatttcaggaatagtggtcatactgtggagaccatctcgggattgcacaacctgctaacatctagttcaaagttgagatgatttgtaaaagagctgatttcatgacacctttttggacagatgtcattggcatcacaaatagagttttgtattattattattaagtaaaatttctatggagactgccttcagagtacattcgtttattgatatttggtagggctttttaccggtatttgtaatggattttcatgactaccttaaccattggcaaatttaatgggctagactattagaaagtatatgacagtgctagattggatttctgattgattttactttcttccgccactctaaattggatgtggcccagctgttgtataagtgatagatgttgagtgagtggaatcttttaccacttgactgcccttttcctgtaattcttcgttgatggtggcttttgaagccacatttcaacttgcatcctaggcttttgctcagcatggaattcagtcattgaatgaaatctttttaacacttcctcttgcgtgccccccgagctgcacaggaggcgaggaggagggatgggatttacagcatttgccttgttttctgtgtgttgagtgaaaggcaggtgactcattagaggacgagggaccaacctatcaagccacacaaagattctgcaaactctgaaatgccaaccccagctggggcatgggtggccatgaggaaggctcccttagcccccctgctttcctctcctgtcccagttcaggcagccttgcagtcccctcaagccgaggcctactgctggagggcttgggttgtgactgggagtagcccaggtaacagaagagcagaataaactttcaggaactgaccggggtgaccatcctgcctaaacccacacttctgcctccaagtgctccgtgcccctgacccgtgtgttattttcttcacagcacccacccctaaataaaattgtttgtgtttactgcatattccttcccacaagaaggccacttatcgccaccttctcctcactggagcatttgtgttttgagctgatagggtcgtggcctatcttgttcgcttgtatccacaacacttagtacgcttctgtgcacatggcaggcatctgaatattttttgaataaagaaaggaactaggaaaagtgcttgataaatgcttattgatggagttaataaaccagtgcctgggtaacctagggaagcaggaggaatgtgggatccaccattcccagttcacagtgtcaggagccccaatcagtatatggtgtactcttaattctttaactctgggttttcacaaccgacaccatagcagcctcctccagccccaggcacacacacgcacattccttggcagccacccgggagttaaataagtacagaattgtgtatatggcatgattccaagattgtactaaggaggcaaagggaggacttacaactcttcaagacaagttacactcttgtgaggaagagggtaggggaacaggaatcatctattaagcagaacaagcatatatctagcctgctttctcctgctgttcagttcttttaatttagcaaacacattttttttctttcttcgagggcagggcatttagataggagctcagaataccaagcagtatttatgctaacctaactaaggctttgcaaaatgaaataaatcaactgcagaaacaaaccccatgttctggattctcctgtaaatggcacacacgacgttgggctgtttatcattattcatgccaccatacctttctcctggtacaaatgactggacgtcagcagtataactccgaaagaagagcattagtccagaaggaaagaattcatgaaaagtttgtggacaacattctagaatgttatcagcatcagagaacacttctgtaatgatacgactgctactaaacaaggaattatgccacattgctcatcaaatggattctgtacatttgttcttcaagttaactttaaaacatcttacagttgggataaaatacatttttaatgaaatctaatttttagaaaatgttataaaacaaatggaaaaatacatagagtttgtgatcacgctatcattacctatacattttcaaaactatacgcttcggacattttaagggggaaaggtgagtaacctacacacatgcagcttattaactagaccatgactttgagtgccccagcctttaacaacgaaacatctcggggatcatccaaggctttaaaatacatgagacacacgggtagtggaaggcagtgcacagtccttcatcaggttcttgatggggaaactaaggccataagccttattgggacaatggggaaactagcatgtggactgttagataacagtattgcattaatgcctgatgtcctgtacatgatcatcacttggttaactactggggggatgtccttattcttgggaaatgaatgctgaaatataggagtatgatgatgtctttaggcttgcagctaattctcagatggttcagagaggaattagtggatcttgaaaaagggtatgtggatgtttatgctactatcctttcccttttctgtagctctgaaatttttcaaaatacacttgggaaaataacatacagggcgtcagagctcgttgtctagacacacagttttcatgttagggctccctaactggcgtgcaccccagtgaatgggaagagtccattagctcctattattcatgcctgttgattgcttgccttactcctcaggtcaccttggtcatgttgctttactgttctcccgacctggtgttccatgtgtgtggatgtcattgtagaggcagtgcagcgtcttcccgagacccacagttagcacccagagagagggagccatcagtcatactcaagggcaccagaccagccaccagcaactaagtttcttcataggagtagatgaggcgctttgtttgttggttggttaattttacttaataccgcagtgttttccaaaacgcagagaccctgaaaatgggtccatttattttgtgtctttatttcctcttgaacctctacaaaaagttcattttaatatcactcttatttttatactttattcgtcttttatgagacttgctttatacatgtatcagaaaaggtctgtgctcacctggggtttcagaataagattatatttatagcatactggaggagcttgctaccgcgggaaccctgtgttaaactctttcaatagaaaggactcctactcgtgaataatcctttgctgggtcactttctgtaactacgtttatataatgcttaccctatgctactcactgttctaagtgcttcactaatattaactcagattatcttcagagaaaccttcggaggtagatactgttattatcctcaatttacagatgagaaaactgaggttaagaaacttgcccagggtctggcagtggtaatggacagagctgatgttgagacccggaatcctcgcattgcactcacgtgtcaagtttgctgaaagtgaagcccacctgcctttctgaacgctgagattagacctataatttaaactcttaaaatttttcatatttataaagtaacttttgtttttcataaaacatattgttgatctttctaatttaagaaaaagatatttctggtggtggttaactgtccacttaatttctcagtcagccgggggtgggtagtccttctggccttagcttaattactaaccttgaaaatttttattgtttttagggcctctgtctgtttcagtattgttgctgttgtatcatatgataatgcagcaaacacccctgtaactaccaccaggttaaggactagaacattgctgtgtctggaagctctctgcatcctacccaattacaaccccttctcttctcccttgaggtagccactaacctggcttttgtgataatcatcccctcattttctttacattttcctgaatgacatgttgtttacttttacctgtttatgaactttattaagcaactggctcatgatcattgtattctttgtgacttgcttcttctctacattgttcatgagatcgcccaagtcgtctgtagcctcagtccattcattcgtagagtattccgtgtattcattcatagttattaatcgaatatccttctactattgatgatttgggttgctgccattggggagttcttaaaatcagtgcttctaatcaacattgttccatgttgacagttgcacgtgcagcaggggtttgctgtgtgtgtgcgcccttggagtgggattgctgtatcgtaagctctgcaggtgcacacaccttcataggtaatgctcaaactgtttcatgcactttttactcccaccagcagtaggaaggtacctattgccccagttcttactaacactgggtcactgggtattgtcaggcattcccatttttgcctgtctggtgagtatgtaatgctattccattgtggttttcattggcatttccctggagacaactgagtttgagcaccttctccgacaaatatattcaccatttgagtttgttctcttttgaagaatcagtttaggaatgttgcccatttttctatcagatttccccggccatgtttttaacatccttcctgccacaggcatacaacttgcacgtgagtaaccttagcctacgtaaaatgaggcttcctagcaagctccatggtagaaagaaggctccatctgcctcactgggcccgattttgctctcggagaaagacttgagtaaagccttgcggctctgaatttggccgtgtgccagcactgctgaaatcagattgtattgcagcttttgtctgtttttctcctcagtggttctcaccattcaggaagcccttcagctcactgttcaaaaagtagtgggtctctggattcatccaaagtctacatcgtgtctcacagcagcggacaacaggttcccgggtccatgtccaagccctaccacagacaaggggcagtgaacaaatatgtcatcggctggaagaaatcggagggcagcccaccgcccgaggagcctgaagtgactgaatgtcccgggtaaggtggctggctgttcttctctggtcagcatttttcactgtagggattgactaagcaaatgtattttcctcccaaaggaaatgtattttctaaaaaagaataatctaaaaacatctttcttaaactctttaaatgttgatgtttatatttccctataaaattattctcttgatttttacataaaaaaaggaaaagaaatctgtgttctttgcttttatattcaaatctgcctgcaatagaaaagtcatggtaacatgctgctgatggtgtgagtatagcgtctctataaatacaccaggtcaaaggcagttcaaattcccacagagtcctgtgtgttccttaaagttgccgtgtaagtgacatcctaaaacaaaaagtatttttcttaattttagcatgacttccaattttccttttagttgttaggtttgaggttgaggggggcgtggtgggcacgtaggaaaggatgctttgtatctgtttgaaaaagaaaaagatttaaaaatactgataacccatcttacaacacttgtgaaaactatgctgatgcctctgtgaagagacaggtaaataaattgcattcaagaatgcagagcaaggctggctggggctaaggaactatttgcttatttcgtaaagaagcttaacagaatactcgtgctaaatgatcaggtctgtgtgctctgctgtacctgcctgcgatagcgtcatcaggcgtgtggtgctgagcgtggcttgcacccacactgggatggctcttcagagagagcctccagattttacactttgccagtgaactagtatcacttttttctcttaaaaaaaatgatcctgtgtcttaaatacagctcatatgatattgccttctaaattaaaaattcttttagtgcttaaattgaacatggaatcttttgttaaaaaaatcatgtcagtcattgcaaatggcttatttaggaaggaatttcatagtgataactagccctttttattataaatgaaaatggtagaatgatacattggtatttctgtctaataagagtcttctgagtgcttcacgggaattcattccaagccttttttaagttctgtgaaatatttttagaagcattttatatgtcgccgtagtactatgtttaggcgaaggactcttttggaaagtcagggaagtgtgaaaggagcccattcggacagttttaatgcaaaagcccagggtttatgcatttccacgcactggtttgatggcactaatgctcagtgagagcgaggcagtgtccagaatgaggtgagaaaggggtttgtgtctcttgagtcgcaggttgtgtgcacactagaggagactgagattgtgtctccgctggagctccccacctggggacccctgtggtatggaagggcaaatggcagtccccacacatgctcttgggtatacctgggaggggagaggctgtagaagttcttctgtcctaagctgcattttatcgggaggatttgagctcaaactggttatcgcaagaggccggtgctgggattcgagaccagggctcctggtcagtgtgccggctcatcctggcagatggagcaggtgccccaggctctgcccagcaacacagagtgtttctaaggcaaggcagtcatacaggactgcactaactagatttgaagttttatcaaaacagtgttttaccggattgctgaaagatatgcttagaaaacagtcagccaagtacatcatatttttagtgtctcattgtgcactgaagaagaaatcagttgtgctctccaaaagtttcacatagaccagttatttctcaaaatcatattgtggaagccctactgttaattttgttaataatatcatcttacatttttaaataatatcagcgaatgagcagttctgtctcaggcttctgtgcacccattcatgctgttccctctgcctaaatgtcctttgtgagtttctgagcctggccagcaccctcccaaaggggattgttctctgcacccgctagctcagtacttcctacagtgtcttcgcacttgattggtcatctcagcctgcagaacatataccacatacataccacatgcacacacccccggactggaggtcctgtgcaagccccctgtcctgcttaacttcactactcacggtggcaggcacagagtaaatcctcagagcgtatttatgacacgtcattggataatttctttaaattactagtttagcagagaaagctagtgtttttttataaacacatattttaacacatattctataaacgtatatagaaactagaacagcacattgtaatcgtaattatggatgtaatatttttatccatgcagttattggtaggacctgggatttttccccgcatctttcccaaaacacatacggcctggagctcttgagcaccacctaactcacctcaggatcgaatgttgggcgcttcttggatgcagtcttcgtaaaaactatattgttttgttttccttatgtggcttttgtgcaaaagccctccagcgtcttggtttcttcttgtagctcccatttttatgtcatgccatcccacaaaccaactaaatcttcagtaatgttttaaaagttatgaaatgcttctttttttttttttttacagccactatttgttcatgttgtaactgtagcttgtgcttcaagaactgagaggtacagggaaacctgtcctacctcaggaataaagccatagaggattttagagaaatccttcttaattttgagcatgtttgtgtatgtttcttattctagcaatttcccagtgagctgtcatacagttataagatagcctggcttttgaaatcaagagtcatctcagaggcacacagcaataacattcaggtcattctccagctcgttgctgtgggctgtgaattcctagagtgttatgtttcaggttgtgtggcaaagactgtttgcctccactgacagtgcagccgctgactgtttactgtgtcttcaggaatatttggttgctcagactgtattttcagagtaaacctttttagaatgattccccagttttgtccctgtaaaggagctaaaaacagtaattcagcttgacactcctttgttgtctgtcaatacatttttatatactgataattaagggagacggctgctttatccaaacagctttgtgaaattgctgataataaaacatgcttagcacacgtgtgaattgatgactcgtaaaccccgggctccctcgggtggcttcctctctgttgcctgggtgccatcggggctctggttgtccagccgcgagagcacacaagcgttgcttcgaaagacatatgatcatctctgatgaattattgaaactgtgttttctgacacagattaggaaagggaaaacacagccgtattttaaaagttggctgtgtaattttttcatcctgggctttggggatctgatttgtgtctgaattattcagacatctaactttgtagttgagctcatttcacaaatgtgaaatggcatgggaatttggagcaaacgcagcaaaagtgaactgacttaagacctaagaagtgtttgtatgcgtttgtggctgttgaaactgcttcctaggttttaattcttaccactacaggcactttacaaataggcttaatttccattctgattgttttcaacaggatgtatagtgagatggatgtcatgtccacagcaactcagcatcagacagtggtgggagatgctgttgcagagactcaacatgttctgtctaaagaagattttctgaaattgatgcttcctgacagccccttagtggaggaggggcgaagaaaggttagtgacttagggagctttgaagttaccagaaacactaaaaaaaaaaaaaaaaaaaaagtctaaagaaactcagaggtttccagagtactcccacatgcttcatctctcatgaccctaccaacaactcactgcacatagttgaccgttgccaattttgattgtatcagtatgtgaagggagcctgggagaggttaagaaggctgtttttaaaacctcagatagagctgaaagtccggctggcctagcctcaaatcctggctccagcaatgggtagctgcatgactttatgcaagtgacttggcctcttgacctcaatgctctcatctgaaaaaaggagatcataataactgaattgtgaagttacagtgaagataagaagtgatgtctgaagagcctagtacagctcctggacataactagtgatcgtgaacagtagctgttaaaattcacaccacctgacttttgttccagagctctagcctctgctccaagctgtctctccttaaatgtaatcctgttccagaactgaactggagttagacagcacactgctgggcattttaaacagggttggaacttgcacactgccatttagagatatgcagagatcatagggaaggtcatgcttaaatctcataaaccaaccccaagttcagtggcatacctttgtcattcacaatgtagtactcgataatgttagcttgcttattggcttcagtttcattattattgcaatctcttaagccactttgctaaacaatttaaagtactgaaaaggacttaaaggcgatttagcccaatcaccccatttagcaagtaactgaggccccagatggtaaaatgtgagctcttcataaatatttggtgccagagtcagcaactgagtccttgtctctcacttctaatccagcactccctcttgttcatatgaaaaggaaaaaggaaatcaggtattgccatactgaccatgatcagggtaaactgcaggtctttgtgcttctgtcttccctatagtaaaacaattctgcaattaacctaattgtgtttttagaacaacactctaattagacactactgcaaagctgctttaatctgatatgcctgtaatcaagttctgaagaacctgctggtggtgtgtgaggagggaatcccataagaactccatcataatgagtcttttttaaaaaacttacatcaagtcatgtacatgatactgtataagcttgggtgcaaaggcagactgttgtacaaagagtgtaaatagcttttctttttggagggttgaacttcttgacatgtgttttttcttctaagacaaatcaccttcttttcatgatgtaaatttaactttgtaactcacacacattccagttacctttcatcagttggaaagacttgacagaatggaaggaacacacacaataggaatatttttagacttactgctacattcataaatgtaaatagccatttctttgtttgatgatgtgaacattctggcttttactattgtttacctaaaaggattgtggttcagtatgcaaaggaagtagttgaaaattcagatttgatttaacttttcttgagtatttgaccactcatttcttagtaagaattttccttaccctatctgtaattaaacacaacaataattttaatggttcatttaagtctggttatgatccattattgtaactcaattttcaacaattatacagactttggcaagtgatactttttttttttccaagacggagtcttgctctgttgcccaggctggagtacagtggcacgatctcggctcactgcaagctccgcctcccaggttcatgccattctcctgcctcagcctccctagtggctgggactacaggcgtgcatcaccatgcccagctaattttttgtatttttagtggagacagggttttaccatgttagccagaatggtcttgatctcctgacctcgtgatccaccagcctctgcctcccagagtgctgggattccaggcatgagccactgtgcccggccacaagtgacacttttaagtggacagtaagactttattggactgctgctgatttttggaaatgtgtttatgtggccggcaaagcttcaatgttcacaattagtcttattattatttagattagattgaacctcacatgtagttgattggtagagaaattgcctaatattacaatgtagtcatttcaaattaaaatcaaaccagtattatgtggagctttgaataactattgcctgaaatggcaaccttatataactccaggaactatcactgctataaggttatggaggttttatttaacatttcagagttaataaagctgtgcatgtctaattcatgataatatttcatagaatgtcaaaggaggaaaacataaaatctaataactgcacccaagccctggtgtatttgccttgatcccctgcatgctgcgtttggcattcttgagctaacagagaaaactcaaagaagctatcacaatagtatgtgaaaccactggacttagtccaacaagccccgtgcattcgtttttttaatgtctgttccctcctcgcaccttgtttaaaccctagttttcgttctatgggaacctgtctccaaggaggtcgctttaccgcacgctgtctgacgagagcatctgcagcaacaggagggggtcctcctttggcagttcccggagttccgtgcttgaccaggccctgcccaacgacattctgttcagcaccaccccaccctaccacagcacgctgcctccgcgggcccaccccgcacccagcatggggagcctgagaagtaagtgaggggctggctgctccctggccagcgccgagggtgggctgatcgcacaactcctgcctcattgagctctgagggtggagtgatttaggagtttgtttttgtttttattaaatatatattatttggtgttttaaataattttcaaatatagaagccccagagtggacattttgaaaaagttaggtaacactacctattttgaaagcaattgagaaactcatgttagatatttctgtcaagtccaatagtgacttctgcatcatatctcagctatcatatctataaaggaaaaaaatgtctttagcctgatttaaaaaaaaaaagaaaagactgatgtaaggagtgggttttccagtgggtgacagcaaggagggacatctggttttctagccttcagtttcttcgtgcagttcagtacctggagatggggaggtggcacgtgtgcctcgggagacctggcttgtagactgggctttacccgtgggcggctttgtgttcctgtgcagatgacgtgtgttctcttgtgtccccgcttatttcaacttactagtcacaggtcaacctgacgatttctagatgattttccttcaaatcctaaaaatctttgatttttatgtagtgtcaagtcttcattaatgtcagtttttaagggcacttttttttatgttagccttatttcctttatacatagttatttttgtacagaaaaaatgggaatttaatcagaaatctattcattgccaagttttttttcatttcatcacagaaaatatctttagaaccaattcgaacttcataatacacttagaagtcccaggctaaatgaaatcaaagttctaataatatttccaatgtttaacataattggaaatgaaccttatctcataaaattcttaatctacttctttaagtaacataataacctgcctgttataaagagtccatttacctaaattgaagaaacctttaaacgccttcttgacaaccatgtgaaaggtcagccagacctaggccactttcctaatatttctccagctgttttctcttttttgtaaaaggtaacttcaatgtcctcttaaaagcttttgtaaaaccaatgaacctctattttcctgcaagtgttatttcatttacagtgtttgaagtgtgcttgtgaactctctgtggtacgtgtgttatgttggtcttacattctacccttcattttgtttccaggtgaaagatgtatgtcctttttttttttttttttttttttttttttttgttagcttcacttaaaaaaaaatagacttcttagagcagttttaggttcacaccaaaaaatacaggggttttccatatacctcctcaacacattttccccactgtcaacaaacccctgccctcaaagagtggcagtggtacatgtgttataatcgatgaacctatgtggacagatccttatcacccaaaggccctggtttacattagggttcgttcctggtggtgtacattctgtgtgtttctaaaatgtgtaagatgacatgtatccgccattacagtatcattcagagtagttacactgccctaaaaatcctctgtgctctgcgtgttcatccctccctcccctctagctcctggcaaccactaatctttttactatttccattgttttgccttttctagaatgtcgtatagttggaatcatgcagtatgcagccttttcagactggcctcttctacttagtaataagcattcaacttcctccatgtcttttcatggtttgatagctcatttctttttacagctgaataatattgcgtcatctagatgtaccgtagtttgtttagtcatatactggagaactgtatccttttttaatgtgttcaaaggcacaattaggaaacagtcaagttatactgttcattcactgtcctagctgaaaactgcctcacttgtcttcatttttacttctctagaaaaagcactaagagttttccttgccatttgctctctttaaagaaaccttcttatttggtgatacatctcctccaatagctacacttaagaaactactcggaaaaagttctctaggcttgatggatgaactaacaaaatataaatcagaaaactggaggtaatttgtattgaagtgtattcccctaaagacttctgatttccaacctcctgtccatggaaagtttaagcttccagaatctaattgtttggaggcctctagttccctggccttctgactaccacaatcgcctatgtgattatagatgctccttgacttacgatggggccatgtccagataaacccaccataagttgaaaatattgtaagttgaccacgtatatggcgacctaacctactgaacatcatagcatttcctagcctaccttaaacgtactcagcacacttgcattagcctctaattgggcaaaatcatcttgcaacacaatacactatacaatatcagttatttacccatggaatctcgtgcgtggctgactgggagctgtgactcactgccagttcagcattgcgacagagtgtcataccgcctatcactagccagggaaaagttcaaaattcaaaatttgaattatgatttctaccgagtatgtatcacttttgcaccattaagatctactcaagacaggttttaataatcctcttctttctatggtttctggccattctgtagaccctctctaagaagataccactctttaagaatagtttgacagtcaaaaactagagcagcccaaaaagctgaaatgtgagtgttaatgcccagaagatgtctttgagcgagaaatgaggaatatttgaagttgcccagtagtttctcttagtttctcagagagatatagcttcacttcaaaacttggagcagaggttggttccagatggttttgaattgctgtgtagatagagttgggcagaaaactcagaaagcacagatactcttcttttaaactttaaaacatagagcattcatagggaaaagagaatctttcaccaggagagactcaatcagattttgtttataatttggagggagggtagcagggcaaagcaccagtaactgcccatctcttcccagtgaatattggaagacctaatctctgcaccttttctacatgtaattatcatagtcacaggcttctctttcaggtatttttagcttttaaaagttacagatttgaatctgtctcaatctttcttctcttgagactaagatcttaatcttcatacttaacaagctcattttggatgtaattcatgtcatgattcatgtatatttcctgtgaagtcactgcaatgtgctgtatctttatgtcttcaacttggaggtatgcaaatatcacctgatccagcagttgagaatatttctgaaacatttctgccttgcctttaggacctttgtttttgtcattggtagattgcagaagaaaatttatttaagggcccaggtgagaaaaaaaaatgacagtgggcttttgaacacacagttcacaggccacataaccagtgacactgaaaagcagtcatattttccttttattccttggcaggtagacacctgggttcattcagcacaatcccaagcattggcaggctcacaggcttaaagataattttttggttttttatggaacggagatcaaaactctgaaatcttcctatcagaatggactgatgagaattcttagatttcaaaaatgaaaatagagaatattatgtgtggtttcaaatcctatagttctgacctacgcacatcacaaagaatgccccttgaagttaaaaagtgggagagtgggagagtttagaataaataaaataaactggtattttagttataatgtaatacttgcacatgttgcttcagaccacatgtgtagcctcggtggttttgtgttgtagatgataaggactaccaaccaccagaggaagaatctttgccaagggtggcatggcaaggtatccatccatctgcaaacagggttttgactattcagtatttgactaggcagtgttattcagtgtaatacttctttctcttttttcaaatgtcctcagtcttccctgtaataaacatcggtttctgaaaagtgtaattgtgaaacctcagatatctgaccaccaggaaatgctgttgagaggctccttggcatttataataatagcaataaactcagactcagtaaagatggttactgtgatttcaggttttgggtaaacagacgggaagccacaagatcaatgtcgcttgagcaggtgcgcaagccagagcaggtgcgcaggcagtggttccctgatactacccccctttcagaattcatgagtctctcgaaaggctgacttaggtccgtatgcaacatgggcagtaagaattgtgagcacggagaagtgtcttctccagaagtgaggtaggatggcatctacccaactgtgcccaaaaaatgctttcagacagtgtcctcccctctctcctgttttttaactcatcctgagaactcccaagaaatattatgggtatgaagtaaattcagttactattgttttctactcactaaatgtctcatcttgtttgacattagtatgtgataccatatgcaaaattggttcgggtttccatttggaaaaactctgtgagaaacttgttatgccaggaggtcaccgtgcttcgtgtggggagcctgcaaatgtgccccacacttgtgccacccacttgcctaggctggcactttctttttttttgagacggagtctcactctttcgctcaggccggagtgcagtggcacaatctcggctcactgcaagctctgcctcccaggttcacgccattctcctgcctcagccccccgagtagctgggactacaggcatccaccaccgcacctggctaattttttgtatttttagtagagacggggtttcaccgtgttagccaggatggtctccatctcctgatctcgtgatccgcccgcctcggcctcccaaagtgctgggattacaggcatgagccaccacgcccagccacagtcttgtcttaattggccagaagagttgtacgggctcctgaggcttgggagagctggatttaaaataacaggctttgatacctgaggcaaatgatgcctttcgtataaaaccgtacaactgaggagacaagacagttccagccactgtggcatcacaaagcacaggtgatcaattgctcttgctccttcaggtctgcactatgtgtatctttttttgttgttgtttggagacggagtttcgctcttgttgctcaagctggagtgcagtggcgtgatcttggctcgctgcagccaccacctcccgggttcaagcaattctcctgcctcagcctcccgagtaactgggattacaggaatgtaccaccacacccagctaattttttgtatttttagtagaaatggggtttcaccatgttagccaggttggtctcgaactcctgacctcaggtgatctgcctgccttggcctcccaaagtgctgggattacaggtgtgagccaccgcgctcagccagcactgtgcatatcctactccaaacccctctcagaccaacaccaacagtattcatctgtttgttgacagggctctttgaaggatagaacttgtgtcttactagttattctctccctaggttctgatgtagtacccagtagttcctggaatatagaagatgctcggtaaacatcatctgggtgatgggggtagtgataaaagtattgcatataattttggctagtttagaatctgtgttaggctgttcttgcattgctataaagaaatatctggggctgggtaatttataagaaaagagatttaattggcttttggttcttcaggctgttcaggaagcatagtgctggcatcagcttctggtgagggcctcaggaagcttacagtcatggtggaaggtagaggggggagcaggagtgtcacatagcaagagagggagcaagacagagtccatggcgagatgccacactcaaccagatctcacgagaactcactctcacgagaactcactcattatcatgagaatagcatcaagccatgagggatccacccatgactcaaacaccttccacgaggccctaccttcaacactgggaattacatttcaacatgagatttagaggggacaacatccggaccatgtcagagactcaaaaaaacaaaaacaaaaacagaatagtaattttcccagttacatgatattctaatcaatggaaaagaaaatgtatgtgtttttcatgttgattattcatggagatctataggtggctctttgtctaacaagactgccattggaagtcttcctgcttatggaaaaatgatggattttagatttaaatccccatattttcatagcttttattcctaaactatgctcttcattaagaagcttctcatcatttgtgtctcagccaagtgtcccctccttggacaggcctcccccaaatgtgccaccaagcttcacagtcacatcaccctgttttgctttctgcagaagacttaatcactccttgtattttcttgtttattcatttattgtcttttctttgatgtaaagcttcatgagagcagggccttgtctgccctacccactgttgtgcccccatcacgtggcaggcagtagtcacttatcaaatacattgtggtagactgctgagtggacagtgcttcaggtaaactcatgagaaaaggagacatctcatctgtgctaaccttctttgccagttctgcagtatcaaatagaagtcccattcaccactggaggaggggggacaatattttgtaataaagaaaaaatgtcaccaacaaatgtcctttgcttctgctccctgcttggccagccatacaaattaaaagtggtgaggggttgtctgggcttgcctttggttgtgaaatatacaccccgaaaccatctcagatccgagagccattagtgccacattgtgtggggtctctgcatgcattgcgtagggggtagcaggcagagaccttcagagctggttggctggcctgctccgtgggcagccgggcccactcacgcactgtgggccacaaagattcatgtttgtgccttggcaaaattatgaatggccacgtatcaggaactttagaggtgcttaggaattgtcagagcttatttcactcaagactgtcaggaaaccactctattgagtactggggaaagatgcacacagctgcaggagggaccaggggaaggggaagcaagggacattaatctcacatcccagcttgtgaatcagggcactggccgccatcccctctgttctcattgcattttacccctcttgtctactgtgttatttttctcttttcctgtctcctgttatcgccaagtaaggatcttgttgtatagtggtcttagggggaaaagtagcacatagaatgtgtgttaggcttgattttagccttcaagaatgccagaagctggaatgaaggattgtttctttataaacacaaggaaaattcacgagttggcatttcttagtaaaacatgatgaacagaatgtactttctgtagaaatggccgtatatctgaatagaattccattccgctccctgatgcttcccctccagtgagggaaggagggaggacagtgctgcagtgggcccagattccagcctgcctgacctccgcggccctcacagagctatgccgctcttgcaccgtttcccgaagagcccagccatgtggaaatcagtgacaaaagtaattgctgcctccatatttaatttctttacactcggtgcagaaaacttgccttgagcaaagcagcatatgagttgcagagagagaaggaagtgttttttaagtgaaggaagattcctgggtttctttacctttctgcttgagggtctttctttacctttctggaaccctttcttcctaagcaactgagacaggacccgacagccagttcagcccagtctttgcccagtagggagcaaggatgctcctgggaaacagtgagtgctgcgtgccctccttcccacctcccactcctgcgttgctgcttccctcctctgctggttaacctcttggcaaggacaagcacatcacacacagaacaagtagaataaggaagaaccagtgttgtttcaaagaagagcatgtggagaagggagggtggaaacaatgtggacaatatatccattactgggttcccttcaaaatagaggcagggaataattaggtggaatattaccccaacttctaaaggtggtaggtagcatggaaaattggcgtagctgtaactgttagagatctggtaagagctgcatttgtccagagtctcaaaaaagtctgtcggtctccttcaaggccaaatttactagctgtcttagtccagatgccagcatttcacagctacccaaaaggatgtgggaataaaaattacaggtgcatttggttaattatgcccccttacttaacataattgcaggctcaaacagccaggtggtcattattttgattggtctaattagtcagatgtgttcacaagcagctgcatgcagtgttctgggcaggttcagaaaaggcacattaaagtccagttgaagcctttttagaacttgtcctcagatgcgtaataagttcttaacaacgagtattattaatgacataaacacttaagtaccttgatgagagtttaaggagaaaaagaaatggaaaaggtccattcatagccaaaggaaaaccacccaacattgaatacagggtgggtgagtggtttctgctttagccattgataaaactaccttactaagtcagaaaggtaatccaaccactatgtgtgtgctttgtatatcaaatagcatcctcaatctcatgtattgataaaagcaaagttggtcttactacatttttataatcaattggtatttgaggcatctcaagtttgtggtgctcagcttagaagtgttcctcagtaagctttatgaatcaggatggagattgttccaatacttcttacagcaacgtaaaccctgcaacacttttaaaaagaggaaggtctcccctgaagaaaatgaggatttgtcttgcaatagtcagacctggatgtactcaaaagaagccccctggaagaaaaccgcgaaattacaatagtgtacagaggcttgattctaatcttcctgccatccctgcccttacatgctggccaacctctcactagtgcagactcgcctgctttttacaaacctccatttttccagctagatcccttttgggcaactgcagcctcatgttttctttttccattaagagcaggaaaaattatcttggccactttgggaggggatggtggttcctgtgctgactgactcactgggaggggatagcattgcctgtgctgtgctccgactgactgactcctgactgactctgggagggacagtggtgcccgtgttctgactgactctgggagggacagtggtgcccgtgttctgactgactgactctgggagggacagtggtgcccgtgttctgactgactgactctgggagggacagtggtgcccgtgttctgactgactctgggagggacagtggtgcccgtgttctgactgactgactctgggaggggcagtggtgcccgtgttctgactgactgactctgggagggacagtggtgcccgtgttctgactgactctgggagggacagtggtgcccgtgttctgactgactctgggagggacagtggtgcccgtgttctgactgactgactctgggagggacagtggtgcccgtgttctgactgactctgggagggggcagtggtgcccgtgttctgactgactgactctgggaggggcagtggtgcccatgttctgactcactctgggctggtgcccgtgctgtgactgatgactgactctctggttttgtttctgtttagatgagttctggttctccgatgggtccttatcagataagtccaagtgcgcagatcctggcctgatgcccctcccggacacagccacagggttagattggacccacctcgtggatgctgcacgggcatttgaaggtaaagactcaccagcctctggcctcaccccttaccctgggagtgctttcctgcagggcctgtgcggcatcttaggggagcccgtctgtctcccatcgtctggtcaaagttttgaatgttttgccttgttggatgatgaaaacaagcaggggctggcttgggctgtgaggacatttcctgagggagatcatgtcatttagtaaaaggagcactaggcaagaaatctgaaaacccgaattctagctctggcaccatttgtgacctgggtgggacctctgtttcctatctgaaaagtagaggtgattgtatggagagcaccttgcgtctttcctcatagcatactgaggtataatgtgggggacacatttaggaggcgggagctgctaggcttcgccggacaagcacaggccgagaagtctgttcacctggcgtaaacacagactccagcgtgattggcttgacccatgcaagtgtctttggctgttgaggcctcggcttcttcctcttaaaatgtgggtcagtgagggtaggtgggctagccaatctctaagagccatccagctgccacactgtcttctgtcatttttggttgaggctaccccttcaggaacacctttgtccagctcgcagataaaggtagacaaaacaaggaagatgcttgcttcacgtgcagcctcaggacctcacggtgatactgtgtaaacctggggccctcgggatcgtgacttatgacgttttgccctttgccgctgcattcttcagtgagtttttacgatggcaggctctggcactggggaacctggcagctaggactgacaaaggaggcaggatcattttagtaggggctgtttaatgccctgcgctctgtgagactctcatggtgtaactgagtcacagcatcctggaggcgcccgagtccactgctgccttctcaggcctcagggcccttccttctctttctcactccccatttcttttcccttctcagtctctgctagcacagccccatcacctgtgacaccaggcctcaggaaacaaaatcaaattcttttcccaggaggggaggtgcatttgaagtcaaaatgcggaaggttgagggttcactgcccctcatctgtgactagcgtaatgcgttagggaggcccgatggtggcttcgctctacccagctggtatcagtgcctctggtcctgagcctctgggaacaggagttggaatccactctcaagtggacacaggggaagtaggtgaaaggcagcttgctaggaggaagcttctgcaacatgaatgtgcgctcactgctccctaaatggaaggaacgagactgctttctttacaaaccactcagtccttgtagaaatttcagaagagccctgtctgcctgtctgccttgtggggagaccctcattctctgatgctaccagaagttagttgcatattttagaagccccaggctggtggtctagttgtttcctgggctccccatgcttctagcactttcttgggcatgacccagcaccagagcacagggacgctgtctttacctctgtccagagcaacccagaggggaggtaacaccattttctctttccctggggtgttctttacacactacagtctctcactctgaccagatctttctgccccaggagagattagaccagagataagatctctgtgtggcctcactgtgtaactatctgcagagtactgaacgcactgaattctgcttcattctcatgcctgtctcttaagagatgagtttcttaagagaaggctgcctcttttattattttatctgtatttgtcaaaaatacatatcaagataaccaaaggagaagcgctagtaacaaggagtaagtaggtattcaatacacacagttttacacagcccagaactatcccagctcatagcacagctctcaacctcttatatccttttgcattttgtgatcacctttcagatttcaaacaatatttatcaccttatctctgtatctacccttgtttatgtctttacttggttcccttccacccctttcaaatgttccttcagaacagaatgactgctagaaaatgcatttttttttccaggggattagagaaggcaaaatggtgcatggactgaatgatcaatttagggatttcggtcataacttcagccatttctgggccataggcctttggacaagtcacttaactactatgacatccacactttgtcccaatactcttctaggtcttttacaaatatgaacttggtgaatgttaaatagtaatccttttggacatgtgctgaattaatttgggcttcagtcttctcatctgtaaaatgaagaaccaaagaacctgtaaggaaagcttcatctagtcctaaacctctagttctgtggtttcattatcaacaagtatttctaagctgaagtaagagtatgggtggtagttggcacagaagggaaaaagtatgacatggaaattctccctagccagtgccctcaggtacatgaatgcctaaattaaacagaaaataatgtaatattctatttgccaaaggagaagactttggttatctgagctttaacattgataaaataatgtggaaggagttaccactgacccctaacattgatagataaaataatgtgggaggagttagcattgacctctaacattgatagataaaataatgtggaaggagttaatgacgtgtttaatttttgatgctgctccatagggtggcatgtcatggtgagacagtagccagcttatgaaaatttggttgagtatgtgtacctcctttggctaatcaggttcccttgtatcagtgttgcctcaggttgtatcccagtgacctgctcccctgtctcgtgagttgcatggtggtgatgagcgtgatcaatctccttagcacttttaaagagaaatgtcttcaggtagataacccagttgccctgctcataactttatctttttgtaccagttctcaaggccatttctgagctagagtaaacattataaagaaaagataacccaaaacatgtccatgtacttgtttatgttattgctgcaaactaacaaaggcagttcaaaaggcttattgcctcagacttccttggaataatcctgtgcccctatttcagttagtatatctgaaaataggcttggaaaatggaatttacctgcctattggattgagatcccatgatccctataaaatccaatagtgtaattgatccctggcagacttgcctctcccccattagtctacctcgtttatgctacacattttggcatatgatatgttcaccttcatttaagggctaaagttgacattggatgcgagtttaagaatttagattttactataccactatactataccaatttagagcagaggcaccaaattaagctgtcaaatcatgactacttaaatgtttaaactctattcgtgcaaggaccataataaatggtatagttgtgggtgagagtcaggtattctgtgcataaggactcagtaagctccctccaaaaaggaggcgtgtttccagaccacattgctgaccataaggcagtgataatagaattaaataagaaaaagagaagcaaaacacaaaaatctgaccacttagaaagttgtaaatgttactgtaataataattatgctgggaagaattaatgaatatgacaagagcaatttttttaggatcatgaaaaagatgctttgtaaatctggactacacccagagagagggtagcttttaaagaaaaatatgtttcagaagcatttatttcaatggcaaaaagggaaaattaactaacttaactgtacttaaaaagattccacaaaaactgtgaaagaaaaacacacaaagaaaaggaatgaagtaagttgtaaaaaaaaaagcaactggcaattgaaattacactgcaatttataaataaaactaacaacctgagtttttctttgaatattgataaaccaatagcaaatttgatccaaaatataaaaaagtacaaatgaaccatgttagaaaggaggttaagttaacatgagaagaagacagtgggaccaaaatgacctgtgcagaactgtgccatctccctgcagaggacagtgggttctgccttacccctcaaaccccagatacctctaggataggaatgttattacctctccctggcttggattatggagacctcgtgatcttttggggtcttgcactccccaccataatgcaaaccaggccagcctgaaccataaaatctggtcaagacgagaccctgtccttactaaagaacttggtttcctgtaaatctaaatatgtaaatgtacagtattagctgtagaggcagaaggaaacctgtcaaagggcaatctagagatgcaagctcagaacaccctccttaattcactgtagcacatacacactgcctgcccagcttggctgatcccagttgtggggctctttatttacccagaaaatttcttttctgtctttaatggtataagatgatgcacttgatcacttaattttctgcaaaccttggcaggctacttggctggttccttctgcacaaaatactggtataccaccctaacccccagcttctggccccaagtggatctcagtcctctatattttctaattaatatgttctctgggtgacattttaaaaaagagacatagagatttttttaattactaaggaacgtcaagtagctatataggaatacatttggtggataaggtacttagattatttcttgcaagaaaacgttgcagggagcataagaaacggtcaaaggcccaggtgtggaaggcattgaaaaagtcacccaggaatatccccaaataccaaatatattacctgaaaataataagtttacagttaattgttttcagagtttcaaagagtaatgatgcccttgcgtatatatatatatatattttgaaattcagaagcagccttcttgcatgataggattctttcctgataaacacgtacacacaggaaagataattataagacaatctcagtctttaatattagtatgagaaagcttagatgaaattcagtagtaaattgaaaagattattcattgttattggcaagagtttagtttagtaaaagaaaaactttaattaaaaagttacagtaggtgaagtaattaaaagctatatcaatttgtcccaaaaaagtatatctaatagaattagaacctatttcttcaaaaattaagatttgagagatacccccaaagactaatatctactttatttcaaatggttacatagtacttaatagaaaatgtttataagcagattgcttatgtccagaaactaagcaagtgtactctttgagaccgtgccctttaatttttatactggaatctttgacatttaaacaaggaatgcaaagaaaaaaagggataaatgttggagataaaagaaatttagatagggttttatacatagaaaatacaaaagatcaaaatgaagtttaattagagattataaaataggtaaagtaattagatattttgaaatatatttttataagtataatttcaaagtgttattaattttttcagttacctattgctgtgtaacaaaccacccccaacatttatggctaaaaacaacaatagcttattatttcttatgattctctgggttgactaggctcagctgggtggttcttctgctccatgtgatcttagctggggtcactcaggcagctgcatgcagctgcagctcagctggatctggagcattaaggagatttcactcacctgtctgtgtctggaatggctgaggcctagtgggacccctgccttcagtagagtagttatatttattcacatgggggcttaaggaattagaagagcaaaagcagaagttctgtgatgtcttaaggcctggttttgaatgtcccagaacattatattcaccacgttctatttaggccaaagtagttcacaaggccggtattccaggggtgcaacatagactctacctctacctcttgatggcaggtgcacacagggaggagttgttggcagctgtctttggagacagctttccactgtaatagtcacaagacaccttagatatatcagtaagattgaattaacatgttctttgagaagtaaaccatcggaaatatgagagaattccaaggaacgctttaatatctgaaaagtcttaatatgtaagactagaaatggatagaaagcttcatagtaaagatgacggtgcttcctgaattaacttgtagagttaatgcaatttcaagaaaaatagttgaaaaactaaatttgcctccatttggaaaataggtaaatgatattcaaccaaaagatctattataacttaataataattaaaacagcataattcaaaaatagggataagaatttttgaagaaaaattaagagctcagacagaaatctgaatataagagttacatgggtaaggaatttatgtattccatttggatttaggtatttaaaaagtcaactttagaaaaagtaaaagtaagattgtggttttggaagcaagattatgctttaattatggagtagtgagagaacatacagaatgtaatatggtcagataaaggtatttaaatatttagaattatgggagcctgaaagagaatattaaaataaaagaggaaatattggactttaggaaaagatttctaaagaatgtgataggtaaaaccaggatacctaaagtacgtaaaggaacttacccagcaaaaaaacaccaaacccacagtaaacaaatggtcaaggaatgtgaatataaatttcacaaaagacaaatgcacaataaataagaaggtgaaaaatgttcaaccacacatgtaaatttaaagaataatgagttaccagctcacactttttgaatatgaaaaatgatacaataactctaggaagctatgaagaatactcacagctggtatcattataaagattataaagtgatccatctttttgttcagcaatatgataatatgttactactgccagaaaactgtacccaccttttaaccagaaatctaattcctgagaatttgctgacagaaagttattaaaaagaattaaaaagcttccaatagaaaaatattgtgcatttaaaaaaattaataagtgatcaaataacatatctctacccaaacagtttaaaaaaaaaaaaacagtccttcataggtctaagaaggcaaaagtaagttggatgccctgtgcctcccccatgctgtaaggtcaagtttgaaaagctggcggagtcacattttagactttgttttaatgtatgcagttattttgtttgttggagggcaaaacatgtccttcttacatgtcagaattcctaagtgaaattggtggtctgtctagttcaataagatcatagttttgccaccctgcagtgcttatcataccctttgttacgtagaatcatgtcaagtttgggggtacctgataatgtatataatggctttcgtcccccgttaaacatggtaatgggaacaaacccgaccagaaaacctggctatgggtcaaacagtgaagctggggaagggaagtggagtctcttcaaaagctctaggattttgagtagctctcattcatcagaatatcagaaagaggcagttggtgtgtttttagcatttgttgaatggataatgttgttttcagtgaacataggcttcaaaggtaaaatcaccaactagtgatcctagactctggattccatgttgctgccccacgaaggcctgtcctcctaggtttccagacttccccagttggtggtagagatcgccatcttcccatagctgtttgggagcatggacgtgtgtgtgctcctgtgcaaatatcaatgtgaaagacacatgcagagttaacaattcacattccaggcaccactgtggcaatgaaatgctccacataaccgtattttccaaaaattcaaagtctgtatctttaatttgttgtgttctttaggcccttggtttcttaaacagagcataataaacatccctttttatgatgagaactttttctgttatgaagcttcagcttaaagttgataaagttgttacagttattgatatttgaccactgtgtgtatgagagagtgtgtgtatataagtataaacaaaatgtgacttactgagtaactcctagtggtaacataattagtggaaaaaaaaatggaaagaaaaatgactaccacatgggtgaagaatgcaaagtcaaatttggaatagtaaatccatttaaattatctcaaaagtaaattgaaatggtttcaggccaatgcaatagttgtttcttaaataaagaataatttcaggactttttcttgttaattactcataggcagatactagaccattatctttttacatgcatggatgggcttccaaaagtctaaaccagagaattttaggtggaaaacagtacagtgcagccttttttcctttcctagtggccagttaagtcagttttctgcaatgcaataagcacaggtgtcagaatcaaaacttttaattttctacatgtagctacaaaaccctactttgtctttagtttgcagttctaacaaagacatattagaacagctttatttgtggaaataggtttaatttcaactagcctcgtacttggatgttccatctggcatgtatctggggcaggcactatcgttctattcctcaccctcaacagacatgacgcgttgatcagaccattcacccccaccagtccagccttggccttatgttggacagacataacacgttgatcagaccattcacccccaccaatccagccttggccttatgttcaacagacatgacatgttgatcagaccattcacccccaccaatccagccttggccttatgttcctggtgctgcaggcatcctagacggggtcatgggagtgacttgcagtcatctgttttgccatcttggctctaggatatggaatagcctgttgactattcatcttgtttagtgctaaatgcactaaaaataagaaactgacattgaaataaggttttttaaaagattattttaaaggatggattgttttgtgtgtcagccatgcccagcgttccaccttagccagatctgctcacacaggaaagaaaaccgaaggggctccacgtgtggagtgtgggtgattggatctgtaccaaccgtgaccacgtacatgaagctcctattcttgtgcctgtcttttctgatggttttgttggtgccatttgattctatctcagtaattgcttgattattgaatatttatcatcagaaataagctgaaggggcatgaagcttccactggaaactgtctctaagattagctattttataaagtagcttggtgtctgtacttaatcaaatagcatcctctttgcatttcagcctcccaagcttttcaattccaaagtgaaatcctgtttgtgaaattacattgctggcaaaactctagttttggcttcttgcctcctgaccagtaggaccctgtttctccctaggggatgtctgaatgactgcctgtaggaaattctgtttctgttaaatatgtgggtattttatcaattaaggtaaaaacagatgaaggaagctaaggcatgttcatccatgtatttagacttgaccaccagacccaaatacattgagaaagaaacataactgaattatcactggcttgcataaaacaaggatgagtcaatgaaactcctaaagagttagacaaatttttatccattttcttttccattccttttctggtcagtaaagtcactatggaataaaaatatatctcctaaagattttttaaaatgtgatgtgttcccatattctgggctctttacagaacagagggttatgttggacaccactgcagcccagacctccccacccagcccctagagcagctcaagcccagccaggattctgcccccagctctgctgtgcaggtcacatcatagtagaagttggcagggccccaactatgttgttgatcttaattaaatagcaaattactttatgcaaaaagcctactatgcagtaccaaattggtaacatgatgctcaggaatgtatagttatagaatgtttatcatcttatggaagattcgatgtgtggagctttacagaattagttgaaagacatctgcctgcctagggcaggtgtgttagcaaatggagccacatggatggagaactcttaatgcaatcagtagctgggtgcactcaggagggcccaggcctctgtcagggcactgacggtgctttcagcaccatggccacagcctacagccttggctttccttcatatgttcctggcagcttcaatgtgaccatcctttttaattaactggaagtgtatgacctgccataaagcaaacaagcaggtagcctcattaggaggcttgtccagcagccagagggaggcagagtggggtaaattaagagtggagcacccctgacacggatccaagtgcagtctctccagaattaaccaattcataggaaaaggactgccacagcactaacacgcctgctgtatacctcagattcctactgtagatacataagtgtgctcagaaaccaagcagagagactccagggaatgagggtgaattgatcatggaatagattgcgaggttctcacttccatgtggttcaaaaacagaatattttcctgcatgccattcagcatttctggattgctgttcttggtcagtgctcagcccccagagctgggccagtctggcgcccattcttaagactattctattccctttccttccgacctcttaaaacattgaatattaagttcctagtgccaagaataaaaatgtccttgtgctaagataaggcattgtagtcatactgatcattggtgctactgctatacatactgagcccctcagatcttcctttaagggtttctagtgagattacttagctaatctctcttaccaccactctctttggatttgtggagtgagtcatttaagtaagcccacagttgtgtatgctcatggttggatccatgtgtgtatggcataccacatgtctttgttgtaccctacagccccgcttccaaccaacagtgaaaacatgaaatgtgtcatctcattgcattggagttacatgatactggctctcaagggtttcccctggtccatcacacacacacactacttcacacagccgcattttgtgggcccccgagattctcaagtatagagagatactcctgttcataggaaaattctaaatcttatttcaggtcttgactcagatgaagaactggggctgctctgtcaccacacgtcctatctaggtgattgtctggggctgctcgttggctcctgatatcctgtaaccttttctgtatatttcatgtgtctgcacgtctgcatggttattcacgccctgagggttgggggtgcacagcgggacatgtgtcctggctgttctgtctccagaaccttctccgggtttggggagaacttgagagagaggtccctctcctttgttctgtcagtcgagtcattatccaactattatttcatgcatagccagcagctttggcatttcttgggatgtggaaagaagaaagcaaattggctgtagcaaatccagtgtctgctaattgtccccatggctgtgatgtgcataggccatacagcccagtaggaggacagccaatctccatgctttctccttctcagaagcttgcctgaatttgtttttctttgttttgctccaaaacaaggcagtaactggtttgaaggggggaaaagattttatttagctattgcatttccacaaagaaacattgccttgcattgattactaacccttctttctgtgtgtgtttctcccctccccagaccagagggtggcatccttctgcaccctgacagatatgcagcatgggcaggacctggaaggggcccaagagctgcccttatgtgtagatccaggcagtggcaaagagttcatggacacaactgggtatgtgagcccctgtggacccctccctcctgctgttccaggcatgattagccaagattcggctaaccgactaaccctgagccaggcgggcgaccatattgcaccatgccctttcccagtcctgaagaatccagagaagggactgagtgggactacttggctccctgccctgctgtgggagaccgctcttggctgcatgacccctctgctccatgggcacaccctgcctgccaagacttgtgaccctgtgcccatggtgacgagcctcactgtcaaagagggcaagaagaggcctcaaggtcagcgtctgctgctgaattactgcaacagcaccatgcagggataactcgccgattggccttccacctgccaggctgcacatgctcaccagcccagggcatggcccctcccagaacctggtccttgatccagcctcatgccctccactgaaatatgttgggaacaccccactctttcccctatattcatgacatgttcattccccgtgaaatgtgtattctttacctctgtcatccattcttaattccaacttctatgtgagctgaatatagaacttggaattaacttcattaacttgcatgttcacattggtaacgagcttcataatattgttatcatagggaaaggcaaattggggaaattgactggttcccaggacttcatttgggtcttccttgtctccattggataaaccaacttaaataatatatcttttgttttcctaccaactcgtatatctatagagtttctgcatctctttttaaatcagtaaagtcccagaatgggctttccactagatcagcaatatggacactttcccattctgacataatataatatatctgcttgctgggctctaagcacatgaaataattttttcgagtgaaaacttgaccaacaaaaatgctcgattgactctcttgaatctttctaattctatccttatttgctagggagcgttctccatcaccactgaccgggaaagtcaatcagctggaattaattcttcgacaactccagaccgaccttcggaaggtaatcaattggaagagcataatcagaactgtttctcttataaaatcagccccttataactactacagataaattgaaaagactcaggaaagaaaactgccttacacaaaaaccaatgataaataccaacagatgctcctgaggtctcactccatctgctgacctgcagctgatgtatttcattttgtgggatgcagggatctcaatggatatgagtaaatgaggatgagcccttggtgtggcaaatcttcagtgtgtagtagaagcatggtgggccagcattttttagttcagtgagttatcagttgcgccaactctgtatgagatgacctcagaggagtccattgctgccagaaagcctggtctctatgagtcctgtcctctgtcttgaatcagcttcacagcccttagaacttctgctgtacacatcaacctgcacatggtctgtcctcaaaagaaattaaattctgtatcccacaaatacttggctgagctctgttccatcagccctgtgctggagagccagttggctgtccagggaaacggaatggggtgcggtagcaagcgggagggcatcacaggaaggtttttgttgtgatggtttggtttggtttggcttatgaagaagggagaaattgtagctggtgagaatgctgaggaaaggattcagttgggagggaaattatgatgagggtgaagagcaagtgggtggagttctgatctagtcacaaggagggagctggccttggataggagtagggacagctcatacatagttaccagagtggagcagagtatgtgtgcacatgtgtgtgttcatatatgcacatgttcattcacatacacagggtccagacagagatgttggcaaatttctctgattgtttcttttctttctagtcatgagctaagagtggtgggagtataagagttttgtggatagcggatatgggtgcaccacagcgtgtaaaccaaccgggtttaggagacttgcccaaaaaaagctaaagcacgtttgaatttggagcataaattaaagcgatacctgttttcctggtcgtgtgttttttccccagcttgggtgaccagctgtcccagtttgcccgggatggagaagttttctaggatgtggaagtttccatattagaaccggcaaagtcccatgcaagctgggatggctggtcaccctatctccagctgcaagtgtagaaccgttggagagttgaatttagccaatattaaagtttagacgggaaatcaagacgagagagagagagagagacaaggaccctggggcgtgtacagggcatgaataaaccaaagaacctggagtccaggctggttgaagagaaataatgtcactgctggggaatggctgggttggaggtgttggtggacagtgaaaataagagtaagattgataagattgatggagtctatcattactggaggagtggatactggagaaattatttttaaaagactggaggtggtggtcaagaagtaggaacttgaaacttttaggaagaggtgcagtcattgacaatagcatggtataggatgtggtcatgggagtgggggttgaggagggtggggtttgaagatcactgagagaaagcgatggagaggctgaacggccagagtgtcagatggaatatctcagtggattcgaaatcatcaacacagatgacaggagtgggatggggagaaaagagcaaaccaggttctagaatcttcccgtaatgatggttggaactggggatacagtagataattgcagccaggaggggtagcaggtctcatgacctaatggcacgttttttagaggagctggaattgtaggaagtagtggagatctggcctgaacaatagaggatgcactgtctgcctgcccgacccccatagtgagctgctggggacggtctcctcgggagggagccaggattcacttagagcacgaagacgaaaggaatttcaggagagactgagcgtgcacaaggtcttcttggcagaatccaagttcatggatcacaataaaaggtttgcagggatgtggagaggtgggcagccgagtcgcagcagagatgtgctgagctgtgggactcagactgtcttgggactgagagtcgtggtgaggaatgtccggggagagtcagtatccagggtgggctgcagctgcttcttagagtgaagtgagtctatccagggtgggctgcagttgctccttacagcaaagtgagtggtcagctctgattcaggcctcctctgaggaccagtgtcttttgggccagtgaccaggcaggtggtattgaggagggccttggaagggctcaggaaacgaggaagccttgagggcaggaccagatatgccaagggtgggggcgtccactcacctcactcaatgctcctgcacagtgctgggggtggcatgtggtggctgtagtggttgagttagatcccgttacagaaataccgattgttacaatctgacagtgacccctctattcatttagggcaaggcatccctttcagcagggggggaactgaaactgctgctatacatttttttattgctacatgttggaaactccagatgtgattcttctgaaagtcttgattatttttacacagtttttaatagcagattttaagggtcattatggaaatatagtatagcaggaaagcttgatggaatgaaagacctaagtacatattttattataaacatatgtaacagctctgctaattccaattttctacttagaaagttttgtgcatttgtcaaaagggtattacctttaacctccctgtagtctcccttttttggatagagggtaatataaactatgatgaacacccttcctatataaaggctatcttagcaccccatgggagcagagtgggatgaaagaacagggtgtgtggagtgttcattcccatccctttgtcatcagcaggaatcaggatcagaaaagtcccctcactaaagaaagtcaccccttctcccctcaaaaagtacataagtaaaaataagaatcaaagattctcgtagcccagcttaggaggaatgaatgtatcgatcagtctccatgactcagtttatttctactctgaccaggaaaaacaagacaaggccgttctccaagcagaagtgcagcacctgagacaggacaacatgagactgcaggaggagtcccagaccgcgacagctcagctgcggaaattcacagaatggtttttcaccaccatcgacaaaaaatcttagccaatccgcacctcatcaagggaccactgggaaatgccccttgtccctttgaagtcacaaacatgtggtttttctgtgtgctttcaaccaatcgtagatgtttttgctgttccattctgtgtagcaccattcaccacagcaggatagggagcctcgactctttctcggtaaccacggcagagagcagcgccgatgtgaagatgaatgaatgtaactcctggtgtgaagatgaatgtaaaccctggcgacagttgagacctttttcttttagactctgctaaaacagtgctctggcttgggcttacctcaagagggaagatagttgagttttatttcctgtatatcaggtgacctggtagagatgtaaagcaatttaccatagtttgggctttagtattgtaaaataaacatgagaacaaataatcagacatatactttaatgttaaaggtgctctatttttttggatgtacagtagttttatttccacagccacattaccatagcaataagaaaggaggcatagtacatagttggaaaagctttgtggggggattaaaaaaaaaaaaaagcactgttgtgtttaacactagttcagatgcagttaccttagagacttatttatttgcaggaacaaatggtgcctgaatattaacagtgttctgattaaaaacaaaaaaaagatacatatgccttgtaaatggctcaccgagtggtcagtagtcacttcaactcttagttcacttttgtatagttgctctgctggaaagaaatgagagtgaatctgcttactcactagaacttccctgtgtgctgtgagccagcggaaccacttgtacaatgccagatttgtttatctttgtacagaagctttgatgaagtgtcttgtatttaacacccttatttaagcttatttaaccttaaattgttaattttataaaatttggtttggcctgcactacgatgagggatggaggtagctgcaggctcagaagagactgagcttgcacagatcagaccgagaagcagggtgagagattctaacgactggatgctgctagtaacacattgtttgtattgctttaccatttttaactgttagatttgagatgaacatacattttgcttttttaataaatgtttaaaagaagtccacataagaaatggtgttgtcaggtgactagattttttgtgatctaacatgtcaacagtctgactgtatgtgaatttatttcaggtcatttagaaccttgatttgtattaaatactgttcagctcctttctcatagaatcccagatcgatttcaggaaggagtacctagcagtttttaatagctgctgtgtggcggacactattctctgaacttttcatccatctcatttaaccccaatggtatctatccttcataggtaggaggtggggttcccatttacaaccacatgaactgtgggtcaagtgaagtaatttacgcaagactgcctttaaaaaaataaaataaaataacactttggtgttgccagcactttgagaggccaaggcgggtggatcacctgaggttaggagttcaagaccagcctgaccaacatggagaaaccctgtctctactaaaagtacaaaattagccgggcatggtggcacatgcctgtaatcccagctactcgggaggctgaggcaggagaatcccttgaacccgagaagcagaggttgcgatgagccaagatagcgccattgcactccagcctgggcagcaagagcgaaactccatctcaaaaaacaaacaaaaacagtaagagtttgaaaaattatcaggaagaggtaaactgtaaatttgaatccaatgtaagaagacacaaaacatagatccaggtgtgaagggaaacactgtaaggtccattcctctcaacctttgaagaacagaaagcatatcaagaattcagaggaagcaaactgactcttagaattggccccaaaaggaattttccatatgggcttcacatgagaggcatattgaacaattaacattctcacagtggatgtagcagtaggcttcctaaagctgtttcatgcagctgccctctatgaaatgcacaggtgcacatccaaaatttgcagccagggactggagattttcagggaataaggaccttatgggccacatagatactgtccttcctccctccttcccttttttttctttcccatcagtgtgaaccaggcagcatgctaggagctgaaaatccaacagtgatcaaccggtcagggcccctgtgtgcacaggcatacaatctaatatggggagacagacataagatcacttcaaaacatgaaagacagaaataaaagtacctgcaacaggctaccttaagtaattattataaacactgatactgtttgaatagctcctgggtgccaggtcctgttgagctttgtgttacctacctagcagccatgtgaggtaggtgccatcatcactcccctttttaaagatgaggaatcaggacctagatagggtggtccatgggtagacgagggcacatgaggttcaaagtccctaaggttagtgtattcaagaagtctagcagaagccaggacgtaacggagggtagagtggagggagatgtgcttgaagagatcagcaaaagccacaccatgaaggaactggaggccatgctagactttggattttgttccaagtcaaaaagaagccattgaagcaggaaagatgcctgatgagagctctattttaaatggattattctgacttctaaagcagaatggaccatgtaggtcttcaaactttctgtgtggggctttttctgcaaacgaacgatttgaggccttgggagtcactgactgcctctgttgcatattttcaaatttctatttaataccctttaaagatggtaagagtcattcttagcttgcaagaccacacaaaaacaggccactcacgagtataatttaccaatgccaggcataaggcaaagtacacgaggaagaccagtctaggtaagagatggtgttggcacggcctgtggtaaggcagtgaaagtggagagaagtaggtaggctacacgtgagaatgtatttggagatagagcccacagaactgggttggagacgagttggaagggttggatccagggatacgccctagacttcaaaggaatccatgaactgcatgttcatcagacggttttccagaaatatctcttgcctttagtaaaggcttaacaacaaacagttatgctcctggcaagggcctggaatacagctctcctgcgtatttgatcaagggtgtatgcatttgctttagagcaactaatcaggtggaaaggtggacatcatttagagaaaataaaggaatctgaccaaaacctagctgaatggaaagccattccatcttccgaaggcatgacgacaaaaccagaagacatttcttgaaaacacagttctcagtctatactagcaaaggaatgaatagtctctctcaagtccatctccaaagggccatgtcaaaaaacagggccaaaatgatttgggtctgttaagctctttcaaacatgtttccagtcaacaaccaaccaactacgtgctcccatagtacatgtagttttgaacaacttggtgtcctggtgaacactgttacaaaatgtaccccttaaaaactaaacatattgacttgctatgacttactggatacaaaccaaatattttgtggaatatatctgctaaaaaaattattttagaataagcaggtttttctaaccatatggagtgaactattatgtattaaggccattttagtatgtgacaaagttatttaggcttttatcctgctattctctatagctaggagaaggcttatgattagaaacctaagttacagttgaggggactgatagtacagttttgcctttgctgctgacaattatcttttgagtctgttctgggagtccactaaactgcagaatttgatcacctattatttttagccttcaaagtcatgaagccataaaacatagcttcttattggcacatccaaaaataaaaaagataactataaaaacattaataataaagacctgtaatgatgataatagacgagtgcttgaataggaaaatcacctgctccttgtataaaataattggcctgagaaacctagatctgtggtttagagaaagaattggcatacaatttagactgatcaacaaatgaattctctagttgtggagaagctgtgaacataacctctttaagagttaattctactgttttctactggatggaacgattgtgtcacaagaaacaagccaccatctgaggcagagccaccctcttgaccatgacaatcactgccccaccaagaaatacatttgtgtgaatctttctaagagacaaaggcccactactttcaggtcaaactctggggatcattaaatagcctcagattccctgaaatcacaccagtgtttattctttagaatttccaagttgagtatggggctgggaagaagtaataaagatttttgcacacacttttctccgttgaattactggttagtaagaaacaatttcagttcatttgagtgtctgtggattttgtgcttaacacatttaaaaccacttccctagctctagtgtaagcaagtcaggcatactactcactcccaaaaaagaaaatagaactaaatgggttctatttaacaccagttaggggcaggtaggaggaaactgtatttatgaccaacaggagagaaaatggtaagagacctgccaagacccaaggaatgcatttgatttctgacctataaattaaaccaaattaaaccaaagagcaagtttcctgactttcagtaataggaattaggcagaaacaagtacaaaggaagtatctcctcatgtattttataaaaggtttaaatgggcatcacccccaaatgtcacactcttgcattttgacacacgagatttggggacctttaagttgcttttaaaaaacacaaaaacataaatcctgcaagtcctctctagttcatgttaataccaaaaagtgtactgccctcttaaatccttacaatgttttgattaaattttagcatctgcagactcttaaaaacatttatctttgtttttcatctcttaatatcagggatctgcctaaaatttgcagagcagcctgttttttaagtagaacaaatgaaaaataatgagcccccttgacatgcaaaaataccctttggctgcaaagctggagctgagttagtgaaaaaacaaaatgaagggtaagacttccagtgtcctggccatcagtacccatcaatcaggctattaggcagtggtgttggaagacttgtaataaagagctgctctcccagccttactgtgacccagtgaaagccatgaggaaggctgtgtgcaggagagggcttcagagtggtagcatttcagtaaattgcctcaactaaatcagtgctggctgtaaatacacatctgcagatggagacttcaggccctggcagagtctcctccatcgctgtgtatgaaacaagctgggactgggcgtctgggcccttgcccctcttccccacgaccataatcattgatgccaaaccaagcggatcttgtggaatgctccattaaattagagtaattaaacatggcagtcgtgtgctgctctaggatctgattaaacaccttgtagaaccccatctgggctgagggcttgccaaacagcaggctacagcccacagtccccacttccatgaatataaaattcccagaatgggcattctgtgtcattttaaattaaatacttaagaacgcaaatagcactactcaggagaggaagtgcacggaagtcagtgggtttaacccctcaactcctacttggtcatttttcattgttactcttgaactgtaaggctgttgctctgccagcatcatcttaaaactatttgacttcagatgatcgtgaagggggaggaggggagggagtagagagagccctggtagtgacccagttaatgacactggcttctgtagactacactgtttatgtgaattccaaggtagatgggagcttcgaaaccaagtttttctccctaatttaacaggttcttgttctgttctttcaaagcaagagccacctaagtgatttgtcctgaaatgtaaaattgagattttctgggagtcttggctactgtcattgtttactgtcccattgggtagggattattcttgtcagtgacactgatttccaagagaaaaattgtattaagatccaaaaatgtagctgtataaggaaaggttctgaaggaatcccaccttcacttgtccaaataaacaatttttttttattttaatttcaataggttttagtgagcaggtggtttttggatacatggataagttctttagtggtgatttctgagagtttggtgcatccatcacccgagcagtgtacattgcatgaatgtgtagtcttttatcctccacccttccccttgagtgtccccagagtccattagattattcttacgcttttgcctcctcacagcttagctcccacttataaatgagaacatatgatatttggttttccattcctaagttacttcacttagaataatgacctccaacttcatccaagtcactgtaaaggccattttgttccatttcatggctgagtagtagtccatggtgtatatatataacacattttctttatccactcgttggctgatggacatttaggttggttccataatatttttgcagttgtgaattgtgcttagatgcgtgaagtggttctgccataaaaatgcattacattaacggatgtgaacatcaaacttgtgtatttatagacacacattttatttataaaagtagctgccaatacatacagaatagtccaacagaatatctttaatatttctgttggaaaatttgacttgccctgccctgccaaaataactcttcgttctttattttatttatttatttatgtatttatttatttatttatttatttatttatttttcgagacagagcctcgctctgttggccaggctggagttcagtggcacagtctgggcttactgcaacctccacctcccaggatcaagcaattcttctgcctcagcctcccaagtagctgggaatacaggtgcctgccactacgcccagctaaattttcttttgtatttttggtacagacggggtttcaccatgttggccaggctggtctcgaactcctgacctcaggtgatctgcctgcttcagctttccaaagtgctgggattacaggggtgagccaccacgcccggcctaactgttggttcttatagaaacctgttgcctttattcttccctgagacttcatcttgcatggccttgttccctcctgaattatggcttgtgatgaattgtattttaaatgaaaaggatagggatgtggtaagtgttagcaaggatgtggagaaattgtaaccctggtgcactgttggtgagaatgtaaaatggtgcagctgctatagaaaatatattgattcctcaaaaaattaagcttagaattgaccatatgatccagcaattccacctctgggtatgaacccaagagaatttaggaaagaggtatttgtacacctgtgttgtggcaacatcattctcaatagcctaaatgtggaagcaaccctgatgtccatcagtagatgaataaacaaaatacggtctatctatacaatggaatattattcagtcttaaaatagaaggaaaatctgacacgtgctacagtgtggatgaactttgaggatgttatgctcagtgaaatgatccagtcacaaaaggacaaatactggatgactccacttatatgaggtagtacagtagttagattcatagagacaggtaacagaatggtggtcaccagcaggtagggggagaaggaatgggcagttgttttgtgggtccagagtttcagtttgggaagatgaaaagagttctggaaatggatggtggggagagttgcagaacaatgtgaatgcacttcataccactgaattgtactactctaaatggttaagatggtaaattgtatgttatgtctatttcatcacaattaaaagtaaataattttattttaaaaagataggaatgcggcctgaatgagtgagtttgtgaggacttggagtcgataagcacagggaaacaaggaagcttaatctcacaaaaaacaaagacctgttggaacaagtgcaggaaaatatagaaacaccactgaagtgctctctggatgttaaagagcagacagactttgatcaattgccatctattcagagagaggagacgtcagtccatggagctctgctctgggggcctgcaggaggatcaacaggggaaaagaagacctctctctgaagagtgattaatttggtaattaatgtgtagaaaaggaagaatgactgaagtgtttgctccaggccctaaattttaacatttagctctgcagtgggagcatctggtaggacactgaggttggatgagctaaagaatgagatcagacaccaggacagcaggagaagagattaaatatgaatagcttcaggggtgcttgaggattgggaagcttggacacagtggggaagaaagtgcttggaaagaagaaaagacaaaggccattatgagaagtcctggtacccactggaagaaagaagaaccacagagttggaggagaccaatcccttcactttatagaagactaagttctagatatacggttgaagaggtgagatcaaatctataacatggtccccgatagttattttttggttgaatcaaaggaagtattgtatttgtgaatagaggacactgtttgcaatttggataaggatatctgcactcaagattttattaatctcagtcaagtcagaacaatcaagacctacaagtgaaaataagaaagcatcattgaatacttttaagaggaggaattattgaggaaaacctaacttttgccattaacccaactttattggacctgcctacagcctggctcccatagtaatatctcccctggtcatcgaacaccagagcatacgcaaggtacaagtgtagaacaggtgagacttaagactccccgtggccccatgtgaccatttcagaggtgctgggacattgcccacctttctggccttcagaagggagaaatatccaggtcagcatgcatgcagctgactgcccagtgagaaggcagatcaaatttgtgcttatggaggacactggatctgggctcagttactcccattcagcctcttggaacttcatgttgacttgcccaactcctgtgcacctttacctggaaaggtcacgtttaaccagtgccatgagcacttttcaaaaggctaattgagtcgcctttctgtgccttcacagaatgtctgtgagctcatgctagcctatgcttgctattagggaaccaggaagtgtgcgttggtgcttttttttttttttggagatggagtctcactctgtccagtggtgttatctcagctcaatgcaacctccacctcccgggttcaagcaattctcctgcctcaggctccctagtagctgggattacaggcattcaccaccacgcccggctagtttttgtagttttcgtagagacggggtttcaccatgttggccaggctggtctcgaactcttgacctcaggtgatccaccctcctcagcctcccaaagtgttgggattataggcatgagccacagcgccctggccagtgcctttttttttttttttttttttaagagacagggtctcaacttgtcaccaaggctggagtgcagtggcacaatcatagctcactgcagccttggacttctgggctcaggccatcctcctccctcagcctcccaagtagctggggctacaggcacgcaccaccataccagactaatgtttaaattattttgtagaaatgtggtttcattatgttgcctaggctggtcttgaactcctgggctcaaaagatactcttgccttggctttctaaagctctgggattatgggcatgagccgccatgcccaggtgattgggacccttgagtgctatagagacagtggatgtgcacttcctacaaagctgcctcctttcagctggccagccttggcagaaatggaggatggactgagtgctcactgatccccgctgaccccgctgctgaggccatgaatctgttttgaagtgaggaggtaaactgtcttagacggctcctgaacagggtctagaaccccacagatccttgctgtcctttgccaagtgtcccgatgttgaggttaggagaagggacagggtccggctggagagaaagaagactgagaaggagtctatgcttgctacagatgccctgtgcccattttccatttgcatggtggccgtgagcagccacatggctgcagcctaagcttttcaggagtgaccattgggcctataatttattgtcaattacgtgaaaatcctagaaggaaaatctgctgtcaggactttatttttccttactcagcagaattgggatatctaagatcatctttgaagattctttttctctaagaagagatcatttacaaacagtattctcaagtactattttagaactcaccagagctttgtcccataactgacatttgttggttatgttacactgcaatgtaactcctagccccaaattataacgctcacttccttcccctcctcctctttctccccagagactatggtgaatacctgttatggggcagacactgtgcagggcattgggaatacagcatgagacagcctctaaggaggcggtagtgggtgaaggagaagactttatcaacaggggcatcaccatttgtcttggagtgcaaagtaacacaagcagcaggggagcagcaagtgggtatggagaggggctgcagagaggaaggagtaccagagccgggtactaaaaggcaaacatgcctgtgtcttttatttttatttatttacttttgagacagagtctcactctgtcaccaggctggagtgcagtggcaccatctcggctcactgtaacctcggcctcctgggttcaagcaattctcgttcctcagcctcccaagtagctagga

SEQ ID NO: 483 - DNA, 6542 bp, Homo sapiens
gtgaaggaaatactcatgaccagccagatgtcttaaggaatgcttttgaaaagaacagaggcgtacaacattattacgacaacagagaagcaagttggctttgaagaaactgtattctgaggatgttgtttgctttgggctaagaaaagaaaaaatacaactacagacaaagcctttatatctgcaagtattatggcgtggtcggtagcaatgtaattagatttacatcagtcttcctggtgagacttggaggctcttcctcggtagacatgagtgacccaaggcagtcacaagaagagaagcacaagctaggcagagcctcttcaaagttcaaggatccccctagaatcatgcagtcagatgattattttgctcggaaatttaaagccattaatggcaacatgggacccactacttctttaaatgcctcgaattccaatgagactggcggtggtggtccggctaatggtaccccagctgtgcccaaaatgggtgtgagagcaagggtgtctgaatggcctcctaaaaaggactgttccaaggagctaacatgcaaggcactgtgggaaagccggtctcagaccagttatgaaagcatcacttccgtcctgcagaatgggcagagtgaccagagtgaaggtcagcaagatgaacagctcgatctggacttcgtggaggccaagtacacaatcggagacatctttgtccattccccccaaagaggacttcaccccataagacagaggagcaatagtgatgtcactatcagtgacattgatgccgaagatgtcttagaccaaaatgcagtcaaccccaacaccggggctgccctgcacagggagtatggaagtacttcatccatcgacaggcaaggcttatctggtgaaaacttttttgctatgctcagagggtaccgagtagaaaattatgaccacaaagcaatggtcccttttgggttccctgaatttttccgctgtgaccctgcaatctctccgagccttcatgcagcagcacagatttctaggggagaatttgtccgcatctcaggattagattatgtggacagtgccctcctgatggggagagacagggacaagcctttcaaacggaggttgaaatcagagtcggtggaaacatctctcttccgaaagcttcgaactgttaaaagtgagcacgaaactttcaagttcacgtctgagctggaggagagccgactggagaggggcattcgcccttggaattgtcagcgatgttttgcacattatgatgtccagagcattttgtttaatatcaacgaagccatggctacgagggctaatgtggggaaaaggaaaaacataaccactggggcatctgcagcatcccagactcagatgcctacgggccagacaggcaactgtgagtcccctttagggagcaaggaggacctcaactccaaagagaacctggatgccgatgagggtgatgggaaaagtaacgacctcgtccttagttgtccttactttagaaatgagactggaggggaaggcgacaggcggattgcgctctctcgagccaactcatcctctttcagttctggggaaagctgctctttcgaatcgtcactcagctctcactgcacaaatgcaggtgtctccgtcttggaagtgcccagagaaaaccagcctattcacagggagaaagtgaagcgctacatcatagaacacattgaccttggggcctattattaccgcaaattcttctatgggaaagagcaccaaaactactttggaatagatgaaaaccttggtccagtagcagtcagcatccggagagagaaggtggaagatgccaaggagaaagaaggatcccagttcaactacagggtggctttcaggacaagtgagcttacaacactgagaggagcaattttagaagatgctataccctctactgctaggcatggtaccgcacgaggactacctctcaaagaagttttggaatacgtcattccagagctgagcattcagtgtttgcgacaggcttccaactcacccaaggtctcagagcagctgctcaagcttgatgaacaagggctgagctttcagcacaagatcgggatcctttattgcaaagcaggccagagcacagaggaagagatgtataacaatgagacggcgggaccagcttttgaagaattccttgatcttctgggccagagagtccgactgaaaggatttagtaaatatcgagctcagctagacaataagactgattccacgggcacgcactctctctataccacatacaaagactacgaactcatgttccacgtgtcaaccctgcttccctacatgcccaacaacagacaacagctactgaggaaaaggcacataggaaatgacatcgtcaccatcgtcttccaggagcctggggcacttccttttactccaaaaagcatccggtctcactttcagcatgtctttgtcatagtcaaagtgcataatccatgtaccgaaaatgtgtgttatagtgttggagtttccagatcaaaagatgtgccaccatttggcccaccgattcccaaaggtgtaacttttccaaagtcagccgtgttccgggacttccttttagccaaagtaatcaatgcagaaaatgcagcccataaatcagaaaagtttcgagcaatggccactcgaacgaggcaggagtacttgaaagatctggcggagaactttgtcacaaccgccaccgtggatacctctgtgaagttcagcttcattacgctgggtgcgaagaaaaaggagaaggtaaagccaaggaaggatgcccacttgtttagcattggggccatcatgtggcacgtgatagcccgggacttcggccagtctgctgacattgaatgtcttctcgggatctccaatgagttcatcatgttgattgaaaaggattccaagaatgttgtattcaactgttcctgcagggatgtgattgggtggacatctggattagtgagtatcaaagtgttttacgaaagaggagaatgtgtcctcctgtcctcggtagacaactgtgctgaagacatcagggaaattgttcagcgattagtaatagtgacgagaggctgcgagactgtggaaatgaccctgaggaggaacgggctgggccagcttggcttccatgtgaattttgaaggaattgtcgcagatgtggaaccttttggctttgcctggaaggctggccttcgccaagggagccgcctcgtggagatctgcaaagtagccgtggccactctgacccacgagcagatgatcgacctgctccgtacttctgtgactgtgaaggtggtcatcatccagccccatgatgacggctcgccccgaagagggtgttcagagctctgccggatccctatggtggaatataaactcgacagcgagggcaccccctgcgagtataaaacccccttcaggaggaacaccacgtggcaccgggtgcccactcctgccctgcagcccctctctagagcttcccccatccccggcacgcccgaccggctgccgtgccaacagctgctccagcaggcccaggctgccattcctcgaagcacctccttcgaccggaagctgcccgatggcacgagaagctcacccagcaaccagtcatcctccagcgaccctggacccggcgggagcggaccctggagaccacaagtgggctacgacgggtgccagtcccctctactgctcgaacaccagggctcaggccctttggaatgtgacggagccagggagagggaagacaccatggaagcaagcaggcacccggaaaccaaatggcatggcccaccttccaaagtcctgggttcctataaagaaagagctctgcagaaagatggaagttgcaaagattcccccaataagctttctcacattggggataaaagttgctccagtcactccagcagcaacacgctctccagcaacacctccagcaacagtgacgacaagcactttgggtctggcgacctgatggaccccgaattactggggctgacctacatcaaaggggcctccaccgacagtggcatcgacacggccccctgcatgcctgccaccatcctcggccctgtgcacctggcaggcagcaggtccctgatccacagccgggccgagcagtgggctgatgctgccgacgtctctgggcctgacgacgagccagccaagttatattctgtgcatggctacgcgtccgccatctccgccggcagtgctgcggaaggcagcatgggcgatctcagtgagatatcctctcattccagtggttctcaccattcaggaagcccttcagctcactgttcaaaaagtagtgggtctctggattcatccaaagtctacatcgtgtctcacagcagcggacaacaggttcccgggtccatgtccaagccctaccacagacaaggggcagtgaacaaatatgtcatcggctggaagaaatcggagggcagcccaccgcccgaggagcctgaagtgactgaatgtcccgggatgtatagtgagatggatgtcatgtccacagcaactcagcatcagacagtggtgggagatgctgttgcagagactcaacatgttctgtctaaagaagattttctgaaattgatgcttcctgacagccccttagtggaggaggggcgaagaaagttttcgttctatgggaacctgtctccaaggaggtcgctttaccgcacgctgtctgacgagagcatctgcagcaacaggagggggtcctcctttggcagttcccggagttccgtgcttgaccaggccctgcccaacgacattctgttcagcaccaccccaccctaccacagcacgctgcctccgcgggcccaccccgcacccagcatggggagcctgagaaatgagttctggttctccgatgggtccttatcagataagtccaagtgcgcagatcctggcctgatgcccctcccggacacagccacagggttagattggacccacctcgtggatgctgcacgggcatttgaagaccagagggtggcatccttctgcaccctgacagatatgcagcatgggcaggacctggaaggggcccaagagctgcccttatgtgtagatccaggcagtggcaaagagttcatggacacaactggggagcgttctccatcaccactgaccgggaaagtcaatcagctggaattaattcttcgacaactccagaccgaccttcggaaggaaaaacaagacaaggccgttctccaagcagaagtgcagcacctgagacaggacaacatgagactgcaggaggagtcccagaccgcgacagctcagctgcggaaattcacagaatggtttttcaccaccatcgacaaaaaatcttagccaatccgcacctcatcaagggaccactgggaaatgccccttgtccctttgaagtcacaaacatgtggtttttctgtgtgctttcaaccaatcgtagatgtttttgctgttccattctgtgtagcaccattcaccacagcaggatagggagcctcgactctttctcggtaaccacggcagagagcagcgccgatgtgaagatgaatgaatgtaactcctggtgtgaagatgaatgtaaaccctggcgacagttgagacctttttcttttagactctgctaaaacagtgctctggcttgggcttacctcaagagggaagatagttgagttttatttcctgtatatcaggtgacctggtagagatgtaaagcaatttaccatagtttgggctttagtattgtaaaataaacatgagaacaaataatcagacatatactttaatgttaaaggtgctctatttttttggatgtacagtagttttatttccacagccacattaccatagcaataagaaaggaggcatagtacatagttggaaaagctttgtggggggattaaaaaaaaaaaaaagcactgttgtgtttaacactagttcagatgcagttaccttagagacttatttatttgcaggaacaaatggtgcctgaatattaacagtgttctgattaaaaacaaaaaaaagatacatatgccttgtaaatggctcaccgagtggtcagtagtcacttcaactcttagttcacttttgtatagttgctctgctggaaagaaatgagagtgaatctgcttactcactagaacttccctgtgtgctgtgagccagcggaaccacttgtacaatgccagatttgtttatctttgtacagaagctttgatgaagtgtcttgtatttaacacccttatttaagcttatttaaccttaaattgttaattttataaaatttggtttggcctgcactacgatgagggatggaggtagctgcaggctcagaagagactgagcttgcacagatcagaccgagaagcagggtgagagattctaacgactggatgctgctagtaacacattgtttgtattgctttaccatttttaactgttagatttgagatgaacatacattttgcttttttaataaatgtttaaaagaagtccacataa

SEQ ID NO: 484 - protein, 1690 aa, Homo sapiens
MSDPRQSQEEKHKLGRASSKFKDPPRIMQSDDYFARKFKAINGNMGPTTSLNNSNETGGGGPANGTPAVPKMGVRARVSEWPPKKDCSKELTCKALWESRSQTSYESITSVLQNGQSDQSEGQQDEQLDLDFVEAKYTIGDIFVHSPQRGLHPIRQRSNSDVTISDIDAEDVLDQNAVNPNTGAALHREYGSTSSIDRQGLSGENFFAMLRGYRVENYDHKAMVPFGFPEFFRCDPAISPSLHAAAQISRGEFVRISGLDYVDSALLMGRDRDKPFKRRLKSESVETSLFRKLRTVKSEHETFKFTSELEESRLERGIRPWNCQRCFAHYDVQSILFNINEAMATRANVGKRKNITTGASAASQTQMPTGQTGNCESPLGSKEDLNSKENLDADEGDGKSNDLVLSCPYFRNETGGEGDRRIALSRANSSSFSSGESCSFESSLSSHCTNAGVSVLEVPRENQPIHREKVKRYIIEHIDLGAYYYRKFFYGKEHQNYFGIDENLGPVAVSIRREKVEDAKEKEGSQFNYRVAFRTSELTTLRGAIDAIPSTARHGTRLPLKEVLEYVIPELSIQCLRQNSPKVSEQLLKLDEQGLSFQHKIGILYCKAGQSTEEEMYNNETAGPAFEEFLDLLGQRVRLKGFSKYRAQLDNKTDSTGTHSLYTTYKDYELMFHVSTLLPYMPNNRQQLLRKRHIGNDIVTIVFQEPGALPFTPKSIRSHFQHVFVIVKVHNPCTENVCVGVSRSKDVPPFGPPIPKGVTFPKSAVFRDFLLAKVINAENAAHKSEKFRAMATRTRQEYLKDLAENFVTTATVDTSVKFSFITLGAKKKEKVKPRKDAHLFSIGAIMWHVIARDFGQSADIECLLGISNEFIMLIEKDSKNVVFNCSCRDVIGWTSGLVSIKVFYERGECVLLSSVDNCAEDIREIVQRLVIVTRGCETVEMTLRRNGLGQLGFHVNFEGIVADVEPFGFAWKAGLRQGSRLVEICKVAVATLTHEQMIDLLRTSVTVKVVIIQPHDDGSPRRGCSELCRIPMVEYKLDSEGTPCEYKTPFRRNTTWHRVPTPALQPLSRDIPGTPDRLPCQQLLQQAQAAIPRSTSFDRKLPDGTRSSPSNQSSSSDPGPGGSGPWRPQVGYDGCQSPLLLEHQGSGPLECDGAREREDTMEASRHPETKWHGPPSKVLGSYKERALQKDGSCKDSPNKLSHIGDKSCSSHSSSNTLSSNTSSNSDDKHFGSGDLMDPELLGLTYIKGASTDSGIDTAPCMPATILGPVHLAGSRSLIHSRAEQWADAADVSGPDDEPAKKVHGYASAISAGSAAEGSMGDLSEISSHSSGSHHSGSPSAHCSKSSGSLDSSKVYIVSHSSGQQVPGSMSKPYHRQGAVNKYVIGWKKSEGSPPPEEPEVTECPGMYSEMDVMSTATQHQTVVGDAVAETQHVLSKEDFLKLMLPDSPLVEEGRRKFSFYGNLSPRRSLYRTLSDESICSNRRGSSFGSSRSSVLDQALPNDILFSTTPPYHSTLPPRAHPAPSMGSLRNEFWFSDGSLSDKSKCADPGLMPLPDTATGLDWTHLVDAARAFEDQRVASFCTLTDMQHGQDLEGAQELPLCVDPGSGKEFMDTTGERSPSPLTGKVNQLELILRQLQTDLRKEKQDKAVLQAEVQHLRQDNMRLQEESQTATAQLRKFTEWFFTTIDKKS

SEQ ID NO: 485 - DNA, 6596 bp, Homo sapiens
gtgaaggaaatactcatgaccagccagatgtcttaaggaatgcttttgaaaagaacagaggcgtacaacattattacgacaacagagaagcaagttggctttgaagaaactgtattctgaggatgttgtttgctttgggctaagaaaagaaaaaatacaactacagacaaagcctttatatctgcaagtattatggcgtggtcggtagcaatgtaattagatttacatcagtcttcctggtgagacttggaggctcttcctcggtagacatgagtgacccaaggcagtcacaagaagagaagcacaagctaggcagagcctcttcaaagttcaaggatccccctagaatcatgcagtcagatgattattttgctcggaaatttaaagccattaatggcaacatgggacccactacttctttaaatgcctcgaattccaatgagactggcggtggtggtccggctaatggtaccccagctgtgcccaaaatgggtgtgagagcaagggtgtctgaatggcctcctaaaaaggactgttccaaggagctaacatgcaaggcactgtgggaaagccggtctcagaccagttatgaaagcatcacttccgtcctgcagaatgggcagagtgaccagagtgaaggtcagcaagatgaacagctcgatctggacttcgtggaggccaagtacacaatcggagacatctttgtccattccccccaaagaggacttcaccccataagacagaggagcaatagtgatgtcactatcagtgacattgatgccgaagatgtcttagaccaaaatgcagtcaaccccaacaccggggctgccctgcacagggagtatggaagtacttcatccatcgacaggcaaggcttatctggtgaaaacttttttgctatgctcagagggtaccgagtagaaaattatgaccacaaagcaatggtcccttttgggttccctgaatttttccgctgtgaccctgcaatctctccgagccttcatgcagcagcacagatttctaggggagaatttgtccgcatctcaggattagattatgtggacagtgccctcctgatggggagagacagggacaagcctttcaaacggaggttgaaatcagagtcggtggaaacatctctcttccgaaagcttcgaactgttaaaagtgagcacgaaactttcaagttcacgtctgagctggaggagagccgactggagaggggcattcgcccttggaattgtcagcgatgttttgcacattatgatgtccagagcattttgtttaatatcaacgaagccatggctacgagggctaatgtggggaaaaggaaaaacataaccactggggcatctgcagcatcccagactcagatgcctacgggccagacaggcaactgtgagtcccctttagggagcaaggaggacctcaactccaaagagaacctggatgccgatgagggtgatgggaaaagtaacgacctcgtccttagttgtccttactttagaaatgagactggaggggaaggcgacaggcggattgcgctctctcgagccaactcatcctctttcagttctggggaaagctgctctttcgaatcgtcactcagctctcactgcacaaatgcaggtgtctccgtcttggaagtgcccagagaaaaccagcctattcacagggagaaagtgaagcgctacatcatagaacacattgaccttggggcctattattaccgcaaattcttctatgggaaagagcaccaaaactactttggaatagatgaaaaccttggtccagtagcagtcagcatccggagagagaaggtggaagatgccaaggagaaagaaggatcccagttcaactacagggtggctttcaggacaagtgagcttacaacactgagaggagcaattttagaagatgctataccctctactgctaggcatggtaccgcacgaggactacctctcaaagaagttttggaatacgtcattccagagctgagcattcagtgtttgcgacaggcttccaactcacccaaggtctcagagcagctgctcaagcttgatgaacaagggctgagctttcagcacaagatcgggatcctttattgcaaagcaggccagagcacagaggaagagatgtataacaatgagacggcgggaccagcttttgaagaattccttgatcttctgggccagagagtccgactgaaaggatttagtaaatatcgagctcagctagacaataagactgattccacgggcacgcactctctctataccacatacaaagactacgaactcatgttccacgtgtcaaccctgcttccctacatgcccaacaacagacaacagctactgaggaaaaggcacataggaaatgacatcgtcaccatcgtcttccaggagcctggggcacttccttttactccaaaaagcatccggtctcactttcagcatgtctttgtcatagtcaaagtgcataatccatgtaccgaaaatgtgtgttatagtgttggagtttccagatcaaaagatgtgccaccatttggcccaccgattcccaaaggtgtaacttttccaaagtcagccgtgttccgggacttccttttagccaaagtaatcaatgcagaaaatgcagcccataaatcagaaaagtttcgagcaatggccactcgaacgaggcaggagtacttgaaagatctggcggagaactttgtcacaaccgccaccgtggatacctctgtgaagttcagcttcattacgctgggtgcgaagaaaaaggagaaggtaaagccaaggaaggatgcccacttgtttagcattggggccatcatgtggcacgtgatagcccgggacttcggccagtctgctgacattgaatgtcttctcgggatctccaatgagttcatcatgttgattgaaaaggattccaagaatgttgtattcaactgttcctgcagggatgtgattgggtggacatctggattagtgagtatcaaagtgttttacgaaagaggagaatgtgtcctcctgtcctcggtagacaactgtgctgaagacatcagggaaattgttcagcgattagtaatagtgacgagaggctgcgagactgtggaaatgaccctgaggaggaacgggctgggccagcttggcttccatgtgaattttgaaggaattgtcgcagatgtggaaccttttggctttgcctggaaggctggccttcgccaagggagccgcctcgtggagatctgcaaagtagccgtggccactctgacccacgagcagatgatcgacctgctccgtacttctgtgactgtgaaggtggtcatcatccagccccatgatgacggctcgccccgaagagggtgttcagagctctgccggatccctatggtggaatataaactcgacagcgagggcaccccctgcgagtataaaacccccttcaggaggaacaccacgtggcaccgggtgcccactcctgccctgcagcccctctctagagcttcccccatccccggcacgcccgaccggctgccgtgccaacagctgctccagcaggcccaggctgccattcctcgaagcacctccttcgaccggaagctgcccgatggcacgagaagctcacccagcaaccagtcatcctccagcgaccctggacccggcgggagcggaccctggagaccacaagtgggctacgacgggtgccagtcccctctactgctcgaacaccagggctcaggccctttggaatgtgacggagccagggagagggaagacaccatggaagcaagcaggcacccggaaaccaaatggcatggcccaccttccaaagtcctgggttcctataaagaaagagctctgcagaaagatggaagttgcaaagattcccccaataagctttctcacattggggataaaagttgctccagtcactccagcagcaacacgctctccagcaacacctccagcaacagtgacgacaagcactttgggtctggcgacctgatggaccccgaattactggggctgacctacatcaaaggggcctccaccgacagtggcatcgacacggccccctgcatgcctgccaccatcctcggccctgtgcacctggcaggcagcaggtccctgatccacagccgggccgagcagtgggctgatgctgccgacgtctctgggcctgacgacgagccagccaagttatattctgtgcatggctacgcgtccgccatctccgccggcagtgctgcggaaggcagcatgggcgatctcagtgagatatcctctcattccagtggttctcaccattcaggaagcccttcagctcactgttcaaaaagtagtgggtctctggattcatccaaagtctacatcgtgtctcacagcagcggacaacaggttcccgggtccatgtccaagccctaccacagacaaggggcagtgaacaaatatgtcatcggctggaagaaatcggagggcagcccaccgcccgaggagcctgaagtgactgaatgtcccgggatgtatagtgagatggatgtcatgtccacagcaactcagcatcagacagtggtgggagatgctgttgcagagactcaacatgttctgtctaaagaagattttctgaaattgatgcttcctgacagccccttagtggaggaggggcgaagaaagttttcgttctatgggaacctgtctccaaggaggtcgctttaccgcacgctgtctgacgagagcatctgcagcaacaggagggggtcctcctttggcagttcccggagttccgtgcttgaccaggccctgcccaacgacattctgttcagcaccaccccaccctaccacagcacgctgcctccgcgggcccaccccgcacccagcatggggagcctgagaaatgagttctggttctccgatgggtccttatcagataagtccaagtgcgcagatcctggcctgatgcccctcccggacacagccacagggttagattggacccacctcgtggatgctgcacgggcatttgaaggtcttgactcagatgaagaactggggctgctctgtcaccacacgtcctatctagaccagagggtggcatccttctgcaccctgacagatatgcagcatgggcaggacctggaaggggcccaagagctgcccttatgtgtagatccaggcagtggcaaagagttcatggacacaactggggagcgttctccatcaccactgaccgggaaagtcaatcagctggaattaattcttcgacaactccagaccgaccttcggaaggaaaaacaagacaaggccgttctccaagcagaagtgcagcacctgagacaggacaacatgagactgcaggaggagtcccagaccgcgacagctcagctgcggaaattcacagaatggtttttcaccaccatcgacaaaaaatcttagccaatccgcacctcatcaagggaccactgggaaatgccccttgtccctttgaagtcacaaacatgtggtttttctgtgtgctttcaaccaatcgtagatgtttttgctgttccattctgtgtagcaccattcaccacagcaggatagggagcctcgactctttctcggtaaccacggcagagagcagcgccgatgtgaagatgaatgaatgtaactcctggtgtgaagatgaatgtaaaccctggcgacagttgagacctttttcttttagactctgctaaaacagtgctctggcttgggcttacctcaagagggaagatagttgagttttatttcctgtatatcaggtgacctggtagagatgtaaagcaatttaccatagtttgggctttagtattgtaaaataaacatgagaacaaataatcagacatatactttaatgttaaaggtgctctatttttttggatgtacagtagttttatttccacagccacattaccatagcaataagaaaggaggcatagtacatagttggaaaagctttgtggggggattaaaaaaaaaaaaaagcactgttgtgtttaacactagttcagatgcagttaccttagagacttatttatttgcaggaacaaatggtgcctgaatattaacagtgttctgattaaaaacaaaaaaaagatacatatgccttgtaaatggctcaccgagtggtcagtagtcacttcaactcttagttcacttttgtatagttgctctgctggaaagaaatgagagtgaatctgcttactcactagaacttccctgtgtgctgtgagccagcggaaccacttgtacaatgccagatttgtttatctttgtacagaagctttgatgaagtgtcttgtatttaacacccttatttaagcttatttaaccttaaattgttaattttataaaatttggtttggcctgcactacgatgagggatggaggtagctgcaggctcagaagagactgagcttgcacagatcagaccgagaagcagggtgagagattctaacgactggatgctgctagtaacacattgtttgtattgctttaccatttttaactgttagatttgagatgaacatacattttgcttttttaataaatgtttaaaagaagtccacataa

SEQ ID NO: 486 - protein, 1708 aa, Homo sapiens
MSDPRQSQEEKHKLGRASSKFKDPPRIMQSDDYFARKFKAINGNMGPTTSLNNSNETGGGGPANGTPAVPKMGVRARVSEWPPKKDCSKELTCKALWESRSQTSYESITSVLQNGQSDQSEGQQDEQLDLDFVEAKYTIGDIFVHSPQRGLHPIRQRSNSDVTISDIDAEDVLDQNAVNPNTGAALHREYGSTSSIDRQGLSGENFFAMLRGYRVENYDHKAMVPFGFPEFFRCDPAISPSLHAAAQISRGEFVRISGLDYVDSALLMGRDRDKPFKRRLKSESVETSLFRKLRTVKSEHETFKFTSELEESRLERGIRPWNCQRCFAHYDVQSILFNINEAMATRANVGKRKNITTGASAASQTQMPTGQTGNCESPLGSKEDLNSKENLDADEGDGKSNDLVLSCPYFRNETGGEGDRRIALSRANSSSFSSGESCSFESSLSSHCTNAGVSVLEVPRENQPIHREKVKRYIIEHIDLGAYYYRKFFYGKEHQNYFGIDENLGPVAVSIRREKVEDAKEKEGSQFNYRVAFRTSELTTLRGAIDAIPSTARHGTRLPLKEVLEYVIPELSIQCLRQNSPKVSEQLLKLDEQGLSFQHKIGILYCKAGQSTEEEMYNNETAGPAFEEFLDLLGQRVRLKGFSKYRAQLDNKTDSTGTHSLYTTYKDYELMFHVSTLLPYMPNNRQQLLRKRHIGNDIVTIVFQEPGALPFTPKSIRSHFQHVFVIVKVHNPCTENVCVGVSRSKDVPPFGPPIPKGVTFPKSAVFRDFLLAKVINAENAAHKSEKFRAMATRTRQEYLKDLAENFVTTATVDTSVKFSFITLGAKKKEKVKPRKDAHLFSIGAIMWHVIARDFGQSADIECLLGISNEFIMLIEKDSKNVVFNCSCRDVIGWTSGLVSIKVFYERGECVLLSSVDNCAEDIREIVQRLVIVTRGCETVEMTLRRNGLGQLGFHVNFEGIVADVEPFGFAWKAGLRQGSRLVEICKVAVATLTHEQMIDLLRTSVTVKVVIIQPHDDGSPRRGCSELCRIPMVEYKLDSEGTPCEYKTPFRRNTTWHRVPTPALQPLSRDIPGTPDRLPCQQLLQQAQAAIPRSTSFDRKLPDGTRSSPSNQSSSSDPGPGGSGPWRPQVGYDGCQSPLLLEHQGSGPLECDGAREREDTMEASRHPETKWHGPPSKVLGSYKERALQKDGSCKDSPNKLSHIGDKSCSSHSSSNTLSSNTSSNSDDKHFGSGDLMDPELLGLTYIKGASTDSGIDTAPCMPATILGPVHLAGSRSLIHSRAEQWADAADVSGPDDEPAKKVHGYASAISAGSAAEGSMGDLSEISSHSSGSHHSGSPSAHCSKSSGSLDSSKVYIVSHSSGQQVPGSMSKPYHRQGAVNKYVIGWKKSEGSPPPEEPEVTECPGMYSEMDVMSTATQHQTVVGDAVAETQHVLSKEDFLKLMLPDSPLVEEGRRKFSFYGNLSPRRSLYRTLSDESICSNRRGSSFGSSRSSVLDQALPNDILFSTTPPYHSTLPPRAHPAPSMGSLRNEFWFSDGSLSDKSKCADPGLMPLPDTATGLDWTHLVDAARAFEGLDSDEELGLLCHHTSYLDQRVASFCTLTDMQHGQDLEGAQELPLCVDPGSGKEFMDTTGERSPSPLTGKVNQLELILRQLQTDLRKEKQDKAVLQAEVQHLRQDNMRLQEESQTATAQLRKFTEWFFTTIDKKS

SEQ ID NO: 487 - DNA, 27947 bp, Mus musculus
  misc_feature (1)...(27947): n = A, C, G or T/U
atcggagtttttaattggtttgtgtgcgggtagtccgagagcgtggcgatgcatttagctacaagattaaaaatcagttggggaactgtgagcaaactttagtgtcaacgtggaaattaatgtggctgtccatcagccacaaaggatgtggctcgcgaacctttattacttaggaattgggaatgtagtttagttagtaagcgtttgcttagcatgtgcaaaccgctgggttcacccccggtacacaacactgtgtggtggtgtgtccactcctgtaatcccagcgttgaagaggtggtgataaaattatcataaattcgacgttatcctctattgcaagccagcctaagctactagggatctgtcagtaaatcagtgaggaagcctggaaagatggctcagcggagaacacaggccaggctgtccttttcctggactctcctttgacccatttgcatggttgacagttgtctgtaacttgagtcctaggggaatcatgcgccctcttctggtcttcatgattactgcatgcatgtggtgcagagacctccctgcactcgaaaccccttacaaataaaagaaaaaggagttgggtgtggtgggacactcccttaattccaggactcagaaggcgaaggcagttggatctctttgagttcaaagctatcctggtctttataaacctagtctcaaaaaaaaaaagtgtgtggtttttgttttgttttattttgttcttaattaaaaataaggggtttagagataactctggttcgggagcacttgatgctcatccaagcacacacatgacaggcagatcacaaccttctgtaacactagtgcctcttctggcctccatagacctgcccaaaaatagtacactcaacttgcaggcaagaccttgatacacattaaaaaaaaacaaaaataaaccaagcaagccctgacataaaagtgaaaatgcactagtcttccatttacatatagctagacaatcacagcaaagggagatgagagttatgctacaaaaggtcaaattgagggggaagtgagagatttcgcaacaaagccaaataaacacatgcaaagggatatcttatctttaaaaaaaaaaagtatgaggctcttctcatacagtgccagcctcgtcctgtagacaggatggtgaaggtcggtgtgaatggatttggccgtaatgggtgcctggttaccagggctgccttctgctctgcagttggcaaagtggagattgccatcaacaacccatttatggacctcaactacatggtctacatattccagtatgactctactcatagcaagttcaatggcatggtcaaggctgagaaagggaagcttgtcatcaacgggaagcccatcactatcttctgggaagagatcccactaacatcaaatgtggtgatgccggtgctgagtatgttgtggggtctactggtgtcttcaccaccatggagaaggctggggcccacttgaagggtggggccaaagggtcatcatctctgcccctctgctgatgccccatgtttgtgatgggtgtgacccaccagaaatatgacaactcacgcaagattgtcagcaatgcatcctgcaccaccaactgcttagccaccctggccaagatcatccatgacaactttggcatcatggaagggctcatgacctcggtccatgctatcgctgccactcagagactgtggatggcccctctggaaagctgtggtgtgatggccttggggctgcccagaacatcatccctgcatccactggtgctgccaaggctgtgggcaaggtcatcccagagctgaacgggaagctcactggcatggccttccatgttcctacccccaatgtatccgttgtggatctgacatgccacctggagaaacctggcaagtatgatgacatcaagaaggtggcaaagcaggcatttgagggaccactaaagggcatcctgggctacactgaggaccaggttttctcctgtgatgtcaacagcaactcccactcttccacctttgatgccagggctggcattgctctcaatgacaactttgtcaagctcatttcctggtatgacagtgaattcgactatagcaacagggtggtgggcctcatgggctacatgacctccaaagagtaagaaaccctgggccacccaccccagcaaggacactgagagcaagagagaggccctcggttgctgaggagtccctgtcccaactcgggacactgagcatccccctcacagtttccattccagcccccaaagatgatggaagaggcttagggagtcttactctctttgaataccatcaataaagctcactgtccccttcccaaaaacaaacaaacaaaaccaacaaaaaccagtatgtgtgtatgcacaaggtgggcacacagctgtggtgcttgtgtggaggtcagaagataactttgtagagttggtactcacctttctttgcttttgttttgtttttttgagccacagtctttacattttgtagctcagactttcctagaacttgctaggcaaaccacgatggtctggcccttacagcaatagacttgcctgggcttcccaagtgctggcatcaaaggcatgtaccagcacacgaggctcatcttctatctctgtgtgggtctccaggacttcactgctagcatcttttcctgataagccatctggctggctccaaaaccaatacagggtggctagctgtagtggcacatgtttctttttaaggctttttttttttttttttaagatttatgagcgagggggtggtggcacacgcctttaatcccagcactcgggaggcagaggcaggcggatttctgagttcgaggccagcctggtctacagagtgagttccaggacagccagggctatacagagaaaccctgtctcgaaaaaaaaaaaaacaaacaaacaagcaaaccaatatttatctatttattatatgtaagtacattgtagctgtcttcagatgtgccagaagagtgcatcagatctcattacaggtggttgtgagtcatcatgtggttgctgggatttgaactcaggacctttggaagagcagtcagtgttcttaacctctgagccatctctccagccccctaaggcttgttttttatgcacagtgttctgcctgcatatatacccacatgccagaagagggcatcagatcccattatagatggttgtgagccaccatgtggttgctgggaattgaacacaggacctctggaagagcagtcagtgctctcagccagagtgtgaactgggattttgtgtgtgtctctgaaactcttcgattttgatgccagccttgtctacccagtgagttccaggacagtcaggactacacacagaaaaaccctgtgttgaaaaaccaatataacaatatccagtggacatgtctctcacaccaataaccaaccagcagaccaagacagaagattgctccaagtttgagaccatttaggatacagaatgagttcaaaggctaatctgagatacacagtgaaaccctgtctcaacagaccccaaattatattaaaggtgcttgccccaagaaacaagcctgataccttgaagtcaatccccgggacccacagggtagaaacagctcctgaaagctttcctctaacctacacacacacacacacacacacacacacaccccgaaagtaaatataaataataaatgaaggagctggagagagggctcgtggttaagagtgtactgtagagatccttacagaggattggggatcctagcattcacaccgagacactcacaactgcttgtaattctagccctgtgggatctgatgccttgttctagactccacaggcaccaacattcacatacacacacacatgcccacactgatacacacacacacacatgcccacactgatacacacacacacatgcccacactgatacacacacacacacacacacacacacacacacacacacacacacacgtacacacacacaaacacatgccctcactgatacacacaaacatgcccacacaggcacacacagagagacacataatcaaaaaaaaaatttaatttttcaagattccagactttttgatggtagcagataagacctggggagaggagagttccaggtctggtggggcaggcctgtaatcctgatacgcagtaggcaggggcagaagaattgaacagtgagttcagggtcagcctcaggctataaaggaagtactaggccaaaaatgacaattatggggactggagccgtggctcactggctaagagcgtttgttcttgcagaaggtcagggtttggtttccagcactcatgtacactcacacacgtttataaaattagaaaagccagacactgtataagcctagagttccaaaacttggggtacagaagcatcaggagttaaaggtcattttcacctacatagtcagttcaaggccagcctgggctacgtgcaaccctatctcaaaataatattttcctccttaggataagtgctatgtgtatagatgtttcgattgcatgtgtgtgtctgcaccacatgagtacttggtgccccatagaggtcagaagagagtgttggatctctggaactgaagttacaaagggtgatgaaaagccactacgtgggaactgaacggccaatgcttttaactgctgagcgagtggtttcttcagtcctgagccacatagcaagacccttcctaaaatttcaagggctaggctggtgtggtgggtttaacccaagcacccagatagcagaggcaggcagatttctgtgagtttgaggccagtctggtcaacagagtgagctccaggttagccaggtctacatagtgagacaccatttttttttttttttgagacagggtttctctgtatagtcctagctgtcctggaattcactttgtagaccaggctagccttgaactcaaaaatccgcctgcctctgcctcccaagtgctgggattaaaggcatgcgccaccatgcctggcccttttttttttaaagctttatttattttatgtatataatgagcacactgtagctgtcttcagacacaccagaagagggcatctgatcccattacagatggttgtaagccaccatgtggttgctgggaatcgaactcaggacctctggaagagcagttagtgctcttaaccgctgagccatctctccagctccaagcccccgtctttagaaaataaaataaatacaaggactagaatgtgactcagtaagaaaaatcttgtctgctctacagaaggccttgggttcaattgccagcaaagtggagggagaggacttggaaaaatacaaatttcagtgtttgataatcagttgaaacactgtgagtggagaggagaaaggcaaaaagcagctggggttctgcaggcacaacggggcacgtgcttctctatcagatgctggtactgtctccaccacagtgagtcttatcacactacactttagtgtagaagagagtaccagcccctacttatcatcacaatcagcatggtcctgcctagcataagtattaacaaggactcaactgatatttattaaatttaagtctaaaagctgaatatcagctctgaaagtgtcttagttagggttttactgctgtgaacagacaccatgaccaagccattatttaatttgggactggcttacaggttcagaggttcagtccattatcatcaaggcaggaacatggcagcatcccggcaggcatggtgcaggaggagctgaaaattctacatcttcatctgaaggctgctagcagaatactggcatccatgcagctaggatgagggtcttaaagcccacacccacagtgatgcacccactccaacaaggccacacttcctgggccaaacatatacaaaccatcacaggaagagaaagagatttgtagggaagtttaacatgttcaatttggtacaaacagaatttatagcacctgtgaaatacttgtggcgtttttaggtggacagcaaataagaccagagacccagagaaagatctggactggagatacagtgcatagcaggatacagaggccatttgagagagtaagatctcgaaggaaacacaaaggacacagctcagatggggttttgtggtttaaggaatgggtgggcgggtggaggaagtttctccctcgtggtgcagagaagcatcagccacaaggggaacaggagaggacagcagcagagatcagttgggctgtgtgccactgaaccatcaaacagccccaggattacactgcctgtgcagagtggaggagtctccttagaaagggggagaagtgaagtagtgaagatcacttgtgtaggcaactccaagaacttagagaaagggtagagagcaggaggcagaggagagatggagaggcacactgtgcactgccttggaggccaagctttgactgtagagcacagactggccttcaccctctcccctcagcctcctaaacactggcatttgcaggtagtgaaacacccacccacacccccacatacactcctggtaggtacctggtaacttaagagcctggtaaaaggtcattatcataaagagagaggatttggaaaagtttcaaagacaataaaagcggggagaggggacggaagagatagctcagcagttaagagcactcactggctgctcttacagaggacccagttttcgttcccagcacctatgtagcacctcttaacctctgagccatctctctagccccttgtttgtttgtttgtttgtttgtttgtttgtttgtttagacagggtttctctatgtagctctggctgtcttggaacttactttgtagactaggctgcctggaactcacagaaatccaactgtctctgcctcccaagtgctggttggcactccaagaaccaagagactggttctcatgccttggatcccagccctgcgaggcagaggcaggtggatctctgtgagttcaaggctagcctattctacagagcttcatcactaccagctaaaggcatgtaccaccaccctgtccccaaatgtcaatgaggagatgcacatttacagtgagatacacagttgcactctccatattcagggtgctgcagtgatggttcccatgaatttgaagccagcctgggccatgtagtgagttctaggtcagcctggactgaagagtaataatgaacgttttttgttttttttatttttggtgtttggtttttaccgacagggtttctctgtgtagccctggctgtcctagaactagctctgtagatccaggtggccttgaactcacagagattctcctgcctatgcctcccaagtgctgggactaataatattggcttttaaaaaaaaagctaatttaaaaacaaaagggggagttgggcgtggtggctcacgcctttaatcccagcactcaggaggcagaggcaggcagatttctgagttcgaggccagcctggtctacaaagtaagttccaggacagccagggctatacaaagaaaccctgtctcggaaaaaaaaaaaagggggggggagggagctggagagatggctcaggggttaagagcactggctgctcttccagaggtcctgagttcaaatcccagccaccacatggtggctcacaaccatctgtaatgagatctgatgccctcttctggggtgtctgaagatagctacagtgtactcatatataataaatagataggctggagtgagccgggccagaaaaaataatttaaatcaaacaaacaaacagacaaacagaaagctaattttgtcaggtatgatgggtagttctgaatcccagcactgggaggcagaggcaggtggatctctgtgagttccaggctagcctagtctatagagctagttccagacagccaggcaggactgttacacagagaaactctgtcttgaaagacaagcaaacaaaaagataattttaaatatctgaatgaacacacaggtaaaatcagcctctggataagggaaggaagagaagggggcatgcttcccacagtgaaacagagagaacctaagggagtaggtcctggagggtgaggaccagcctgtcagaccttggattacgtcaggggaggggagctggcttggctgtctcgcatcaccagagcgaagaggcactcaccctctactccagctctgcaagcagaaactaaaaaccttacaccactcagtggaggaaaagcaaagaattgagaagtttgcttctgatgctcggcactcccaggctagtcagttcctctgccggctagggaaagggcgacatcaggtgacgtcagtctccaaacacctctcatgatgtttttatttatttttgagacagagtcttactatatagctctggctgtcctggaactaactagatgttgtttgtttgtttgtttgtttgtttgtttttaaaaaagaattatttatgggctggcgagatggctcagcagataagagcactgactgctcttccataggtcctgagttcaaatcccacaaccacatggtgacccaccggtaatgagatctaacgccctcttctggagtgtctgaagacagatacagtgtacttacatataataaataaataaatcttttttaaaaaaaagannnnnnnnnnnnnnnnnnnnnnnnnnnnnnnnnnnnnnnnnnnnnnnnnnnnnnnccagaagagggtgtcggatcccatcacagatggtcgtgagcctccatgtggttactggggattgaactcagggtctttggaagagcagtcagtgcccttaaccaccaagccatctctccagccctagaactcactatgtagataatgctggcctcaaactcatagagatgcacctgcccctgcctcctgagtgctgggttgaaggcgtgagccactacatcgacttctgtaccgtgtgtgcacggtctccaattcagctgcagttagtaaatttcctgtgttaaggtcagttaaggtctggccccctaagctgctaaggagctcatccctttgtcatttctagttcttgacggctccttccacacaggagacagtcctcaaccagttcttgttaagcatagaaataaaaaaggctggagagatggcttggcagttaagagctctggctgctcttccagagaaccctggttcaattcccagtacccacatgagggttcacaaccgcctgtaactgttgatcccagggatccaacaccgtcttctggcctccttgggcagcagacatttggatggtgctgagacatacacacagaccaaacactcacacatacaacaagaattgcaaatggacggagccccataataaacccggggacccctccagaaggttgatgcatagatcatgcgccctaatgtgtcctagacggggctgaaggagatatgcactcttcttttttcctttcctgctcgcttgtttttttagtttttctggttgtctgtctgcacaggaaacacaaagcttcgagtctgaggcagtttgggtggtcacaggaacactgaggcctgtgtgagcttaaaaacgggtcatggcataaccttcccttcatcattgtcacctgtacttttgtctgtgttctgctcttagcctggctcctcctcctcctcctcctcttcctccttatgtgcagctcagggctcccttcaacatccaggatcaggtctttctgaccctggaacatcaggtaacctcgacaaggtatctaaagatcaccaagctaggttgtcttctcagattccctgccttgcttgctgggtaggctgctgaccacatcctctctcaccttatttatacacttcctcaacagacacatcacacagaagttggaccccccccaaacctgtgctgatctctctcccctcttcctctcgccctaagggtcctgcacacacacacacacacacacacacacacacacacacacacacaaaaacacacacgctcacacacactcttcaaaccatgcccttctgtacggaggcaccagctcctatttccttctggaacttcagcacccccttttcctataggtgacagtgccagccaccatgttctcaggccggtggtggccaagtatctggggaaatctagggctgagtctacaaagcccttctcagggaccccagctctgcgccctctatccgttcacttacactggggcagatggccggcaggtgtctctggctgaaggtgacaggttcctactgcttcgaaagaccaactcagactggtggctggcgaggcnnnnnnnnnnnnnnnnnnnnctggtggctggcgaggcgtctgggcgcaccccccagctctcggcccatctttgttccagctgcatacatgacagaggaatcaatctgctgccacaacccagcagacactacctacaacagctccctctggactcctggtaagtaagctttgagcctcccccctcttcacctttccgactctctgactcttcccgcttgagcgctgagagcactactctgtcttaccttctgcggactcctttgataagcctagttctcacccaagccactgtggcgtcccctttacactcttagctctagggcccgtgtcacttcccggcagccttgccctgcattcctagacaattcccaaggtcatatctgtcctcacctgccactccttcacatctctctttccagggacaaagctgtatcatggctccctggaggagctctatctgcctcaggaaccccaggttgcttctgggcagcctcttcaccatccccacaagatgtgcaaaagtgtcagcacgggcaatgtgaaggcctgctccctgaaatccttcaaggaagggccaggagaaaggtctcactggtggatgacagaagttgctgtggtgagttacagagcttcctggagcataactcagagcttggtcggccgcctgcactacagcagggtggggcgggatctatgtgaagtggtgaactggacacagcctccctcccttaagtactgaaggtaggagagggggacacagacaacacccctcccttaaagatcagagaggaggggagagggggacagatggacacaatgaggagaagaggctgaggtgctctgagaagatctcgcaggagcaggaagagtggccataagcaacgtaggggatgagaaaggacagtcgagttacagaggccctggaggaacagggtatccagtacagccaaaggaatgtcagcagactgcttttctccagttctaactcctagcccagggcaaggtttgtcctaaagtcctgtcttcaagtcaggacactagcaagttccttctaacactgagtgccttggtcagcccctcccccactctgttgtcagttgtattttgagccaggggtcttagtccgcagtaggcccagctcgccccgcttccttttgtagttcagaccgacctcaaactccagcagctgtcctgcctcagcctcccaaacgctggggttgctgggattacgagcaagcccagtgtacactctctctttcacgggtgtataacaagtctttctcttccctagctctagcgtagtctctcacttcttggtgtcttcttttactctcgatggtgtgaggacaggtcactctctcctccccccccccaaaaaaaaagcctgttcccctttcctgcagctctggggcggggttgcgtgggggaggagggaagttggcaacaggaagtgaggagaagagcaaagactgtgaggggaagaattttttaaaaaacagccagggactggggtttctacccatgtaccaggggcccccccgggcccggagctgaccgtgagtaaatgggagagagatcgggagggacaggggcagaataagttttctcctctttcccagcttctcgctcctggggcaggcaggatcacatcctgtcacagctccctgtgtactgtaatctggcgggccttctccgacgtccagggtccctggtccgaagcccttgcatcccctcgcatgcattacaggaggctgaatggctgcgagcagctcccaacagaattctaaagagaaaggcactgagtgtctctttcttcagctctcagaccattgaggcatggaccccaaggaattagaattaccccaagagtcttatgctggggaatacaaggttggggtcctgatcccagccagaaacggaacttgtctcccaggaagacggttcacagtgttctgacacctcttcagaccttcctgtggcagagacggagctgggacaaagatgaacaaggaccatgcctttaccaggactgcctaattacaattacctttttttttttttttgagacagggtctccctatgtagctcctagttctggctcccctgaaactcactatgaagaccaggctggctttgaactcactgagatctgtctgtctttgcctcccaagtgctgagattgaaggtgggcatcaccatgcctggctttgtgattaccgcttgactaaacctattcaaacctgaactgcatgttagaaccctaaaagcagaattggggatcatcggatctatttataagactgannnnnnnnnnnnnnnnnnnnntgcatgcagtgctctcagaggccagaagagggtgtcaggcctcctggaactggatttacagcaaacttcagccctaatgaggatgttgaaaacccagccagcacccgcccctccccatcccgccccgccccgccccgcccctccagaaggtagccagtgctctaaacccacatatatctttctttgtcctttagcattgtctctttgattgattactggggacaattaacagagcttagatttctagagctgccaggacacagacttcggccctaacaatgccagtagcgcctggaccccacctggggatggcgctcgtgtgcggccctcccctcctgtttcccctccatcttctgttctccgtttctctctggggctctcagaaggtcagaagaaagaggaattttgtgagaagtgttaagaacagtggaggtagcatccagatgttgctttgtcttcccctaaactcagaaaccgggctccatggagcagacagagactttgactagggacagcagtgccctacagcctcaggaatggctcgatccacaggtgagaaccctcccacttctcagtcacatgttaaaaagttaaatttatatttttagatttatttattatatgtaagtaccttatagctgtcttcagacaccccagaagagggcatcagatctctttacagataggttgtgagccaccatgtagttgctgggatttgaactcaggacctttggaagagcagtcagtgctcttaaccgctgaaccatctctccagcccccaaagttaactttttatgacctttcccctattccttctacggcctgggacctctaaaccgaaggttcttcttcctgtttcaatctcccaccctcagggtttaccaagcctcagccaaagcgtcccatggcttgctctctctgaacagccgggagccttgaggccctgttcagctctgccacagctcctggatgacccccacgtggtgagtacttcctgtcttcgaatgccaagatcctttctgcataaccctgcaacacctgctcctctgaagcattttctttctgggtgtttgcgcttctctggtctcccccaccccaaactttaacggtccccacttctggtagattccttagaaactctggcggctgtgggtggcacagggtggcttacagacagtactccatacccttcccaggaagaaaggtcaggcctgctcaacatgaccaagattgctcaaggagggcgcaaactcaggtgagagctcagaatatgcccggggtctgggctggtggatttcacagggtagaaagccgtaatggtgcggggagctcaggcactccaggtgaaattctaaaatgaccttttaactacctctcctccttcctctcctcccccacaggaagaactggggccctgcttgggtggtgttaactggtagcagccttgtgttttaccgagagcggccaccgcagtctgcatccctccaaggctgggtgagtatcggccaggggggtgctgcaagggtttggggttactggtttgcgcctcaggccgactgaggcggaggcggcgaggaaggaaatggagaggaaggtacaggaaagaggaagcagctcacctccctggagagggaagcggtgaggaaacaaaactctttgcctcagtttctctcataattgccaggcgcgggctgggagccggccggagagtagcgtggacctgcgcggggcggccctggccagcgggtgccagctgtccagccgccggaacgtcctgcacgtgagtgtcttccgcgcgtccccaaagacagggtgacccgaggtcgctcgtcctcgcagcgttttaggcactcctagctaacactcgcctttcccccgcccggctcccctaccctccactcccagatccgcacggtcccgggacatgagttcctgctgcagtcggacgaggagaccgagctgcgagactggcaccgcgcgctgcggactgtcatcgagcggctggttagaagggtgcagaccctggaaggcacccgggaggcgagaccccggaaggggggaccccccgtgggccaagagagctagggaagggctatgggtatcggacaaggaagtctccgatagagccctgcctttgactcctgctggaatgtggggctctggcaccgaggtgggggtgcagatgttctcctgtccaacctcctaccccggccgcccgggtctaggatcgggagaaccccctggagctgcgtctgtcgggctccggacccgccgagctggccgagctgagcgctggtgaggatgacgaattggaatcggaaccggtgtccaagtccctgatgcggcttggcagccgcagaacttccagtacgaagcggaccggagctggccgggctggggtgcagggaatgggtcctcccctcagctcactgtcctgggttttgcaggtcggtgtgcagagggcactgaccagaagaaccgcgtgcggaacaagttaaagcggctaatcgccaagagaccaaccttgcagagcctacaagagcggggtctgttccgaggtagggtgggctgggcccgctggggcgctgctcttcgtatcggctttactagagtctttattttgtgtagattttgttttcggattttattattgtagaaacaggctttcggtatttatatcaggctttactcaaagttaggcaatcctcctgcctcagcctgcttagtgttgtagggataacaggtaagaggcaccatgcctggcctgataagtcagttttcagatcttttatatccctgatcttagcattaactaaaactctagtgaggctcaaagtagaatttccagagctagattccagtctgagtccgcccctgcctcccccaacccccactgcccaccctcatcccccgttgtttgcaggtcagagggagggcctacttgctcccaggtagcagccaactccccacctcactcccttcctctgcagaccaggtttttggctgccagttggagtcgctgtgccaacgggaaggggacaccgtgcccagctttgtccggctttgtgttgaggccgtggataaaaaaggttatttttccgaagacaccccccaacacccgcgcctctgaaacctccccttccccatgctccagtcctttgcccccatccctgccttcctcctgacccctctctccctcagaccactcccatacatattttagcgttagagacctcatccttgtctcctaggtctagacgtggatggtatttaccgggtgagtgggaacctggccgtggtccagaaactccgcttcctggtagacagaggtgagacaacttgggaggaagtccacaccgcctccaacacctcagaacccagagtggttctgagtgagggagttggaaccgcatgcctaagctactggtctctcctgtatgttgcagaacgggcagtgacctctgatgggagatacatgttcccagaacaggcaggacaaggtacttacatgggaagctcaaaaaaaaaaaaacagctttatactccaattaatcccccatgtccttgaccctacccttcatttgttgtcctactatgctctactatggaccatccccacattcttgtgacctggctttgattgtatttacccagaattcctagcctttgagtcaggaattctctggctctcctgaaccttcaactcgaggaacctcttaccccccctccgcccccccttctagaaggcaaattagatttagacagtgccgaatgggatgatattcacgtggtcaccggagctttgaagctttttttccgggagctgccacagcctctggtgcctgcattgttgctgcctgactttcgtgatgcccttggtaagggttgagggcttcagataacacccctgacgtgggcgggcatgtagtaaagaagagaacagagggtcccttctgactttactggggatagaaaataatttatatggtaaccctctgaattattctcggagggtggggatatgtgtgtgaatgtttgctaagagttgatgttgggctttgtggaagagtggagggctttggttctgcagcaaggcaagcttactgtgtgtaaggcccacaagtaccagacaagtgataccatcaggggacatgggaaagagtgaatttacacacctggttgtaaccctttccccaagttcactccctgtccttgcctttaccctccccagaactttctgagccagagcagtgcctctccaaaatccagaaattaatagactcgctgccgaggcccaaccatgacactctgaagtacatcctggagcatctgtgcaggtcagggggactcagcaaccttgttcgtgctggtgaggatggagcgggtgttcactggggaccctgaccagggagggtggggacagggaagcactgacttgtgtctgggcctttgactagctcagccaaatgaaggaaatgagcagaaggagacaaggagggctctgtgggagaagtgagaggatggtcttccttccctggccttagtctccatggggcagggtagctcccttggttgagctgtacttgggcacatagagtgtgctcctcccacagtgcacagaggacactaggggctgtccctgcagctgagagtcaggcacttggaccccacttgtgcctccagactgcatcctgaatgttcctccactggtccatctctgttccctgttgggtctgttcttgcgtgtggaaggattccagagtgactgctgacctgctcaaacctaatactgctgtactggtctgtagtgggtagttatcacctctcttccttcccttggctctgccctcagggtgatagcacactcggataagaaccgaatgaccgcccacaacctgggaattgtgtttggaccgacactgtttcgacctgagcaggaggcctctgacatggcggcccacgtattctaccccgggcagctggtccagttgatgctcaacaactttgccagcctcttcacttgacccaggcgaggaagaggaaggcgcttcctgtgatttgtcagctagcctttggagagggctggcgggttttctgttctgaagatacaatgtcctcccaagggacacccttcatttcccgctccagtctcacttgagctcctggctaagaggggttgctgaaggggaaggtataggagcccgcttctgctctccccaacatgacaggtgatgcttgttctcagtattcctttattgtcaggaaactgtgtcattattaaagtttgttctttcctggaacatacatagactaaatacagcccccagcccaaacctcccatccctgggcacctcatgtagccatttaggaaataccatctgcttggggttccttacccttttaggcactagagttgaggaattgtgtctctccaggcagagaccccagcaagacactcatgttacccactgccatgttggggggcccagagggagatggggtgtttttagagctgtccccttgctcatgggaaagaggagggctcaggccctgggcctcatctaggatagccacaaagtccagctgagtgttgtccaggtcaagagagtccagagcgttacacacctgcccttcaggaggagggtacaaggcagggcctgctcctaacctgcccacctcaggatggccacagctggggttggtatcccccaccttgaggggcccatagcaaggggacagcgggggcagaagtcggggtggtgctgctggcctgtgggaaggcctgtttactcccacggtgaaagtttcatggcagggtgaaggggcaggataggagcctgatttgtgattggccgaagcaggtgcaaagccagatccatatgctgccgccgctgctgctggggtcttggcagggctctgactaacttgggaaccccccagaaacttggggctctggtatgggagttcctggttggggagccctccccggtttcttccctcccacaacaattcctgctgcgactgaacgtaattacacaccagctgagctttgagctgtcctgtggaatgagaggaggaggggttgaaattgaggccaagcctgggttctgttgagagataaccatggggaggctgaggatagggacccgactggggatactggggctgagggagctggggatgatgtgaaaacagaggctgcgggcctggggacccttcactggggtgggcattgaggcagggtgccaatccggtggagtcagaccccactgggcacccttgttctggttttacctgcacttgtccataatgctcaagtcgaggacactggctataggcagcacccggagccttattgctagggtacaccccagcatgagaagggaactcaccccagttttctggggtgggatcaggataggagacctgctgggcacagtggccagggccatagttggttggtggaccaggcccaagaggcagggaacctggacccctagcttcataaggctcagctgccgtcccctcgggtcccccatatcccagagtatcagtggaggaaaaatccatgtatgggttcagaccattgcccatcacagaagttccaacctctggctcctcctgtagccccctagtatccatggcaacattttcggtgatgctggggggctgtggcgaatagacagaggtagggtggtggggatcgaagttccgtcccgttgccacactagggggcgtgtggacacatcccaggctcttgaaccgctggactctggctggagctgggtggtcagcagcccgggctgggtcactggccctccgagtgacccctgcatttgggttgtatcccgggtactcggttcggcttctccaaggaggaacagaaagacctcccatccgatccaggctgtgagctgcagtgggcggggtgccactccccctggctgaagcatatctggcacggagcatgtagtgctgagcaggtgtgaggccaggtagtgacgatgccccattctctggtggggttcccggcgggaaaggggatgccagggaggacctgcggctgactgtgtaagcagagctcatgctgctggagctgctgctgcggcggtccagggagactggggggcccagacggcgagacacaggtgcgcctgcagatgacaaggagaaaaggcaatggttgggagcccctccattctaactctgcctttcccacaggatagcttgggcctggaacctccaccctagctactctgtctgtctccttctttccccacacgtattctgcttctgcttcctcagtgattctaggcagccatagtttgcgcactgcctcacagtcgtagggagaacataccagagatgtactactaaacacactattctacagcggcgggactagcggtgtgtaccacaacacctggctaaacatctcggttttctgattgatggaagggaaaaaatgtcaaggaaggaaggtacctttcaaacgataaaaagatgccaacgtggggctggagagatggttcagcagttaagaacactgactgctttttcagagatcctgagttaaattcccagcaactctatggtggctcacaaccatctataaggggaactgacgccctcttctggcatgcgggtgtatatgcagcagagcacccacaataaactaaaccacgtggcaactcaaagtgtagcctggtcacatcagcctctgggcagcaacacctcccacatccgggtctcaccagcgtgggttaagctgggcagtttgagaccccgagaccctatgggccggagctgatgcagctgatccagcctaaggttctccaggcggcgaagcgtggagagtccggtggccgagacacaaggtccttcatccaagctggacaagtcctcagtgctgcccccggcgttgccggccatctccacgccgctgtccgtgttggccgcactgcctgctggggagtggtcgctgctgcaagaggactgcgctccggggctctgctgcggctgtgaggaggatgagaacagagggggtggcacacggcccaactccctcctggtgagtggctgagactgtgagggttgaggacagacatgagaggcggagtcggggtgggggtcggggtgtgggggggggggcacactaagagggcgagaggttatggtaaactagaaggaaatgagaggaccccgctggagtacggactcccgagactgaggctccatttctgcgtagtcctacgaccctgataatttctccttgcctgtttcctcttgttaagaatacacaaaatagggggctggagagatggctcagtggttaagagcactgactgctcttccagagatcctgagttcaaatcccagcaaccacatggtggctcccaaccatctataatgggatccgatttcctcttctgatgtgcctttagacagcacagtgtactcatatacataaaaaaatttttaaaaatacacaaaacatacacgtcaaaggcttggaactatatatggttaggtgttatccagaaacacctccctgaccatgcgttggaccaactaaacaattgacgatgataacagctggagagatggctcagaggttgaacgcactgactgtgcttccagaggtcctgagttcaattcccaacaaccacatggtggctcacaaccatctattatgtgatcttggcgccctcttctggcacacagacagaactgtacataataaataaaaataaatctttagatttggggtcacctatggagcaacactgaaacaagaggcagccaggctgggctggccacataagtctgatgtatataggaggagatgcttaggaaagggctagaagatcgtcagtagagcatgagtgggtatagaggttaggcttcctaggctggctcaccatggcactctcgggcacagtcagtctgctctcttccctgccggatcctccttccctttcccgcttgggctccactgtggagaggggctgagcccgtggcaaggggccatcccctcgatgccgcttggtcacgtgggcatccggaccatgcactgtcttcacgtgtttgcggagcgagctgggatctgtgtagcgcttggtgcagccggggagcttgcacacgtatggcttctgttgaatagagagccaagctagaaggccaacggaccaaagcagaggaacccaacagaacgggggtcagggaggcgggggaagctccgaggcaggtgagtgagggggacgcacagcatcccaggaagttggggggggggggagcccttgagtggaggaaatcctgagaggcttagaggaggcttaggaaaacaaatagaagtgaccctcaaggctgttaggccacctaaattcagaagctgaaggagtcgtcagggctctactttagactgactctttggctggttataccaaagtgtgaactctggtttctcacgggagtaaggggctctttatgagggatacttaggcggcagcttctcatgtcgcggaggggagtgggtctcagtttaagtgctcacctcattggagtgggtccgattctggtgcttggcgcggtcactggcattgctaaaggccttgctgcaaccttcttgctcacacatgtaaggcttctcacccgtgtgcgaccgaaggtgcgtcttgaggttttcaaggcgtgaataggacttccgacagccttcaaactgcgggatgagaaggggccaggcatgatctcagacgggacgtggagatttaaggatttacaccagagaaaataattaaaaaatgggagaacatggcgacctaggagaatcccaggattagggcacaaagacaaacaggagctaaaggcagaggaagccggaaacagcgcaaggggagggatggcatgaagtactgagcatcttggagcgggtcaccctgcacagggcttagatgatccaagagtggggtcatctggggatcaggcttacacttgtgtccatcattattagagcaagatctatccactaggcaatgaagtaacaagagcactaagtgattcaaaggtttttttttattttactactactactactatttttttttcttggagacagggtctcacagtgtagttttggctagccttgaactcactatgttagaccaggctagcctcaaactcacagagatatgcttgcctctgccttccaaatgctggggttaaagatgttcaccaccatgcccagcacatgttttcatttcttttaaaatcaaaagggactgggtagtggtggcgcacacctttgatcacagtgcctggcaggcagaggcaggtggagctcttgagttcaaagccagcttcgtttacacagcaagttccaggacagccagggctacatggagagaccttgtcttgaaaaaccaataagtaaataaataaagaaataaaatatcagagggggaaatatgcttttttaagacttggtttttcgagacgaaaatatgctttttgatctgaaactttgttttgttgcttatttacttatcagatcgagcctcactgtgtcacccactgtggctatcctggagctcatcatgtagaccagactggcctaagagtcaagagttctgactgcctgtgtgcctcctaaatgctgggattaagggtgtgtgccaccaggcctggtttggtttttgtttgtttgtttgttttgtttttaaagattcagttatttattttatctatgagtgctctatctgcatatacatctacatgacagaagagggcagcagatcacgtggtcatgagctagcatgtaactgctggggattgaactcagaacctctggaagagaacacaatgccactgacccatctttctagcaccttgcttttgtctttttttgagacctagcctcaaactcttgatcttcctgactcagcttcacaagtgctagggttacaggtgtgtaccaccataccaaaaacattttagggccagcaagatggcttggtgagtaaaagtgtctttagccaagcctggcaccctgcttttgatccccaggacccacacggtgtaaggagagaactaagtcccgagagttgtcctctgacctccatatacacaccttgggaagcaagccccaccccacaaaaatgcaatataacattttaatatatatcagtatgttcatctttctctcgatacagtcttcagcgagatttttaacatttgcttatgaaggaaggaactttgaggccaagtcaactaggatcctaccttgacttgacaccaacctagggagggatgggtaccttaccgtgcacttgtgtggcttctcgcccgtgtgtctgcgcatgtgcaccaccagcatgtattgggccttgaagggcctcagctccctggagcaacctccccaatggcacacgaattccttccgctccccgtggatatgctcactgttgatgtgctgaggaggaagagggagaggctttccgaggtcccagaccctgaacctactccttccagccccacactcatcacctcagcttctcctcttgggggaataagagtggggaatgcagctccgcccatacttcaggtcttctagcttactagagcaaagatactctgggcttcagtctgcaggactgagcatgcaatctcggacctcagtacgcttgaacctcttgcctttagttagacctcaaagctccatttagtctccttcaggctcccaccaaccatctgttaccccctggggctcacgtgcaccagctgctcctgggaatcgaactcctggctgcaaccatcccagcggcagtctgtctcatacacagactcaggctcaggcttctcctctctctccaggtcctcccgcccatccagcatccccaacaggtgatcctagggtgagagacacagcccttagggtcatttgtgcggcaaggtttgtttcactcaggtccctggggaaagccctgcccctcccttacctgtgtgcctgtggagttggggctagacatgtccccttccaaagggtcctccgggcacttgccaaccatcatatccagctctgacttcagcttccccaagggaagaggtgagggtattgagggtggaatagtcagaagagaaaacaagccaggtcttcctgccttacagaccccccacccaaatcctgagtatgagggctctccacagtctgccctggtaaacgggatgaacagaacggtgctctcctctgggagagtctgagtccatgttccttgtaccaaacgcttttatatctgctgtcttccttcacctgtcccctcccccttcccccacaattgtcctgagctggagaagacaacgtggagggccccacctggcaggttgcacgtggtccccgggactgggggtgaagcatcattgaaccccgagtagagtcatgtggtacacagggctggactccatagggaggtgaagttcctttttgatgactcatctgaggtgggaatcctaaagaagggctaggtggagaagaggctgttagtgaagagaatcagccaccaggagtccttgctctgtcctgcaggtttctgggaggtgtggttgaagaagccctggggaggtcctgaagagggttccaatgcgttgggggaggggaaggactagagctgggctggaggtttgaagggtctgagtcttctagtgggtgtcagtacatatcttgggggcctcttaatctgaggctgccagcacctcatggtaccaatggagagatggccgtaggaaccgcccggagatgtacagcgagagttgatgaaagccaccagggagctgggtgaggtccggattacggtttgcaggtcgaggctggcatcagaaaggggcgagatggagagagcccgcttctttgttaatttgactgaactccgaggaggaggaggaggaggaaagagagatcctagggcaggagacaggagttaagatgtagtaaagggggctggagagatggttctgtggttaagagcacttgccgttccttcaaagaatctgagtatgatttctagtacccacatcaagcagttcactacttcctgtaactccatctccagggatggtcccacaccctgggcctcagggagggcgccaggacctgcacagcctcacacagacatatacattgttacaaaaataaaattacaatgggggggaaagatactgtaaaggtacattgtatccctgcacttggtgggtggggcctcgctcaaaaaacttgctgcttttgccttgctctgcctagagcctcttgattgattgtcccctggttgcctttgtctctggatgtttcttaccttgagtttggccctagcttccccaccttctcctgcagagcaagtcccagacgggcaggggcaggggggattgccccagtgctcaccttcagtgcagctgctggtctctctggctgctccataaccctgggaccctgacataaagttggcttggtggcaaaagggcagaccagaaagtcctagaaaagagagacagctggagccaggtctttgaatggggaatacagggcttaccttaagacccaacacaagatatgatcccaaactctaaacatacatggtggtgtgtgtgtgtgtgtgtgtgtgtgtgtgtgtgtgtaaatcctcctgtagataggaaactagaatgcgctagggatggagttgagagggatcctgacgctaggtgagacgactgccaagtcctcacggcccagggactggtaaatgtattcaccttctgttcccatgctggggactccttggctgtggaggggtcggagacagcatggctcactatagctattgacttgtggcggagtcattggattgaacatggcgtctcagggaaggatgaggggacctgtggaaaggaatgtagatctgccagttataaagatggagcgaaacagagaagataaatgacagtttcaggcacagatttccccccccccccctcgccagcatgtcccttgtacctctaaccctcatctcagaaactggtcatggaaatcaataacgtttttcagcttccttaagaagaaacatcccaaagagtgggcagaagcagccgttcagtcttggggatccacagtctctgtatgtacaagggaatgttagggactaactgatccaacacaagtcctaggtgatttttaatgccatgagctctctctacttgcttttcttttttcttttccctctaccatttcttgttctggccatgggccagctttgaggtgtgtgatggtggaacacacggaaggtctgacttcatgcccagggctgccggctcatgcccaagagcagagctcatgagcaatctctccagtgtccactagagggagaccctcgtttcagtccagatagactggtagggccagaagagaacacaaatgatctgtcctcagacagagaactatgtgtgggagggaataagacttcagagcagagcgtcttcccgacttttgagtaaaaaggatgagagctaaagtcattctgaggcggtttaactctgggtttacctatcccgtttggttttgggggaaatcgggaaggggctgtcaggaaagtcttaatgggaatgagaaaacgaagtcctcaaggctagagagagaggagctgatgcgaggtccgctttccctcaacaagtttttactccactccaggtttttcagccttccgggaacggagggtggggtggggcggggtggggtggagaaccactgggagcgggccggccggcgcggtgggtgatcccgggatgctgggatttagggtgagggcggggtaaaatggggaacggaacccggaccctacgacccagccaaagtgctgtagcccgggctacctttgctaactcctccttttccagccgagacccgaatcccgcatccaagacctcccagctcgacattggcactaacgtgggggtggggggcacagctggctggcagctggatgagggggcacatctcccgcctctctcctctgtgactcattcaagggaagggaaggacttgtaaaggacccccagacactagaagttccctcaaagttgtcactcttcctgttccattgcccgagagctccaagagacaggattaaaaacggggcgacagccccccttcaccgagagccaccgcctacactcacgcctccctcttcatactactaacttttccagtttcagtaaaggttttctgggctggatgggagcatgagaattagcctaccaaagacccgaatcatcttcgc

SEQ ID NO: 488 - DNA, 2534 bp, Mus musculus
acacacacacaaaaacacacacgctcacacacactcttcaaaccatgcccttctgtacggaggcaccagctcctatttccttctggaacttcagcacccccttttcctataggtgacagtgccagccaccatgttctcaggccggtggtggccaagtatctggggaaatctagggctgagtctacaaagcccttctcagggaccccagctctgcgccctctatccgttcacttacactggggcagatggccggcaggtgtctctggctgaaggtgacaggttcctactgcttcgaaagaccaactcagactggtggctggcgaggcgtctgggcgcaccccccagctctcggcccatctttgttccagctgcatacatgacagaggaatcaatctgctgccacaacccagcagacactacctacaacagctccctctggactcctgggacaaagctgtatcatggctccctggaggagctctatctgcctcaggaaccccaggttgcttctgggcagcctcttcaccatccccacaagatgtgcaaaagtgtcagcacgggcaatgtgaaggcctgctccctgaaatccttcaaggaagggccaggagaaaggtctcactggtggatgacagaagttgctgtgcttctcgctcctggggcaggcaggatcacatcctgtcacagctccctgtgtactgtaatctggcgggccttctccgacgtccagggtccctggtccgaagcccttgcatcccctcgcatgcattacaggaggctgaatggctgcgagcagctcccaacagaattctaaagagaaaggcactgagtaaaccgggctccatggagcagacagagactttgactagggacagcagtgccctacagcctcaggaatggctcgatccacagggtttaccaagcctcagccaaagcgtcccatggcttgctctctctgaacagccgggagccttgaggccctgttcagctctgccacagctcctggatgacccccacgtggaagaaaggtcaggcctgctcaacatgaccaagattgctcaaggagggcgcaaactcaggaagaactggggccctgcttgggtggtgttaactggtagcagccttgtgttttaccgagagcggccaccgcagtctgcatccctccaaggctgggcgcgggctgggagccggccggagagtagcgtggacctgcgcggggcggccctggccagcgggtgccagctgtccagccgccggaacgtcctgcacatccgcacggtcccgggacatgagttcctgctgcagtcggacgaggagaccgagctgcgagactggcaccgcgcgctgcggactgtcatcgagcggctggatcgggagaaccccctggagctgcgtctgtcgggctccggacccgccgagctggccgagctgagcgctggtgaggatgacgaattggaatcggaaccggtgtccaagtccctgatgcggcttggcagccgcagaacttccagtcggtgtgcagagggcactgaccagaagaaccgcgtgcggaacaagttaaagcggctaatcgccaagagaccaaccttgcagagcctacaagagcggggtctgttccgagaccaggtttttggctgccagttggagtcgctgtgccaacgggaaggggacaccgtgcccagctttgtccggctttgtgttgaggccgtggataaaaaaggtctagacgtggatggtatttaccgggtgagtgggaacctggccgtggtccagaaactccgcttcctggtagacagagaacgggcagtgacctctgatgggagatacatgttcccagaacaggcaggacaagaaggcaaattagatttagacagtgccgaatgggatgatattcacgtggtcaccggagctttgaagctttttttccgggagctgccacagcctctggtgcctgcattgttgctgcctgactttcgtgatgcccttgaactttctgagccagagcagtgcctctccaaaatccagaaattaatagactcgctgccgaggcccaaccatgacactctgaagtacatcctggagcatctgtgcagggtgatagcacactcggataagaaccgaatgaccgcccacaacctgggaattgtgtttggaccgacactgtttcgacctgagcaggaggcctctgacatggcggcccacgtattctaccccgggcagctggtccagttgatgctcaacaactttgccagcctcttcacttgacccaggcgaggaagaggaaggcgcttcctgtgatttgtcagctagcctttggagagggctggcgggttttctgttctgaagatacaatgtcctcccaagggacacccttcatttcccgctccagtctcacttgagctcctggctaagaggggttgctgaaggggaaggtataggagcccgcttctgctctccccaacatgacaggtgatgcttgttctcagtattcctttattgtcaggaaactgtgtcattattaaagtttgttctttcct

SEQ ID NO: 489 - protein, 544 aa, Mus musculus
SLVDDRSCCASRSWGRQDHILSQLPVYCNLAGLLRRPGSLVRSPCIPSHALQEAEWLRAAPNRILKRKALSKPGSMEQTETLTRDSSALQPQEWLDPQGLPSLSQSVPWLALSEQPGALRPCSALPQLLDDPHVEERSGLLNMTKIAQGGRKLRKNWGPAWVVLTGSSLVFYRERPPQSASLQGWARAGSRPESSVDLRGAASGCQLSSRRNVLHIRTVPGHEFLLQSDEETELRDWHRALRTVIERLDRENPLELRLSGSGPAELAELSAGEDDELESEPVSKSLMRLGSRRTSSRCAEGTDQKNRVRNKLKRLIAKRPTLQSLQERGLFRDQVFGCQLESLCQREGDTVPSFVRLCVEAVDKKGLDVDGIYRVSGNLAVVQKLRFLVDRERAVTSDGRYMFPEQAGQEGKLDLDSAEWDDIHVVTGALKLFFRELPQPLVPALLLPDFRDALELSEPEQCLSKIQKLIDSLPRPNHDTLKYIHLCRVIAHSDKNRMTAHNLGIVFGPTLFRPEQEASDMAAHVFYPGQLVQLMLNNFASLFT

SEQ ID NO: 490 - DNA, 37545 bp, Homo sapiens
  misc_feature (1)...(37545): n = A, C, G or T/U
gcatttaaatgtatttgcctgtatacatgcctgagaaaggttatctccctttttttttttttttggagacagggtctccctctgtcacctaggcaggagggcagtggcacaacacagcacactgtaatcttgaactcctgggctcaaaatgatccttccatctcagcctcccaggtagctggaacttcaggcaggcatcaccgtgcctggataatttttaaattttttttgtagagatgcagtctatgttgacaggactggtctcgaactcctgggctcaagtgatcctcccgcctcaacctcccaaagtgctgggatttcaggcatgagccacggcagtacttcctattctatatgagccttgaaagtgcttagtattggccggatgcagtggctcacgcctgtaatcccagcactttgggaggctcaggcaggcggatcacgaggtcggagctcaagaccagcctggccaacatggtaaaaccccgtctctactaaaaaagtacaaaaattagccgggcctggtggtgcgtgcttgtaatcccagctactcggggggctgagacaggagaatcacttgaacccaggaggcagaggttgccgtgagcctagattgcgccactcactccatcctagtgagactcagtttcaaaaaaaaaaaaaagaaagtgcttatattgccgggtgcagtggctcatgcctgtaatcccagcactttgggaggccgagacaagtggatcatgaggtcagttcaagaccagcctagccaacatagtgaaaccccgtctctactaaaaatacaaaaaattgctccctctccctgtctccgactttccacggtctcccactttccacggtctccctctgatgccgagccgaggccggactgtactgccgccatctcggctcactgcaacctccctgcctgattctcctgcctcagcctgcccagtgcctgggattgcaggcgcgcgccgccacacctgactggtttttgtattttttggtggagacggggtttcgccgtgttggccaggctggtctccagctcctgaccgcgagtgatctgcccgcctgggcctcctgaggtgctgggattgcagacggagtctcgctcactcagtgctcaatgttgcccaggctggagtgcagtggcgtgatctcggctcgctacaacctccacctcccagctgcctgccttggcctcccaaagtgccaagattgcagcctctgcccggccgccaccccgtctgggaagtgaggagcgtctcagcctggctgcccatcgtctgggatgtgaggagcccctctgcctggccgcccagtctgggaagtgaggagcgcctcttccccgccgtcaacctgtctaggaagtgagaagcgtctctgcctggccgcccatggtctgagatgtggggagcgcctctgccccgccgccccgtctgagatgtgaggagcgcctctgcccggccgcgaccccgtctgggatctgaggagtgtctctgcccgaccgccaccccatccgggaggtgaggagcgtgtccgcccggcagccgccccatccaggaggtggggggcagcccccgccccgccagccgccccgtccgggaggaaggtggggggcagcgcccgcctggccagccgccccatccgggaggtggggggcagcccccgcccggcagccaccccatccgggaggtggggggcgcctccgcctggccgccacccagcccgggaggtgggggggcacctctgcccggccgccctgtctgggaagtgaggagcccctctgcccggccgccaccccgtctgggaggtgtacccagcagctcactgagaacgggccatgatgacaatggtggatttgtagaatagaaaagggggaaatgtggggaaaagaaagagagatcagattgtttctgtgtctgtgtggaaagaagtagacataggagactccattttgttctgtactaagannnnnnnnnnnnnnnnnnnntagagacagggtttcaccatgttggccaggctggtctcaaactcctgacctcaagtgatctgcccacctcagcctcccaaagtgctgggattacaggcgtgagccaccgcacctagccatttctgtattttcagtagagacagggttgccatgttacaggccaggctggtctcaaactcgtggcttcaagtgatccacccagcttggcctcccaaagtgctgggattataggtatgagccaccaatgcccagccccttcaacatactttatttcttgcttccctgccatccattttccacagagcagcttgtcattcaccagaataaaatctaaattcccacaatggcttcacaggccctggtgatctggcccctgccatctctctcacctcatctcagtctaccctcctcctcactcactgtgctagtgctatactggccttgccaattctgccttttcagctcttagctgcctcatggcctttgcatttcctagtccttccgcttagaacattcttaacctcttattgcctggcttgctcctaattctttggttaaactctcagttcaaatgttactgcctctgaaaggccttccctatctacctaagttagatcttcccccagaagtcactctctgtcacattttcctggcagtttattctatatcatttccttagttagtgttggtctcctgaccatactaaataaaatctgtcttattcattgccatacccccagcacgcagaattgtaattggcctattctaaggattcaaaaaatgtatgttgaataaatgaatgaagaaataaattaacaaatggctagaagagaagatatttaaagaagagagaaggatctaaacaaatgtagatcaggtggtgtgatgcaagaccaaaggttgggaaatataaactcaacttgtctgtttcttagcacagtgctcagcacatagtaagtgctcagggagtatttttcaaatgaactaaatgacgagttgctgagatggggcagaaagggccactggttaaaggtctagaatgctaaaataaaaatcctaaatgggacaggaagggcgtcccttaagaataaggactgtctccttccgggctcccatggagaccctcctcttaccttaagctcgacagcattgatgagcttgccacacttgtcacactggtcaccccgagcctcctcatagccacagaagggacacacgccctccacgaagcggtcagccaggaagcgagcacagtgctcacatcgcagttgctccacagtatcttgcagcacaaaacctcgtttcagcaactgctggaaaatgtcctgggtgattctggtgaggtgggccagggatcaggaagagacagtcagaagacgtggtggaccccttcctcctgccactccaaccagggacccaaactcagtgacaaagaaatcaggcagaaggctcctcaaggaaaagggcatctattcatcttttgagagttttactggatgagctcagacccatcacacatattccccaactgcccacataatctttcccctcaacactttagaattcacttttgttgaacacagatttatctgttttgtatttttcattaacaaaaatctccaataggataggactgtgcctgttctttaatatatcctaaaaattaagtcagtccaagtgctaaactaaactgcatagcactatcagttggcggcctgtctactatgtaaagttttgggggtttttttgtttgttttgagacagagtctcgctctgtcgcccaggctggagtgcagtggtgcgatctcagctcactgcctgcctcagcctcccgggttcaagcaattctctgcctcagcctcccaagtagctgggattataggtgcccaccaccaggtccagctaatttttgtattcttagtagagatggggtttcaccatgttggccaagctggtcttgaactcctgacctcgtgatccacccacctcggcctctcaaagtgctgagattacaggcgtgagccactgcgcccagcccttttttttttttttttgagacagtctcactccgtcaccaagtctgaagtgcagtggcactatctcagctcactgtaagctctgcctcccgggttcatgccattctcctgcctcagcctccagagtagctgggactacaggcgcccaccaccacgcctggttaatttttttttttttttgtatttttagtagagacagggtttcactgggttagccaggatagtctcgatctcctgacctcgtgatccgcccgcctcggcctcccaaagtgctgggattacaggtgtgagccaccgcgcccagccccagcctttttttttttttttttttttttgagacagagttttgctcttgttgcccaggctggagtacaatggcatgatcttggctcaccacaacctccgcctcctgggttcaagagattcttctgcctcagcttcccaagtagctgggattacaggcacccacaaccacgcccaactaatttttgtatttttagtagagatggggtttctccatgttggtcaggctggtcttgaactcctgacctccggtgatccgcccgcctcggcctcccaaagtgctgggattacaggtatgagccactgcacccggctatgcaaagtttttataaggatgagtattaggcagaggaagaatgagtttatgtgttataaatgcatacaggagtgggaagaagtgtcttagacttcaggacacagagaggaagggaggcactagagggaagatagatatttcccatcagcctgcgtctggtctctgccctccctcagctgctccttcagctcctggtcaggcttctacacacaccatcttccctcaaaaatgcctggataactgcccagggtgatattgagatcctaagtttaggagtgcccagacagccacccgggttccttctgtctccaagatactcccactgttcccagtctcagccttcaagccccatttctgcctcattagaggaaacttacttggtctgnnnnnnnnnnnnnnnnnnnnattgcactgagctgagatcgcgccattgcactccagcccgggcaacaagagcaaaactccatctcaaaaaaaaaaaaaaaaagaaacaagtgcagatctttacaaaataaatttatttgtgtggcataaactgactatataaacatggaagggtgatggctaatggagtgaacagttaggtggagctaatgaatgaaaactttcgagttttttgttgttgctcttttttccatctttcagagagggctttgtagtagagttttgttgttgttgttgttgttgttgtttttgagacgaagtctcactctgttgcccagactggagtgcagtggtgcagtcttggctcactacaacctccacctcccgggttcaagcgattctccagcctcggcctcctgagtagctgggattataggcacgtgccaccgcgcccggcttatttttgtatttttagtagagatggagtttcaccatgttgtttaggctggtctcaaactcctgatctcgtgatctgcccgcctcagcctcccaaagtgcgcggactacaggcgtgagccaccgtgcctggcttgttttttttttttttttgttgcttttttttttttttttgagacaaaatctcgctctgtcgcccaggctggagtacagtagcgtaatctcagctcactgaaacctccacctcccaggttcaagagattatcctgcctcagcctccctggtagctgggattacaggcacgcaccaccacactcagctaatttttgtatttttagtagaggcggggtttcgccatgttggtcagactggtctgaactcctgacctcaggtgatccggccgcctcagcttcccaaagtcctgggattacaagcgtgagccaccacacctggccccaagtgagttttgatctgagtttttgaaggtgagaaattataattcctcaggacctctctcctgaactccatatgcctaatatccaactgtctacctgacttctctgcctggctatctaacaggcatctcaagcttaacaaacccaaacagtatggctgcatcccacctgaaagcctgttctcctcactcacgttcacagatggtactaccatctactcaggccaaaaacttacaaggcatctttttcctgaccatcccaaattccagtctatccaactccgtggagtttacctccaaaaatatacctcaagtctattttttcttttccatttctagtgctactaacctagtgcaagccaccattatcccatttctgggttgtagccttgttgcctccaaatccttctccatacttttttttttggtggagggggaacagtcttgctctgtcacccaggctggaatgcagtggcaatcttggctcactgcaacctccgcttcccaggttcaagaaattcttctgcctcagcctcccaagtagctgggattacaggtgtgcgccaccacggcctggataatttttgtggtttttttttttttttagacagagtcttacnnnnnnnnnnnnnnnnnnnntcttggcgcactgcaacctccgcctcccaggttcaagcgattctcctgcctcaccttcccgagtagctgggactacaagtgcccgccacaatgcccggctaatttttgtatttttagtagaggcagggtttcaccatgttggccaggctggtcttgaactcctgactcaaatgatccacccacctcagcctcccaaagtgctaggattacaggcatgagccaccgcgcccggcctggacttttcaaaatgtgtaattctacatttgtgtgacagtttttaaaatacctgtctatcctaccagacagaaagtcccatgacagcggagatcctgtctgtcttgttcccctctgtatacccagctcctagcatgcagggactggaaaggagtaaacactcaaatgtttattgaatggcaaacatactcagaactgtaaataatttcattttgacggaaaaaactgcgtatgtataaatattatcttagtgtagcaggagagtgacaaaatatgttactgagcctgcagtcaggggccttgtgaattacacaaaggaaccatcgatagaattctaaaaaggagtgataatagtctgtgcagttttaagcagtcactctggaggcagtgtggagtacagagtgtcagggaaagaggataacagatgacaaggtctgttagtatctgtgtagtgacagtgacaacagagaggagaaggggtggattcaaagactacttaacagttagagtcaacgacttggtaagggaatgaataatacagctagggagaaacgaagaagtctagataacaccaagatttctggcttggatttttaggtggaaggtggaggctgttcaacaaaggcaggtgaataaataaaagggcatttagcaggaaaggtaacaggtttggttttggatatgttgaatttgagatgcctgtagaggtgaaggagtctaggatagtatggcaaatgtgtctggagttcagaatacagatctggactggaaaaatagagttagctcctatcggtgggtaaaaagtagctgaaaaacatgggtgcagggccggcacagtggctcatgtctgtaatcccagcactttgggaggccaaggctggtggatcacctgaggtcaggagttcgagaccagcctgtctgggcaacatggtgaaaccttgtctcttcaaaaaattagccaggcgtggtggtgcacacctataatcccagctacttgggaggctaaggcaggagactcgcttgaacccgggaggcggaggttgcagtaagctgagatcgcgccaatgcactccagcctgggcaacaagagcgaaactccgcctcaaaaaaaaaaaaaaaaaaggatagacaagaaaaacatgggtgcagatgggacagatggagtgtccaaaatgataggctaagagaaaatgtaaaaaaaaaaaaaaaaaaaaaaagagatgtaagaattaaaaggagaggatgaaaaattaaagagagatcagcaaacgggacctagcaggcaggttctggctctatcaacaatttccactacaaaatcaagccccactcacatgtgccatgtctactcacactggattctgctggggccgcagcgggggcaaactttctaggcccttctcccaagcagtaacagccatagcaatctcctcctcagatagggtagccagctcctcctcctataaagagtggagagaatcccttaccaggtgaggagggcccacagggtaaagaaactttctccttgccactacctgaaaaagttagtggccatgctcaaagtccatctcctagccacctcccacctcaggccccaaggctctgccctattccaaacctcaggctcattggtgacagcccttccctcagcggggctgggctggggctgcttttggaggtaaggccggagagccaggacaccttgctgtttcagtacagtctctgcagctcgctgacatggttcctgggtactcagtgtctggaaccagctgtgcagggcactcagctcctctgtgggtatggaagaaaagaaaatcagcaaacataaggacctggtaggcaggagcgggcatctttccccttctttgtgaggtttctccagttgctttccccagttccctcaaccatcttctgctatagttgcccagtcaagctgtaccttgaagggagttctcagtattctactgcccattctgtaatccctacaccaagctcctagggttggagtgatatgcacagttctcaccagggaggtaggcgggatcttgcagtaatgggtatagggctccccacaaaacaatgtcggctagagattctgtctcctttgttggggatagaaaaggaaaatgtacacaaatgagacactcagtttcttcccaatggtaatatctaacatttactgagcactttatatgtcaagcactgtattaagcactttatatgatctcacttaatcctcacaataactcactgagataggtactaatattatcccatttcacaactgaaaaaaattgaggattagagagattaagtgatttgccaagattacactactagtaagtggcagtgttgggttcgaacactctgaatacagtcttccctcttaatccttacaccataagccttccccagtcctcatctcaagacccaactcaccccagccaggaaaggacagttctgacgactcaagctgtggtcaatgtgagtcagggctctccgcactgaaccaagaacatcttcccccttcttgccttggaccactaaatagtacagggcagcagacaaagctggctaaaatgcaggggacatgagtcaggatggccacgcagaacaagggcctgcctgacatcccccataccttagtcctacctgcagctctgtcgcttcccattccagccactggttagtgaggtcatcttgctcccagccagataacaaaaaaaaatatctgcccagagagagagcaacagatgatggacttagaggggcccatttagcccatttctcatcacacagggaaacaatggctgcaaataaagccacacaaatgacagtgaggcctgatttgattcagccacctccctacaccaaggaccaatactgaccggcagattgcactagtggagaagaggtagttgccgctatccagctgcaagacagggaccttaggccgggtcaggaacgggaccacacaatctgatgcaagaatggaaaatgggttaaaaaaaaaaaaggaaaagaaaagaaatactttgtcaacttaggataaccttgcattgttcagtgagtaaaaaaagaaagatgggcagtctcaacccagaagttccaggataggaccactgaaagggggtggtccggaatgggctggagaggccagcaggtgttcagctgaaactgccagctggaagcaacagatggggactgcagaggaggtggtggtattgggatagtgctgcagccaagaacttaacgactgaaagtaactgggatatcttcataattatctgaaggtcacagtgggagaacaaaattaaaagaactgagaagacttacaagagaacctcctaagagtcacccaaacaatcggctgagaatgagaagaggtaaacagaaaggaacgtgtgtgtgtgttaggaggggagagagggatttcctaagaacacaaaagggtgcctgggggctgtcatgctagtaactaaagagcagagggggatgcctgataggtgtaggagaaggttgggaagggaagagcagtttactggggtgaggcggggaccgggaagacggaagaggggaggagagagataagggaagggtattatattgagggtaattaaaggaagtgaaagatgtgactgggagggaagaaggcgtggagtgatcaaggataataggagaagtggccgattggggtgtgtggcgagggctaggggtttggcaaagacagctgcagagaatctggcgtgtttcggtcccgcccccccatccaccgcccaccagcaccagcacgagtaccttccgggcctacagtgctgatgagcacctctgctctgccccgggctctcccggcggcggccagcaccggcaagcaacccgggacgccatcactcacgaacagtctcatttcgccgtgaatccctcgctgatgcaaccggaaccggcctcccgcttctgagttcagcggcctccgcgaggcacgccgggaaatggagttccgtattaggccactgccctggcaccgctaccggaaagtagactatttctcccatcatgcaacgctaagacacaggaaaagactatcatcgagatgaagaggccgcagatgcgggctagactgcactttttttttttttttttttttttgtgagagggcgtctccctctgtcacctgggctgaagtgcagtggcacggtcttggctcgctgcaacctctgcctccagggttcaagtgattctccggcctcagcctcccatgcagctgggactacaggcacgtgccaccacgctcggctaatttttgtatttttagtagaggcgggctttgaccattttggctaggctggtctcgaagtcctcacctcagatgatccgcccgcctcggcctgccaaagtgctaggattacaggcgtgagccactgcgcccggcctagagcagcactttttttctggagatccagaagagacgtttaggttttagggcaagtcgcacttttatcctcttacgctgctggagggcggtgactgaagccgcggctgcttctcttgttgtggagaatgaaatggccatgtcataacagcagctactcgcagtggctctcgatgcaagctcttaacggtcagagttttagagttcggagttaccatgtgcggaattagtgacaaagtggaagttagtgtacatatccatcctatcaacaacaacaacaaaaatgtacataggccgggcgcggtggcttatgcatgtaatccagcactttggggagtcgaggcgggcggatcacctgaggtcagcagttcgagaccagcctggccaacatgctgaaaccccgtctctactaaaaatacaaaattagctgggctatggtggcaggcgcctgtaatcccagctacccgggagactgaggcaaaaaaaatcgcctgaacccgggaagcggaggttgcagtgagccgagaccgcgccattgcactccagcctgggcaacaagaggaaactccgtctcgaaaaaaaagaatgtagacaagtaaaatattaataccagtctgagttcatatacagctcgacgtctcatcaaaggggtagaagagcatctcttttttttttttttctttgagacggagtcttgctctgccccccagtctggactgcagtggcgcgatactcggctcactgcaacnnnnnnnnnnnnnnnnnnnnnnnnnnnnnnnnnnnnnnnnnnnnnnnnnnnnnnnnnnnnnnnnnnnnnnnnnnnnnnnnnnnnnnnnnnnnnnnnnnnnnnnnnnnnnnnnnnnnnnnnnnnnnnnnnnnnnnnnnnnnnnnnnnnnnnnnnnnnnnnnnnnnnnnnnnnnnnnnnnnnnnnnnnnnnnnnnnnnnnnnnnnnnnnnnnnnnnnnnnnnnnnnnnnnnnnnnnnnnnnnnnnnnnnnnnnnnnnnnnnnnnnnnnnnnnnnnnnnnnnnnnnnnnnnnnnnnnnnnnnnnnnnnnnnnnnnnnnnnnnnnnnnnnnnnnnnnnnnnnnnnnnnnnnnnnnnnnnnnnnnnnnnnnnnnnnnnnnnnnnnnnnnnnnnnnnnnnnnnnnnnnnnnnnnnnnnnnnnnnnnnnnnnnnnnnnnnnnnnnnnnnnnnnnnnnnnnnnnnnnnnnnnnnnnnnnnnnnnnnnnnnnnnnnnnnnnnnnnnnnnnnnnnnnnnnnnnnnnnnnnnnnnnnnnnnnnnnnnnnnnnnnnnnnnnnnnnnnnnnnnnnnnnnnnnnnnnnnnnnnnnnnnnnnnnnnnnnnnnnnnnnnnnnnnnnnnnnnnnnnnnnnnnnnnnnnnnnnnnnnnnnnnnnnnnnnnnnnnnnnnnnnnnnnnnnnnnnnnnnnnnnnnnnnnnnnnnnnnnnnnnnnnnnnnnnnnnnnnnnnnnnnnnnnnnnnnnnnnnnnnnnnnnnnnnnnnnnnnnnnnnnnnnnnnnnnnnnnnnnnnnnnnnnnnnnnnnnnnnnnnnnnnnnnnnnnnnnnnnnnnnnnnnnnnnnnnnnnnnnnnnnnnnnnnnnnnnnnnnnnnnnnnnnnnnnnnnnnnnnnnnnnnnnnnnnnnnnnnnnnnnnnnnnnnnnnnnnnnnnnnnnnnnnnnnnnnnnnnnnnnnnnnnnnnnnnnnnnnnnnnnnnnnnnnnnnnnnnnnnnnnnnnnnnnnnnnnnnnnnnnnnnnnnnnnnnnnnnnnnnnnnnnnnnnnnnnnnnnnnnnnnnnnnnnnnnnnnnnnnnnnnnnnnnnnnnnnnnnnnnnnnnnnnnnnnnnnnnnnnnnnnnnnnnnnnnnnnnnnnnnnnnnnnnnnnnnnnnnnnnnnnnnnnnnnnnnnnnnnnnnnnnnnnnnnnnnnnnnnnnnnnnnnnnnnnnnnnnnnnnnnnnnnnnnnnnnnnnnnnnnnnnnnnnnnnnnnnnnnnnnnnnnnnnnnnnnnnnnnnnnnnnnnnnnnnnnnnnnnnnnnnnnnnnnnnnnnnnnnnnnnnnnnnnnnnnnnnnnnnnnnnnnnnnnnnnnnnnnnnnnnnnnctgccaccatgcccggctaatttttgtatttttagtaaagacggggtttcatcatgttggccaggctggtctcaaactcctgaactcaggtgatacacctgccttggcctcccaaagcgctgggattacaggcatgagccactgctcctggccaaaaatagtttttaaaactagccaagaggctgggcgtggtggttcatgcctgtaatcctagcactttgggaggccgaggtggacaaatcacctgaggtcaggagtnnnnnnnnnnnnnnnnnnnnnnnnnnnnnnnnnnnnnnnnnnnnnnnnnnnnnnnnnnnnnnnnnnnnnnnnnnnnnnnnnnnnnnnnnnnnnnnnnnnnnnnnnnnnnnnnnnnnnnnnnnnnnnnnnnnnnnnnnnnnnnnnnnnnnnnnnnnnnnnnnnnnnnnnnnnnnnnnnnnnnnnnnnnnnnnnnnnnnnnnnnnnnnnnnnnnnnnnnnnnnnnnnnnnnnnnnnnnnnnnnnnnnnnnnnnnnnnnnnnnnnnnnnnnnnnnnnnnnnnnnnnnnnnnnnnnnnnnnnnnnnnnnnnnnnnnnnnnnnnnnnnnnnnnnnnnnnnnnnnnnnnnnnnnnnnnnnnnnnnnnnnnnnnnnnnnnnnnnnnnnnnnnnnnnnnnnnnnnnnnnnnnnnnnnnnnnnnnnnnnnnnnnnnnnnnnnnnnnnnnnnnnnnnnnnnnnnnnnnnnnnnnnnnnnnnnnnnnnnnnnnnnnnnnnnnnnnnnnnnnnnnnnnnnnnnnnnnnnnnnnnnnnnnnnnnnnnnnnnnnnnnnnnnnnnnnnnnnnnnnnnnnnnnnnnnnnnnnnnnnnnnnnnnnnnnnnnnnnnnnnnnnnnnnnnnnnnnnnnnnnnnnnnnnnnnnnnnnnnnnnnnnnnnnnnnnnnnnnnnnnnnnnnnnnnnnnnnnnnnnnnnnnnnnnnnnnnnnnnnnnnnnnnnnnnnnnnnnnnnnnnnnnnnnnnnnnnnnnnnnnnnnnnnnnnnnnnnnnnnnnnnnnnnnnnnnnnnnnnnnnnnnnnnnnnnnnnnnnnnnnnnnnnnnnnnnnnnnnnnnnnncatgcccagctaattttttgtatttttagtagagacagggtttcaccatgttggccaggctgatctcgaactcctgaccttgtgattcgcctgcttcggcttcccaaagcgctgggattacaggtgtgagccaccgcacccggccttatttttttttttttttttttttttttttgagacagggtcttgctctgtcacctaggctggagtgcagtggcatgatctcagctcagtgcaatctctgcctcccaggttcaagtgattcttgtgcctcaggctcccaagtagctgggactacagtagctgggccagcacacccaggtaagttttgtatttttagtagggatggggttttaccatgttgcccaggctggtctcaaactcctgacctcaagtgatccacccgcctcagcctcccaaggtgttgggtttacaggtgtgagccatcacgcctggctgagatgctttcctgtgcatgtaatctttcagctgagatctcagtgatgcgtaagagttatctaggtgaagactggagggagtggagaagggacgtgtttcaggcaaaggaaacaacatatgcaaagaatctaagatttcagtgcactttaagaatgtgaggaattcgcataagactgcagtgtggagtttgtggtggagactgtgaaaagggtagagagggaatctgtaaatgacattataaaatgtggaaagtctaagtcaggagagtagcagggcatatgtgttttagaaaggtcactctggctgctgtgtcaggaatggttggaaggggagcagaactatatgcaatgagaactatatgcaatgagactagttaggaaattatatcatccaggctaaaggagtggtagttgtggggataaaaagtaggtagattgggaaaatataaattgaagtgttcagtaatcaattgaatcaatgtgggtggcgaggaaacaagataaattcaggttggctgctaggtttctggcatgggaaatagggcatactttctatgtgctacaacagatgatagtatttcctctatcatagtgatcattattacatcatattttcattgttatgagtgggcagggatcatatttttttgttttgttttaagacagagtctcgctccgtcacccaggctggagcgcagtggcatgatcttagctcactgcaacctccgtctcctgggttcaagcaattctcctaccccagcctcccaagtagctgggagtacagacacctgccgccatgcccagctgatttttgtatttttattagagatgggggtttcaccacattggccaggctggtcttgaactcctgacctcaggtgatctgcctgcctcagcctcccaaagtgctgggattgagctggatgtgagccactgcacccggccccatatttaccatcttaattgacaatgcctagcacatagttcctgcccggcatatatggtagtaaacattcaataaatatttattaaattattttatttatttattttgagacagggtctcactctgtcgcctaggctggagtgcagtagcactatcacgcatcactgcagcctcaacttcccaggttcaatagatactcccacctcagcctcccgagcagctgggactacaaggcacacactgccatacctggctaactaaaaaaaatttttggccaggcgcggtggctcacgcctgtaatcccaggactttgggaggccgaggcgggtggatcacgaggtcaggagaccgagaccatcctggctaacacagtgaaaccccgtctgtattaaaaatacaaaaaattagctggacatggtggcgggcacctgtagtcccagctgctcaggagaatgaggcaggagaatggcatgaacctgggaggcggaggttgcagtgagccgagatcacgccactgcactccagtctgggcgacagagcaagactccgactcaaaaaaaaaaaaaattttttttgtagaggcaggatctcactatgttgcacctcaagctcctaggctcaagtgatattctgccttggcctcccaaagtgctgggattataggtgtgagctactgtaccaggccaatatttattgatttcatattaaactaaatagtggtattgggagagaaacaggtttgtgataagttcagtttggttcatactgagtttgtcgtacctgtgaaatactcaagtggattttctggtggacagtggattagatgggagccccagagaaagatctggacttgagatacagtccttagcagcacatggaaatcatttgagctggggagagaataagaccacccagggagggtatgcagaaagcacagggcacaggatctcagataggcttctgtggtttaaggaacaggcagaggaaggtcatttctcatgccacagacaaggaactgccagaaaggtaagagggataccagcagagtgtttgtaggagagaaaggtcaattgtgttgcctgctactgagatgtcaagcaacataaggattgcataaggactgcagcatgctcaggcaaggtcgggggtgactctattgaggagtgactttgaaaaggtggcggagtgaggggacaggaaatggagatcccctctacagtgtaggcaactcaagaagttcgactgtaaaaagaaagagagaggctggactcggtggcttacgcctgtaatcccagcactttgggaggctgaggtgggcagatcacgaggtcaggagttcgagaccagcctggccaacatagtgaaagcctgtctgtactaaaaatacaaaaaaaaatagcgggcatagtggcaggcgcctctaatcccagctacttaggaggctgaggcaggagaatcacttaaacctggaaagcggaggttgcagtgagcagagattgtgccaccgcactccagcccaggcaacagtgcaagactctgtctcaaaaaaaaaagagaagaagaaagagagagagacatatatatggtggtacctggaaagcccagtaaggggaggtttgtctaaagacgggagagacttggatatgtttaaaagtgaatgcgacgaagctaacaaaaacaagctaaagtataggagagagagtttcagagaaggcaaaaaaagggtggattcaagcactgaacaccaaatgaataaataagtgaataaatgggtgaaattagtcactattttggaagtgggaaggaagagttgaggggtaggattctccatgtgttgaagtgaagtaaactaggaagatcactgaggcagaagcccagtactagccacccagccctcaggggaagagagctggctctctgatatcaccagtggggagggtcattcgctccttaacccacctctccaaacccaaacagaaagcctcacattgtgcagtggagaagctgagagaagaggaaaagaggagtggccaggtaaggcagaagcagaagtgtgggttttaaagtgctggtaatccagggaaggtcacttcccaccttccaccaaggagaagctggcatcagtcccctatctacctgtcatagcgtcttgcattacttgtccattgttcctgattcaattgtaattattaagtttattgtgtcattagttaaggtctgtctctccttaagctccaaaagggctcattcccttctctcatctccagtgcctgacactgctccttgcacgcaggaggcactcaatcaatccttgataaaagcataaatgaggccgggcgcagtggctcacacctgtaatcccagcactttgggaggctgaggcgggtgaatcacctgaggtcaggagttctagaccagcctggccaacatggtgaaaccctgtctctactaaaaataaaaaaactagccaggtgtggtgacaggcacctgtaatcccagctactcgggggactgagacaggagaatcacttgaacccggggggcggaagttgcagtgacccgagatctcgccatcacactccagcctgggggacaagaacgagacttcgtctcaaaaaaaaaaaagcatgaatgaacccacacactaaagtagctcctgcctcaagaggcttgtgtgtacaggacagtatcaaggcttctcagctcccaaaatcgtgtcctggattgggagggtggtgatatttcaactctgaatccctctgtgtttctcccactttgtctttctctctgatttggtcttggtatttatttggctttctgtttctctgtcaccatgtctctctgagtctgcacaggaagcacgcagctatggtctgaggtgactggtaacggaaacattgatgcttgcataaatttaataaagaataacacacatttttgtctttgtcattaaccttgtgtctccctgtttctgtcttgaacctgattctttcttcttatctccttcctgtgtccacctcaagactcccaccactacccaggaccaactcctgctcctgaatcttctgatgggccccacaaggtacttggaggaaaactactggcctaggtcatctcctctaatttcctgccttgctggccatgcagccctgctgaccacatcctctctcatgttacttacatacttcctcaccagacaccaccaggagttctcagcccccaaaacctgtcaccgatcctcaccaggctgtttgctctaccctctcccccaactcaagggctcccgtcctcacctccctgcaacactgctcctagaaccatgtctgtctacctggagacagccaggcctattcccttctgggtctccagtgtccctttttctcacaggtgacagtgctggctacaatgctatccagccggtggtggccaagttcctgggggatcctagggctgggcccccgaagccctcctcggggatcccagctctgtgccctctatgcctttacttatactggggcagatggccagcaggtgtctctggctgaaggggataggttcctactgcttcgaaagaccaactccgactggtggttggcaagacgcctagaagctccctccacctctcgacccatcttcgtcccagcagcctatatgatagaggaatccatcccttcccagagtccaactaccgtcatccccggccaattgctctggactcctggtgagtaagcgctaagccctctcccttcaccttcctacctcccatcaccttcctacctccctggcttctgggaattttggggaggtccccctccctcaagcttctgctaaccatcttctcttgtttttctttgatcagcctacctcttgcccccgccatggcatcctcatcccactgcctgtcctcctagtcctaaggcttctaggtctcatgccattttccacatcctccctctgcccttcttgtcttccctgtgagttcccaagatgagggacccagttacaacaacacctctgatcacctgccacccaccctccccttttctgtttccagggccgaagttgtttcatggttccctggaggagttgtctcaggccctcccaagcagggctcaggctagctcggagcagcctcctccacttccccgcaaaatgtgtaggagcgtcagcactgacaatctgagccccagccttctgaagcctttccaggaaggaccaagcggaagatccctctcccaggaagacttgccgtcagaagccagtgccagcacagtgagtcacagctcttctgagctgggccctgttctaggcacaggacagacagcacctctgtcttcaggggactcccctggggatgacaaacacaaaaacaaataaataagataacgcttggtactactgataagtctaaaggcaagttaatgtggtggagagtggctgaggtggtgcggggagacatctgtgaggtcacggcattcagttgactctgagcaaggaggagaaagaggcagccgagaggcaaactgggtaggaggtgagaagggacagtaggtaccaaaggccctgaggggacagggcacagggcgcagtggaggcactgaaaggccagccctgtgctcttccttcctccagactcctagcccagggcagggtttttctgtgttctgcttgcctgataggctacagcaggtctcctctagagatgtgacttgcccagcccttccctctctttcttaaccgtgggtggaaaggggctcctcttcccttctgtagacccttctctgtcttcttttaccttgcaggatgtgagggtggggcacccccttcaacattccccccaccccacaaaaagcctgttcccctttcctgtggccctgaggtgggggtggggtgggggaggcgggaagttggcaacaggaagtgaggagaagagcaaagaaaactgtgagagagagaatttttaaaaagcagctggggcctgaggtttctcccccagtaccctgggtcacctcagcccagagctggcggtgagaagacaatgggggagggagcaggaggtgggaaggccaagagaagcatgggaagggcaacaggcagaatgaccacctccttcttcccccttttctggcaggcaggcccccagcccctcatgtcagagccccctgtgtactgtaacctggtggaccttcgccgctgtcctcggtccccacccccaggccctgcatgccccctgctgcagaggctggatgcctgggagcagcacctggaccccaactctggacgctgcttctacataaattcactgactggctgcaagtcctggaagcccccgcgccgcagtcgcagcgagacggtgagaccttacctcctgcttctccactgtcccctcaagctcttccttcccctgatgaacctcaaggtagtgtgttttctctccggggctctcagaagatcagaagaatcagccaagtataagaagggtgtggagagtgggtagaggtggcatctggatgtagctttatttcctcctcccctaacccagaaccctggctccatggaggggacacagaccctgaagaggaacaatgatgtcctgcaacctcaggcaaagggcttcagatctgacacagggaccccagaaccgcttgacccacaggtgagatccctcccatctcccagtcacatgcagaaaaagccagcttgttatgactttctgttttgtgtaagacattctccattccccaccacaccccccacctctcacccgtatcccacccctcttcctccttcagccagggatccctgagtcgagcgtttccccacctgtttctccaatcctctcccctagggttcactcagcctcagccaacgcacctcgcagcttgaccctccagccttgcaggcccctcgacctctgccgcagctcctggacgacccccatgtgaacctcccatttctttgtgaaggccaagatcctccctgccccccctccccccttttcctgctccacataaacatcttcctctttctgaatatcctcctacccagccctcccccagcaactttaagggacttcactcctgggagaccccctagggaaagccgtggccactatggagggcgagggtgacttacagatcccattccctccacttcccaggaggtggaaaagtcgggtctgctcaacatgaccaagattgcccaaggggggcgcaagctcaggtgagaacccagaatacagctagggcctgggctgtcaactccatagggtagagcagggtgttggaagagcaccctcctcgtgtcattctagaatgacctgttcgctaccactacctcccctctctgtccccgcaggaagaactggggcccgtcttgggtggtgttaacgggtaacagcctggtgttctaccgagagccaccgccgacagcgccctcctcaggctgggtgagtgtgagcgagaggcgcaggaggggtgcgggcgctgcctaccgcctcacgccaatgtgggggcggcagcggggagggcggtgcagaggaaagtaaagaagtgaggaagcctcccacctcctcacagcccaccggggagagggaagcagtgaaggaaacaacaccgtggcctcagtttcctccctcattgtcagggaccagcgggtagccggcccgaaagtagcgtggacctgcgcggggcggccctggcgcacggccgccacctgtccagccgccgcaacgtcctgcacgtgagcgccctcccgcgcgtccccaaggccccacccgacccgagggcgcccccaatctcccgcgcaggcctcccgctaggtctccctgcttattatactccttcccgttgacccgagcgtttccttgcctggccctcagatccgcacgatccctggccacgagttcctgctgcagtcggaccacgagacagagctgcgagcctggcaccgcgcgctgcggactgtcatcgagcggctggttagatgggtggaggcccggagggaggctccgaccggccgggaccaagggagtggggtaggaacgataggagtcaggagcagttgggggcagggtgggctcagtggagagccctggcctgggccgggatgtgggaccctggcagtgggtcagagtccagctagggatgcagatttctctcctctctcaccttcgacacggcccgccccgggtctaggatcgggagaaccccctggagctgcgtctgtcgggctctggacccgcggagctgagcgccggggaggacgaagaagaggagtcggagctggtgtccaagccgctgctgcgcctcagcagccgccggagctccagtgaggcgcgggctggggagggagggtccgggagcgcagcgaggctcccgggcgctcacgccccgctctacctgcctcctgcagttcgggggcccgaaggcaccgagcagaaccgcgtgcgcaacaaactaaagcggctcatcgcgaagagaccgcccttacaaagcctgcaggagcggggtctgctccgaggtgagggggctgggccaggttcatggataagaaaactccagcgaggctcagagtagagcttcccagaactagaccacaaccttctgtgactgctgctttcccactaccccagattgtttaggggagaagctggggtgacctgtacccctttgccagattgtttgaagcaggggaagggaggtggagtgtatttccttgcccaggcctggcacaggcagccaggaggaccagcctcacttaaggataaagacctatgctgagaagagctcctgtgagtgacgctggcactggcttcccgcctcactctacttccccagaccaggtgttcggctgccagttggaatcactctgccagcgggaaggagacacggtgcccagctttttgcggctctgcattgctgctgtggataaaagaggtcattttctcagagaccccagaatcctcttccaacaggctaaggcctagaattttctgcctcccccattctacctagtcttcctactgccctttttctctccacccttatatccctcaccacacacactttcaagcagcagtccttatctactccttcctcatctcccaggtctagatgtggatggcatttatcgggtgagcgggaacttggcagtggtccagaagcttcgctttctggtggacagaggtgagaaggcttgtgggccagtggttgtactaagaatgtcttgcctgagaaccatgggcggtcctacatgaggaagctggcagaatagagaggccgtcaggctggaagtgtatgtcttagctcctgatctctcctcattcatgttgcagagcgtgcggtcacctccgatgggaggtatgtgttcccagaacagccaggacaaggtacttacatggaagacccttcagatccctaaaacttccacatatcctctttgcttcccgtggaaacccccatgtactattcctgggagggttgtcctcatccccaccttagctaccttgccccactgcagaccctctaggcattcctatagtctgctttgactggatttctccagaacttctaatctctcagtctctaaatctttctggcccttcatgagcccctatacctccttctccctccagaaggtcggttagatttggacagtactgagtgggatgacattcatgtggtcaccggagccctgaagctttttctccgggagctgccccagcctctggtgccaccactgctgctgccccatttccgtgctgcccttggtaagggttggagctttggaaagaacccttgatgtgggggacacgggtggtaaataatagaatagaggttcccttatactcttctttcccattctgaccttagagatggaaaataatgttcaactcaggtgcctactccagttgcttttttgtgaatgtttagagggctgaattgaaaagaattatgaggctatagttgggctatgtgaaaaagaaagctgtgctagattaatgatgtcttccatgcctgtgggaaagagcagtgcatttacccatcctgtcctagcaccttccctaaccttactaccatgcctttcccatcactctctctagcactctccgaatcagagcagtgcctctctcagatacaagaattaataggctcaatgccaaagcccaaccatgacactctacggtacctcctggagcatttatgcaggtcaggaagacagaacctctttgttcatgctggggaaaggtggagtggggaatgccacagggactctgtgcaggtggagtgaaggtagggaagcacctaagtttaatgggcaggtgaggaagcaggcaacctctgtgcaggagcatattaccagagtcaaaacctttatttttttattttatttatttttgagacagagtctcgctctgtcacccagactggagtgcagtggcgcaatttcagctcactgcaacctctgcctcccgggttcaagtaattctcctgcctcagcctcctgagtaactgggattacaggtgcccgccaccacgcctggctaatttttgtatttttagtagagacggggtttcaccatgttggccaggctggtctcgaactcctgacctcaggtgatttacccacctcagcctcccaaagtgctgggattacaccgtgcccgtcaaagactttaggtcaaaacctaaaggtcagcatcaagtggggaaatggaaccaagatgctgtgaaaggaataagggaaatcttacttctcccttccctctgcctctttgtctcccattgggacattgctgatggcttctttggttgaactgggcctgggcagtgacttctgagagaggatggccacttgaattaaagactcccaaactgtgagcaggcagaactcttggggcagcccctgaagtcggaagaggcagttatatcttcaggttgtatcctgaaggtttctccactggtccatctccattctccttgtatctccttggtttttttgttaccatgtggaggaatcccagagtgaactcttccctgctcagaactttgaagggttagttagattgctatgaagtggcaagctgctgccatatatccccttccttggcctttgcttacagggtgatagcacactcagataagaatcgcatgacaccccacaacctgggaattgtgtttggaccaaccctgtttcggccagagcaggagacatctgacccagcagcccatgctctctacccagggcagctggtccagctgatgctcaccaacttcaccagcctcttcccctgatgcagggaaggaagaagagaaaacatatttccggtcatctctggtggtgagaggctggtgttctgttttgaggatatccctttaaatctcccaaatgactgtctctatcttcatgagtgtgacttgaggtgttgggatgggtgagggagcttctctaaagaggaaagtgagtggattaacccctgcttctcttcttgttccctgttatcattcctccccaacataataatacataaagtggcatggtattttttctgatgcagttcctttattatcaggaaacagtgtcattatcaaatttctcctcaaaacgtatacagactatacatagcccccagcccatacctcccatccctggggcatcttgtgcaggggactgcagctcccccaatttttctggaaggatagaaaccccttaggaaatgcgatctgtgatggatgagattccctactctttaggcactagagttgaggaattctgtttccccaggtagggatctcagtaagacactcatgttgcccacagccatgttggggggcccagagggaggtggggtatgtccagagctgccccgctgatcatgggaaggaggaggactcagcccctggggctcatccagaatagccacaaagtccagctgagtgttgtcaagatcaagagagtccagggggttacatacctgtccttcgggaggagggtacaaggcaggaccccctcctagcctgcccacctcaggatgaccacagctggggtttgtgcctcccactttgagaggcccatagcaagtgggcaatgggggcagaagtcgaggtggtgctgctgccctatgtgaagccctatttgcccccactacaaaattttcatggcatggtgaaggggtgggataggaacctgacttgtgattgggcaagttgggtccaaagccaggtccatatgtgttcactggagctttagcacggcttgggctaacctgggaaccccccagaaacttgggactctggtaggaaggttcctgggcgggggcatcttccctgcccccaccctcccacagtagctcctgttgagattgaacataattacacacaagctgagccttgagctgccctgtggaatgggtgggggaatcaaagtccaggcaaggcctgggttctgaaggaagataatcagggggtggctgggtataggggcctgactggagatattggggaggagagggctgggggtaatgggaaaagagaggctgtggatgtgggggcccctcactggggtgggcattgaggcagggtgccagtcctgtggagtcagaccccactgggcacccctgttctggcttgacttgcacttgtccataatgttcaagtcgaggacactggctgtaggttccacctagagccttggggcctgggtacagcccagagtgggaagggaactcaccccatgtttcttgggtggggtcaggatatgaggcctgctggggacaggggttggggccatagttggtgggtggaccaggcccaagaggcagagagcctggacccctcgctccataaggctcagctgctgccccttcaggtcccccatatcccagagtatcagtaggtgggaagtccatataggggttcagaccactgcccaccatggaggtcccaacttctggctcttcctgtagccctctagcatccatggcagcattctcagtgatgctggggggctgtggtgagtagacagaggttgggaggtaaggatcaaagttctgtcctccccctgccacagtgggtggggtatggacacagcccaggctcttgaacctctggactctagctggagcaggacggtcagcagcctgggctgggtcactggccctccgggtgacccctgcattggggttgtatcctggatactcggctcggcttctccaaggaggcatgggaagaccacctatccgatccaggctggatgctgcagtgggcgaagtaccaccccctctggctgaagcatatcttgcccgaagcaggtagtgctgggcaggcataaggccaggcagggaggatgctccattctctggtggggagccaggggggaaaggagaggccagggaggagcggcggctgacagtataggcagagctgatgctgctggagctgctgctgcggcgttcaagagagactggggggcccacgcggcgggacacagtggtacctgcaagtgatggggagaaaaggtaggatggtcaaggagcttcctaaatttcaccctgcctcctccatgcaacagccttgccctggattctcaggggtaagctcgttatccctaaccagtctgttctgtctcctacttctcccatgcctattctgtttctgggttaccaaggattcagggttgctatgaacagttgtgcaggttgtgtgctgcacaatcctagggaacagcattcgcatcatagcctttgcatacttgtttgtttgtttgttttgttttgttttgtttgaaacagagtttcgctcttgttgctcaagttggagtgcaatggcgcaatctcagctcactgcaacctctgcctcccaggttcaagcaattctcctgcttcagcttcctgagtagctgggattacaggtgcccaccaccatgcctggctagcctttgcatgtttgtacatcacaactattttctgataaatggaaagtgtcttgaggaaggacaccattttctaattatacaaaagtgctgtgtgacagccctcaagggtgacttcctcctctcaacctcagggcaggtccagatctcaccccagccacacctcccacacccaggtctcaccggtgtgggacaagctgggcagtttgagaccccgggtccctattggccggagttgatgtagctggtccagcctgaggttctcaaggcggcgaagagtggacagaccagtgccagcaatgcaaggtccctcgtccaagctggagaggtcttcagtgctgccccctgcattgccagtcatttccacaccactgtctgtattggctgcactccctgccggggagtggtcactgctgcaggatgactgggccccagggcttggctgtggcttctgtggagaagatgaggtctgagggcaacacccttccccacagctccttcaacttgatgagtggctgaagcctgtgtcccagtgactgctggggttccaaggaagcttgtaagtgtagaaagggctaagcaggtaagagatgggggagcaaactgaatgtgagacgtttgatgagaagaacctaggctggagcacggactggctggactcaaattcttgctcttagttctatgaccttgggctatttctctatgcctgagtttcttcaactgaaaatgggaacagtgagtccctttatcatgaagttgctgtgaggagtacatgaaattatacatgtaaaaggcttggaacatatactaagtgctatttaagaaagagttgccgggtgcagtggctcacgcctgtaatcccagcactttgggaggccgaggtgggcagatcacgaggtcaggagatcaagaccaccctggttaacacagtgaaaccccatgtctactaaaaatacaaaaaaattagcccggcgtggtggcaggcgcctgtagtcccagctactcaggaggctgaggcagaatggcgtgaacctgggaggcggaggttgcagtgagccgagatcatgccactgcactccagcctgggcaacagagcgagactccgtctgaaaaaaaaagaaagagtttgggttggatgcattggctcatcccagcactgtgggaagctgaggtgggaggatcgctcaaggccaggagtttgagaccagcctggtcaacatagcaagactcgatctctaaaaagaagaaaaattagccaggcatgatggggtgtgcctgtagtgatcacttgagcccagaagtttgaggctgcagtgagctatgattatgccactacactccagcctgggcgacagagcaagactctgtcagaaagaaagagagaaagagagagagagagaaagaaagaaaggaagaaaggaaagaaggaaagaaggaaggaaggagagagagaaagagagtgagagagtgagacagaaagattctaaaacctctagatttggggaagcccaaagagcaacactaagacaagagacaggcagactggtcacagaagagtgacttctataggagggaatggatgggttgggaagtaactagaaagatgtccacagggtgggctggggtatggaggtgagggttgcctgggctctctcaccatggcaccctctggcacagtcagtctgctttcctccctgatgggacctccttcccgctccctcttgggctccactgtagaaatggatggtgcccgaggcagggggccatccccacggtgccgtttggtcacatgggcgtcaggaccatgcactgtcttgacatgttttcgcagcgagctaggatctgtatagcgtttggtgcagccagggagcttacatacatacggcttctgttgagtggagagtggagacagaaggcaaacggatcaaagcggaagaatgcagaagaaatgggaaaaagtggtgacaacacagggggcaggggaggagcacacagcaccaaaggaagtaaggaggatggaggcctccggtgggagtcaaagatgcagagattaagtggagggttaggaaaactgacagcctgggaaagatgagggggtgaacccagggctgtgaggtcccataaatccaggggttggagggatcaggggtctcctctagatggaatcttttaggttagccttttggctggttagaggttagaggtaggaggaggagtggttaagtggaaattctgggtttcagaaaagccttttctgggcgaattatgtggggagggggactcacctctgtggagtgggtgctgggctaagggatttcttatgggggaatctccctggtaggtggcttctcaagaggggagggtcgcttagttagggcattcacctcattggaatgggtccgattctggtgcttggctcggtcactggcattgctgaaggctttactgcagccctcgtgctcacacatgtatggcttctcacccgtgtgtgaccgcaggtgcgtcttcaggttttcgaggcgtgagtatgacttccggcacccttcaaactgggggacatgcaggggtcaaaggatagttctcagacagaggacatggagatggaaggaaccctcaatctccaacaggacacacatcagagaatataactcaagatgaaaggcactggggcttcgagagaattcccaaaactaggggacaagggcaggcaagaacttggagaagggaagcagttggaggcactctccctttgggaatataaagatgctagagcatcttctgaccaagccagggcagatttctctgcatggggatcttaggctgtcccaagatggggtcatcttgggggaacgggctgttgtccttgatgcagggtttatccattaggcagagtagtaggcacagtactgaaggccaacaatactttaagaggcccacgaacatgttttaatgtcttttttaaaaaaaattttttttttgaggcggagttttgctctgtcgcccaggctggagtgcagtggcgccatctcagctcactgcaacctccacctccttggttcaagtgattcttctgcctcatcctcccaagtagcagggactacaggcgcccatcaccacgcccagctaatttttatattttttagtagagacagggtttcaccaatattggccaagctggtctcgaactcctgaccttgtgatctgcctggctcagcctcccaaagtgctgggattacaggtgtgagccaccgtgcctggcctgttttaatgtcttttaaaatcaaggggaaaaaaatgagcttttaggtccaagagtgttttaatatatatcatcatattcatctttatgccaacacagtcacacaaacattatttttaatatttgtttatggaagaaaggacttataaaagcaaaagtctgccttgggccctaccttgaaggagagccctgatttaggaagagaccctggacttgggacactggtgcctcaccgtgcacttgtgtggcttctcgccagtgtgtctgcgcatgtgaaccaccagcatgtactgggctttgaagggcctcagctccctggagcagcccccccagtggcacacgaactccttccgctccccgtggatgtgctcgctgttgatgtgctgagggagaagatacaaaggctctccaaggctctcccatgaccctgaggtccagaacagaccttccctccaccccctgttcctcttccacgactccacctcaaggaggaagaggcaggagcaatatcatatctcacatctcaggtcttccagctccctaaggcaaagctacaacttctgagcttctgcctacccaactgagcattcaacctcagtctcctctgacctcctgccctcagccggattccaccatgtcccactcagaatctcctaaaggttctggctagccattcctgttaccccctggggctcacgtgcaccagctgctcttgggagtcaaattcctggctgcagccatcccaacggcagtcagtttcatacacagattcaggctcacgcttctcctctctctcgaggtcctcccgcccatccagcatccccaacaggggatcctagggcaagagaggcaatctcagggtcacttgggtgacagctttagttttgctcaggtcccagaggtaaagctcctgcccatccccttacctgtatgcctgtggagttggggctggacatatcaccttccaagggttcctcccggcacttgccaaccagcatgtccagctcagacttcagcttccccaggggaagaggtgacggtgatgagggtggaagtaagcagaaggaagaggaaaccaagccaggtcttcctgccctaagtgcccccacccaagcagctggaacctcctgggtttggaagggacttcctcctcagactacactggtgaatgggatgggcaaaaggtgggatcccatttggaagcgtctgactcaactgcaaggagtgaaccccagcacccacacctctttacttttctagtactgaaaacttatatcccttgtccttccttcacctttcccctacaaaatccaccacccacccaccctgagctgagggaaatcaggtagcaatatggggactctcacctggcaagttgggaagggtccccgggactgaggatgtgggatcatcccaccccgggcagagtcatggggaccacaaggctggaccccaaaggaaggcgagggccctttttggtgattcatctgggctgggaatcccagagatgggctgaggaggagaggaggcagttacttaagacaattaggaagtctcaggaaggattgggctatttggaggatttctggaagacttgggatttgtagtggttgaggcagtcccagggaagtactgaggagagttgtctttgaaatgacaaggattcaaatagggttaggtagtttgagggcttgagacttttaatggacttgggtaggggctttaggggcctcttggcccggggctgactgcacctcatggtgccaatggagagatgaccgtaggagcctcctggagatgtgcatcgcgagttgatgaaagctacgagggagctgggtgaggtgcggataaccgtctgcaggtccaggctggcatccgacagaggtgagatggacagtgcccgcttcttggtcaacttgactgcactccggggagaagaaaagagtgggcctggggcaggagacagcggagacggatatggtaaaggggcatgtctctccatgcacctaacctatgggtcctgacttggcaaaaccaatgatacttgattctgctttgccctattgatgctatctgtgactttttttttttttttttgagagacacagagtcatgctctgtaacccaggctggagtgcgtggcaccatcttgcctcactgcaacctctgcgttcccaggttcaagtgattctcctgcctcagcctcccctgtaatcggcactacaggtgcaagccaccacgcccggctaatttttgtattgttagtagagacagggtttcaccatgttggcctggctggtcttgaattcccgacctcaagcgatcttcctgccacggcttccccacaaagtgctgggattacaggcgtgagccaccgcgcccggccccatctgtgacttcttgatggtgctctgacgcctcacatctccaagcatctcctcctccaagtgagatcccctgccctcccactttctctttcagaacaagtcagagaggggcagaaagggaagaggtgttgcctgagccctcaccctcggtgcagctgttggtctctctggctggcccataactgtgggggccggacatgaggttagcttggtggcagaagggcgggccagacagtcctagaaaaaagagacagctggaatgggaatggaggatacataaacctcaccttaaaaccccagacatgacctgatcccagattccaggtccatatgacatggggcctcaaatcctcctgtagataggaaactggcatggggtgggggtgggcccaagtgggagatctgccaaatcctcaaggcccagggattggtatatacactgaccttctgtccccacactgggggccccctgactggggaggggccggagacagcagggctcgccatagctactgattggtggtggggtcatcgagttgaacatggcgtctcagaggagggtgtggggacactgcagaaagggaaggtaggtataaaggtggaggaaatagagactgtcagacagcagtctcaggcacagaatcctgggcagaacatccctggtatcccccacccctctaagacatctgccacggaattcgagttgaaaagagcatcactgagccgggcacagtggctcacgcctgtaattccaacgctttgagaggctgaggcgggaggatcacctgaggtcagttgaagaccagcctggccaacatggtgaaacccccgtctctacaaaaaaacaaaaattagccagtcatgatggcgggtgcctgtaatcccagctactcggaaggctgaggcagaagaatcgcttgaacctgggaggcggaggtttcagtgagccgagatggtgccactgcactccagcctgggtgacagagctagactccgtctcaaaacaaaaaaagcatcactcgctgagtgaggggaggggtaaggggaaatgatgtcccagagaggcagaggcagtcttgtagtctgtgtactctggggatcttcttgggaactgggtgggagctttgcctgggtgggagctttgcctgtgtggtctgtgtgtagaaggcatgttttggactaattgtgcctatattaacttcaagtgattttagtaacatggaccctctaattcttcttgctgtaaccctgggccggctttgagggtgggatgggagaactcgtgtgatggatctgacttcaagcactgggcggctctgctagagcccgttcccccttccttctcgtgcccctccccagggacagcccgtgtacaatctctgcagtgtccagcagagggagccctagccacagtcccgacacagagccaggtggggccaggagggagcacaagccatctgccctcttagacagaaaacagtgtggaggaggaggtaaggttcctgaggggagtcttctgggtctgttgggcacaaaggtgaaagctggtgttattctggggtagtttaaatcaggcccacctaatctttttggtctctgttttgggggaacaggaaaggaagtatgaggggagactctgagagaatgaaaaaaacaatgtgatccttataaaagcgtagcgaggaagaaggtgctgctgtccgtttttcttttcaaactccagttttgactccatcccgggttttccagtctcccgggaatgagggtggggtggggcgggatggggtggagaaccaccgggagcgggccgggccggccggcgcggtgggtgatcccgggatgctgggatttagggtgagggcggggtgagatggggagcggaacccggaccccgcgacccagcccggcccggcagcctgggctgtacccttttctaactcctccttttccaaccgaggtgcggatcccgcatccaagacctcccaactcgaccttggaactaatgttggggggcggggggcacagctggttggcagctggatggggggacaattctcccgcctccttccctctatgactcacccaggggaaggagggaagtttgcaaatgatcccccaaacactagagactcccccaaacttgcctactcagtcatctttctgccccactgcctagctgccgaagagcctccaaggaaatggggctacacccctcctcgcccacgcgttccacagcccacccatatctccccttcaggctagtaaaaggaaaatgtcgccaacttttttagcttcggtaaagtttttctggggtgtgagagttcgggatgggacagggagctctagggttcccctgccggagccctaaaccatcttcggtgtctccctgttttccagcgtccccctcgcacccccgctccccaactcccaggagtcggctccgcccccctactcccggtcccgccttccccgcccccgtgcctcctcggcccacccaagtcgccgccgcaggcactggctgcagacggctccgctccccccacccgccccgggagcccagtagagcgagccataggggtgggggctgaggggcgggccacattcttccctcctcctctcagcacatccggaaagcaggcagtggcgcccaggggggcactactggagagtgggggtccccgttggtggggttagaaagggagaagaatccagaaagtataggggagagaaagcagagaaagtgactgggtcaataaaattaggtgtgtatggggaggaggaggggcccggacaccttaggttgctggttatagcagccggcttcccaagggttaacccctccagacccccgggaaccccctggtgacgtcaagggcggggatgccagggagataatggtggagggggagaggtctctggaccccgccccctagggaaaaccacacttattccgacccttacatatcccccgggaaaccgcccgccttctccctctactggaacgtaaagacctatcctagaagaccccagctctccagacccctaaaaccctcagtccccaggctctacggggtcccctttccgtaatcctgtcccgaaagctagctgcccagtgctgattgtttcggggtcatgggacctgaaa

SEQ ID NO: 491 - DNA, 3736 bp, Homo sapiens
agctggaagcaacagatggggactgcagaggaggtggtggtattgggatagtgctgcagccaagaacttaacgactgaaagtaactgggatatcttcataattatctgaaggtcacagtgggagaacaaaattaaaagaactgagaagacttacaagagaacctcctaagagtcacccaaacaatcggctgagaatgagaagaggttcaagtgattcttgtgcctcaggctcccaagtagctgggactacagtagctgggccagcacacccagaaagcctcacattgtgcagtggagaagctgagagaagaggaaaagaggagtggccagactcccaccactacccaggaccaactcctgctcctgaatcttctgatgggccccacaaggtgacagtgctggctacaatgctatccagccggtggtggccaagttcctgggggatcctagggctgggcccccgaagccctcctcggggatcccagctctgtgccctctatgcctttacttatactggggcagatggccagcaggtgtctctggctgaaggggataggttcctactgcttcgaaagaccaactccgactggtggttggcaagacgcctagaagctccctccacctctcgacccatcttcgtcccagcagcctatatgatagaggaatccatcccttcccagagtccaactaccgtcatccccggccaattgctctggactcctgggccgaagttgtttcatggttccctggaggagttgtctcaggccctcccaagcagggctcaggctagctcggagcagcctcctccacttccccgcaaaatgtgtaggagcgtcagcactgacaatctgagccccagccttctgaagcctttccaggaaggaccaagcggaagatccctctcccaggaagacttgccgtcagaagccagtgccagcacagcaggcccccagcccctcatgtcagagccccctgtgtactgtaacctggtggaccttcgccgctgtcctcggtccccacccccaggccctgcatgccccctgctgcagaggctggatgcctgggagcagcacctggaccccaactctggacgctgcttctacataaattcactgactggctgcaagtcctggaagcccccgcgccgcagtcgcagcgagacgaaccctggctccatggaggggacacagaccctgaagaggaacaatgatgtcctgcaacctcaggcaaagggcttcagatctgacacagggaccccagaaccgcttgacccacagggttcactcagcctcagccaacgcacctcgcagcttgaccctccagccttgcaggcccctcgacctctgccgcagctcctggacgacccccatgaggtggaaaagtcgggtctgctcaacatgaccaagattgcccaaggggggcgcaagctcaggaagaactggggcccgtcttgggtggtgttaacgggtaacagcctggtgttctaccgagagccaccgccgacagcgccctcctcaggctggggaccagcgggtagccggcccgaaagtagcgtggacctgcgcggggcggccctggcgcacggccgccacctgtccagccgccgcaacgtcctgcacatccgcacgatccctggccacgagttcctgctgcagtcggaccacgagacagagctgcgagcctggcaccgcgcgctgcggactgtcatcgagcggctggttagatgggtggaggcccggagggaggctccgaccggccgggaccaagggagtggggatcgggagaaccccctggagctgcgtctgtcgggctctggacccgcggagctgagcgccggggaggacgaagaagaggagtcggagctggtgtccaagccgctgctgcgcctcagcagccgccggagctccattcgggggcccgaaggcaccgagcagaaccgcgtgcgcaacaaactaaagcggctcatcgcgaagagaccgcccttacaaagcctgcaggagcggggtctgctccgagaccaggtgttcggctgccagttggaatcactctgccagcgggaaggagacacggtgcccagctttttgcggctctgcattgctgctgtggataaaagaggtctagatgtggatggcatttatcgggtgagcgggaacttggcagtggtccagaagcttcgctttctggtggacagagagcgtgcggtcacctccgatgggaggtatgtgttcccagaacagccaggacaagaaggtcggttagatttggacagtactgagtgggatgacattcatgtggtcaccggagccctgaagctttttctccgggagctgccccagcctctggtgccaccactgctgctgccccatttccgtgctgcccttgcactctccgaatcagagcagtgcctctctcagatacaagaattaataggctcaatgccaaagcccaaccatgacactctacggtacctcctggagcatttatgcagggtgatagcacactcagataagaatcgcatgacaccccacaacctgggaattgtgtttggaccaaccctgtttcggccagagcaggagacatctgacccagcagcccatgctctctacccagggcagctggtccagctgatgctcaccaacttcaccagcctcttcccctgatgcagggaaggaagaagagaaaacatatttccggtcatctctggtggtgagaggctggtgttctgttttgaggatatccctttaaatctcccaaatgactgtctctatcttcatgagtgtgacttgaggtgttgggatgggtgagggagcttctctaaagaggaaagtgagtggattaacccctgcttctcttcttgttccctgttatcattcctccccaacataataatacataaagtggcatggtattttttctgatgcagttcctttattatcaggaaacagtgtcattatcaaatttctcctcaaaacgtatacagactatacatagcccccagcccatacctcccatccctggggcatcttgtgcaggggactgcagctcccccaatttttctggaaggatagaaaccccttaggaaatgcgatctgtgatggatgagattccctactctttaggcactagagttgaggaattctgtttccccaggtagggatctcagtaagacactcatgttgcccacagccatgttggggggcccagagggaggtggggtatgtccagagctgccccgctgatcatgggaaggaggaggactcagcccctggggctcatccagaatagccacaaagtccagctgagtgttgtcaagatcaagagagtccagggggttacatacctgtccttcgggaggagggtacaaggcaggaccccctcctagcctgcccacctcaggatgaccacagctggggtttgtgcctcccactttgagaggcccatagcaagtgggcaatgggggcagaagtcgaggtggtgctgctgccctatgtgaagccctatttgcccccactacaaaattttcatggcatggtgaaggggtgggataggaacctgacttgtgattgggcaagttgggtccaaagccaggtccatatgtgttcactggagctttagcacggcttgggctaacctgggaaccccccagaaacttgggactctggtaggaaggttcctgggcgggggcatcttccctgcccccaccctcccacagtagctcctgttgagattgaacata

SEQ ID NO: 492 - protein, 815 aa, Homo sapiens
MRRGSSDSCASGSQVAGTTVAGPAHPESLTLCSGEAERRGKEEWPDSHHYPGPTPAPESSDGPHKVTVLATMLSSRWWPSSWGILGLGPRSPPRGSQLCALYAFTYTGADGQQVSLAEGDRFLLLRKTNSDWWLARRLEAPSTSRPIFVPAAYMIEESIPSQSPTTVIPGQLLWTPGPKLFHGSLEELSQALPSRAQASSEQPPPLPRKMCRSVSTDNLSPSLLKPFQEGPSGRSLSQEDLPSEASASTAGPQPLMSEPPVYCNLVDLRRCPRSPPPGPACPLLQRLDAWEQHLDPNSGRCFYINSLTGCKSWKPPRRSRSETNPGSMEGTQTLKRNNDVLQPQAKGFRSDTGTPEPLDPQGSLSLSQRTSQLDPPALQAPRPLPQLLDDFVEKSGLLNMTKIAQGGRKLRKNWGPSWVVLTGNSLVFYREPPPTAPSSGWGPAGSRPESSVDLRGAAHGRHLSSRRNVLHIRTIPGHEFLLQSDHETELRAWHRALRTVIERLVRWVEARREAPTGRDQGSGDRENPLELRLSGSGPAELSAGEDEEEESELVSKPLLRLSSRRSSIRGPEGTEQNRVRNKLKRLIAKRPPLQSLQERGLLRDQVFGCQLESLCQREGDTVPSFLRLCIAAVDKRGLDVDGIYRVSGNLAVVQKLRFLVDRERAVTSDGRYVFPEQPGQEGRLDLDSTEWDDIHVVTGALKLFLRELPQPLVPPLLLPHFRAALSESEQCLSQIQELIGSMPKPNHDTLRYLLEHLCRVIAHSDKNRMTPHNLGIVFGPTLFRPEQETSDPAAHALYPGQLVQLMLTNFTSLFP

SEQ ID NO: 493 - DNA, 3348 bp, Homo sapiens
agctggaagcaacagatggggactgcagaggaggtggtggtattgggatagtgctgcagccaagaacttaacgactgaaagtaactgggatatcttcataattatctgaaggtcacagtgggagaacaaaattaaaagaactgagaagacttacaagagaacctcctaagagtcacccaaacaatcggctgagaatgagaagaggttcaagtgattcttgtgcctcaggctcccaagtagctgggactacagtagctgggccagcacacccagaaagcctcacattgtgcagtggagaagctgagagaagaggaaaagaggagtggccagactcccaccactacccaggaccaactcctgctcctgaatcttctgatgggccccacaaggtgacagtgctggctacaatgctatccagccggtggtggccaagttcctgggggatcctagggctgggcccccgaagccctcctcggggatcccagctctgtgccctctatgcctttacttatactggggcagatggccagcaggtgtctctggctgaaggggataggttcctactgcttcgaaagaccaactccgactggtggttggcaagacgcctagaagctccctccacctctcgacccatcttcgtcccagcagcctatatgatagaggaatccatcccttcccagagtccaactaccgtcatccccggccaattgctctggactcctgggccgaagttgtttcatggttccctggaggagttgtctcaggccctcccaagcagggctcaggctagctcggagcagcctcctccacttccccgcaaaatgtgtaggagcgtcagcactgacaatctgagccccagccttctgaagcctttccaggaaggaccaagcggaagatccctctcccaggaagacttgccgtcagaagccagtgccagcacagcaggcccccagcccctcatgtcagagccccctgtgtactgtaacctggtggaccttcgccgctgtcctcggtccccacccccaggccctgcatgccccctgctgcagaggctggatgcctgggagcagcacctggaccccaactctggacgctgcttctacataaattcactgactggctgcaagtcctggaagcccccgcgccgcagtcgcagcgagacgaaccctggctccatggaggggacacagaccctgaagaggaacaatgatgtcctgcaacctcaggcaaagggcttcagatctgacacagggaccccagaaccgcttgacccacagggttcactcagcctcagccaacgcacctcgcagcttgaccctccagccttgcaggcccctcgacctctgccgcagctcctggacgacccccatgaggtggaaaagtcgggtctgctcaacatgaccaagattgcccaaggggggcgcaagctcaggaagaactggggcccgtcttgggtggtgttaacgggtaacagcctggtgttctaccgagagccaccgccgacagcgccctcctcaggctggggaccagcgggtagccggcccgaaagtagcgtggacctgcgcggggcggccctggcgcacggccgccacctgtccagccgccgcaacgtcctgcacatccgcacgatccctggccacgagttcctgctgcagtcggaccacgagacagagctgcgagcctggcaccgcgcgctgcggactgtcatcgagcggctggttagatgggtggaggcccggagggaggctccgaccggccgggaccaagggagtggggatcgggagaaccccctggagctgcgtctgtcgggctctggacccgcggagctgagcgccggggaggacgaagaagaggagtcggagctggtgtccaagccgctgctgcgcctcagcagccgccggagctccattcgggggcccgaaggcaccgagcagaaccgcgtgcgcaacaaactaaagcggctcatcgcgaagagaccgcccttacaaagcctgcaggagcggggtctgctccgagaccaggtgttcggctgccagttggaatcactctgccagcgggaaggagacacggtgcccagctttttgcggctctgcattgctgctgtggataaaagaggtctagatgtggatggcatttatcgggtgagcgggaacttggcagtggtccagaagcttcgctttctggtggacagagagcgtgcggtcacctccgatgggaggtatgtgttcccagaacagccaggacaagaaggtcggttagatttggacagtactgagtgggatgacattcatgtggtcaccggagccctgaagctttttctccgggagctgccccagcctctggtgccaccactgctgctgccccatttccgtgctgcccttgcactctccgaatcagagcagtgcctctctcagatacaagaattaataggctcaatgccaaagcccaaccatgacactctacggtacctcctggagcatttatgcagggtgatagcacactcagataagaatcgcatgacaccccacaacctgggaattgtgtttggaccaaccctgtttcggccagagcaggagacatctgacccagcagcccatgctctctacccagggcagctggtccagctgatgctcaccaacttcaccagcctcttcccctgatgcagggaaggaagaagagaaaacatatttccggtcatctctggtggtgagaggctggtgttctgttttgaggatatccctttaaatctcccaaatgactgtctctatcttcatgagtgtgacttgaggtgttgggatgggtgagggagcttctctaaagaggaaagtgagtggattaacccctgcttctcttcttgttccctgttatcattcctccccaacataataatacataaagtggcatggtattttttctgatgcagttcctttattatcaggaaacagtgtcattatcaaatttctcctcaaaacgtatacagactatacatagcccccagcccatacctcccatccctggggcatcttgtgcaggggactgcagctcccccaatttttctggaaggatagaaaccccttaggaaatgcgatctgtgatggatgagattccctactctttaggcactagagttgaggaattctgtttccccaggtagggatctcagtaagacactcatgttgcccacagccatgtgggcattgaggcagggtgccagtcctgtggagtcagaccccactgggcacccctgttctggcttgacttgcacttgtccataatgttcaagtcgaggacactggctgtaggttccacctagagccttggggcctgggtacagcccagagtgggaag

SEQ ID NO: 494 - protein, 815 aa, Homo sapiens; identical to SEQ ID NO: 492

SEQ ID NO: 495 - DNA, 3291 bp, Homo sapiens
agctggaagcaacagatggggactgcagaggaggtggtggtattgggatagtgctgcagccaagaacttaacgactgaaagtaactgggatatcttcataattatctgaaggtcacagtgggagaacaaaattaaaagaactgagaagacttacaagagaacctcctaagagtcacccaaacaatcggctgagaatgagaagaggttcaagtgattcttgtgcctcaggctcccaagtagctgggactacagtagctgggccagcacacccagaaagcctcacattgtgcagtggagaagctgagagaagaggaaaagaggagtggccagactcccaccactacccaggaccaactcctgctcctgaatcttctgatgggccccacaaggtgacagtgctggctacaatgctatccagccggtggtggccaagttcctgggggatcctagggctgggcccccgaagccctcctcggggatcccagctctgtgccctctatgcctttacttatactggggcagatggccagcaggtgtctctggctgaaggggataggttcctactgcttcgaaagaccaactccgactggtggttggcaagacgcctagaagctccctccacctctcgacccatcttcgtcccagcagcctatatgatagaggaatccatcccttcccagagtccaactaccgtcatccccggccaattgctctggactcctgggccgaagttgtttcatggttccctggaggagttgtctcaggccctcccaagcagggctcaggctagctcggagcagcctcctccacttccccgcaaaatgtgtaggagcgtcagcactgacaatctgagccccagccttctgaagcctttccaggaaggaccaagcggaagatccctctcccaggaagacttgccgtcagaagccagtgccagcacagcaggcccccagcccctcatgtcagagccccctgtgtactgtaacctggtggaccttcgccgctgtcctcggtccccacccccaggccctgcatgccccctgctgcagaggctggatgcctgggagcagcacctggaccccaactctggacgctgcttctacataaattcactgactggctgcaagtcctggaagcccccgcgccgcagtcgcagcgagacgaaccctggctccatggaggggacacagaccctgaagaggaacaatgatgtcctgcaacctcaggcaaagggcttcagatctgacacagggaccccagaaccgcttgacccacagggttcactcagcctcagccaacgcacctcgcagcttgaccctccagccttgcaggcccctcgacctctgccgcagctcctggacgacccccatgaggtggaaaagtcgggtctgctcaacatgaccaagattgcccaaggggggcgcaagctcaggaagaactggggcccgtcttgggtggtgttaacgggtaacagcctggtgttctaccgagagccaccgccgacagcgccctcctcaggctggggaccagcgggtagccggcccgaaagtagcgtggacctgcgcggggcggccctggcgcacggccgccacctgtccagccgccgcaacgtcctgcacatccgcacgatccctggccacgagttcctgctgcagtcggaccacgagacagagctgcgagcctggcaccgcgcgctgcggactgtcatcgagcggctggatcgggagaaccccctggagctgcgtctgtcgggctctggacccgcggagctgagcgccggggaggacgaagaagaggagtcggagctggtgtccaagccgctgctgcgcctcagcagccgccggagctccattcgggggcccgaaggcaccgagcagaaccgcgtgcgcaacaaactaaagcggctcatcgcgaagagaccgcccttacaaagcctgcaggagcggggtctgctccgagaccaggtgttcggctgccagttggaatcactctgccagcgggaaggagacacggtgcccagctttttgcggctctgcattgctgctgtggataaaagaggtctagatgtggatggcatttatcgggtgagcgggaacttggcagtggtccagaagcttcgctttctggtggacagagagcgtgcggtcacctccgatgggaggtatgtgttcccagaacagccaggacaagaaggtcggttagatttggacagtactgagtgggatgacattcatgtggtcaccggagccctgaagctttttctccgggagctgccccagcctctggtgccaccactgctgctgccccatttccgtgctgcccttgcactctccgaatcagagcagtgcctctctcagatacaagaattaataggctcaatgccaaagcccaaccatgacactctacggtacctcctggagcatttatgcagggtgatagcacactcagataagaatcgcatgacaccccacaacctgggaattgtgtttggaccaaccctgtttcggccagagcaggagacatctgacccagcagcccatgctctctacccagggcagctggtccagctgatgctcaccaacttcaccagcctcttcccctgatgcagggaaggaagaagagaaaacatatttccggtcatctctggtggtgagaggctggtgttctgttttgaggatatccctttaaatctcccaaatgactgtctctatcttcatgagtgtgacttgaggtgttgggatgggtgagggagcttctctaaagaggaaagtgagtggattaacccctgcttctcttcttgttccctgttatcattcctccccaacataataatacataaagtggcatggtattttttctgatgcagttcctttattatcaggaaacagtgtcattatcaaatttctcctcaaaacgtatacagactatacatagcccccagcccatacctcccatccctggggcatcttgtgcaggggactgcagctcccccaatttttctggaaggatagaaaccccttaggaaatgcgatctgtgatggatgagattccctactctttaggcactagagttgaggaattctgtttccccaggtagggatctcagtaagacactcatgttgcccacagccatgtgggcattgaggcagggtgccagtcctgtggagtcagaccccactgggcacccctgttctggcttgacttgcacttgtccataatgttcaagtcgaggacactggctgtaggttccacctagagccttggggcctgggtacagcccagagtgggaag

SEQ ID NO: 496 - protein, 796 aa, Homo sapiens
MRRGSSDSCASGSQVAGTTVAGPAHPESLTLCSGEAERRGKEEWPDSHHYPGPTPAPESSDGPHKVTVLATMLSSRWWPSSWGILGLGPRSPPRGSQLCALYAFTYTGADGQQVSLAEGDRFLLLRKTNSDWWLARRLEAPSTSRPIFVPAAYMIEESIPSQSPTTVIPGQLLWTPGPKLFHGSLEELSQALPSRAQASSEQPPPLPRKMCRSVSTDNLSPSLLKPFQEGPSGRSLSQEDLPSEASASTAGPQPLMSEPPVYCNLVDLRRCPRSPPPGPACPLLQRLDAWEQHLDPNSGRCFYINSLTGCKSWKPPRRSRSETNPGSMEGTQTLKRNNDVLQPQAKGFRSDTGTPEPLDPQGSLSLSQRTSQLDPPALQAPRPLPQLLDDFVEKSGLLNMTKIAQGGRKLRKNWGPSWVVLTGNSLVFYREPPPTAPSSGWGPAGSRPESSVDLRGAAHGRHLSSRRNVLHIRTIPGHEFLLQSDHETELRAWHRALRTVIERLDRENPLELRLSGSGPAELSAGEDEEEESELVSKPLLRLSSRRSSIRGPEGTEQNRVRNKLKRLIAKRPPLQSLQERGLLRDQVFGCQLESLCQREGDTVPSFLRLCIAAVDKRGLDVDGIYRVSGNLAVVQKLRFLVDRERAVTSDGRYVFPEQPGQEGRLDLDSTEWDDIHVVTGALKLFLRELPQPLVPPLLLPHFRAALSESEQCLSQIQELIGSMPKPNHDTLRYLLEHLCRVIAHSDKNRMTPHNLGIVFGPTLFRPEQETSDPAAHALYPGQLVQLMLTNFTSLFP

SEQ ID NO: 497 - DNA, 3676 bp, Homo sapiens
agctggaagcaacagatggggactgcagaggaggtggtggtattgggatagtgctgcagccaagaacttaacgactgaaagtaactgggatatcttcataattatctgaaggtcacagtgggagaacaaaattaaaagaactgagaagacttacaagagaacctcctaagagtcacccaaacaatcggctgagaatgagaagaggttcaagtgattcttgtgcctcaggctcccaagtagctgggactacagtagctgggccagcacacccagaaagcctcacattgtgcagtggagaagctgagagaagaggaaaagaggagtggccagactcccaccactacccaggaccaactcctgctcctgaatcttctgatgggccccacaaggtgacagtgctggctacaatgctatccagccggtggtggccaagttcctgggggatcctagggctgggcccccgaagccctcctcggggatcccagctctgtgccctctatgcctttacttatactggggcagatggccagcaggtgtctctggctgaaggggataggttcctactgcttcgaaagaccaactccgactggtggttggcaagacgcctagaagctccctccacctctcgacccatcttcgtcccagcagcctatatgatagaggaatccatcccttcccagagtccaactaccgtcatccccggccaattgctctggactcctgggccgaagttgtttcatggttccctggaggagttgtctcaggccctcccaagcagggctcaggctagctcggagcagcctcctccacttccccgcaaaatgtgtaggagcgtcagcactgacaatctgagccccagccttctgaagcctttccaggaaggaccaagcggaagatccctctcccaggaagacttgccgtcagaagccagtgccagcacagcaggcccccagcccctcatgtcagagccccctgtgtactgtaacctggtggaccttcgccgctgtcctcggtccccacccccaggccctgcatgccccctgctgcagaggctggatgcctgggagcagcacctggaccccaactctggacgctgcttctacataaattcactgactggctgcaagtcctggaagcccccgcgccgcagtcgcagcgagacgaaccctggctccatggaggggacacagaccctgaagaggaacaatgatgtcctgcaacctcaggcaaagggcttcagatctgacacagggaccccagaaccgcttgacccacagggttcactcagcctcagccaacgcacctcgcagcttgaccctccagccttgcaggcccctcgacctctgccgcagctcctggacgacccccatgtgaacctcccatttctttgtgaaggccaagatcctccctgccccccctccccccttttcctgctccacataaacatcttcctctttctgaatatcctcctacccagccctcccccagcaactttaagggacttcactcctgggagaccccctagggaaagccgtggccactatggagggcgagggtgacttacagatcccattccctccacttcccaggaggtggaaaagtcgggtctgctcaacatgaccaagattgcccaaggggggcgcaagctcaggaagaactggggcccgtcttgggtggtgttaacgggtaacagcctggtgttctaccgagagccaccgccgacagcgccctcctcaggctggggaccagcgggtagccggcccgaaagtagcgtggacctgcgcggggcggccctggcgcacggccgccacctgtccagccgccgcaacgtcctgcacatccgcacgatccctggccacgagttcctgctgcagtcggaccacgagacagagctgcgagcctggcaccgcgcgctgcggactgtcatcgagcggctggttagatgggtggaggcccggagggaggctccgaccggccgggaccaagggagtggggtaggaacgataggagtcaggagcagttgggggcagggtgggctcagtggagagccctggcctgggccgggatgtgggaccctggcagtgggtcagagtccagctagggatgcagatttctctcctctctcaccttcgacacggcccgccccgggtctaggatcgggagaaccccctggagctgcgtctgtcgggctctggacccgcggagctgagcgccggggaggacgaagaagaggagtcggagctggtgtccaagccgctgctgcgcctcagcagccgccggagctccagtgaggcgcgggctggggagggagggtccgggagcgcagcgaggctcccgggcgctcacgccccgctctacctgcctcctgcagttcgggggcccgaaggcaccgagcagaaccgcgtgcgcaacaaactaaagcggctcatcgcgaagagaccgcccttacaaagcctgcaggagcggggtctgctccgagaccaggtgttcggctgccagttggaatcactctgccagcgggaaggagacacggtgcccagctttttgcggctctgcattgctgctgtggataaaagaggtctagatgtggatggcatttatcgggtgagcgggaacttggcagtggtccagaagcttcgctttctggtggacagagagcgtgcggtcacctccgatgggaggtatgtgttcccagaacagccaggacaagcactctccgaatcagagcagtgcctctctcagatacaagaattaataggctcaatgccaaagcccaaccatgacactctacggtacctcctggagcatttatgcagggtgatagcacactcagataagaatcgcatgacaccccacaacctgggaattgtgtttggaccaaccctgtttcggccagagcaggagacatctgacccagcagcccatgctctctacccagggcagctggtccagctgatgctcaccaacttcaccagcctcttcccctgatgcagggaaggaagaagagaaaacatatttccggtcatctctggtggtgagaggctggtgttctgttttgaggatatccctttaaatctcccaaatgactgtctctatcttcatgagtgtgacttgaggtgttgggatgggtgagggagcttctctaaagaggaaagtgagtggattaacccctgcttctcttcttgttccctgttatcattcctccccaacataataatacataaagtggcatggtattttttctgatgcagttcctttattatcaggaaacagtgtcattatcaaatttctcctcaaaacgtatacagactatacatagcccccagcccatacctcccatccctggggcatcttgtgcaggggactgcagctcccccaatttttctggaaggatagaaaccccttaggaaatgcgatctgtgatggatgagattccctactctttaggcactagagttgaggaattctgtttccccaggtagggatctcagtaagacactcatgttgcccacagccatgtgggcattgaggcagggtgccagtcctgtggagtcagaccccactgggcacccctgttctggcttgacttgcacttgtccataatgttcaagtcgaggacactggctgtaggttccacctagagccttggggcctgggtacagcccagagtgggaag

SEQ ID NO: 498 - protein, 454 aa, Homo sapiens
MRRGSSDSCASGSQVAGTTVAGPAHPESLTLCSGEAERRGKEEWPDSHHYPGPTPAPESSDGPHKVTVLATMLSSRWWPSSWGILGLGPRSPPRGSQLCALYAFTYTGADGQQVSLAEGDRFLLLRKTNSDWWLARRLEAPSTSRPIFVPAAYMIEESIPSQSPTTVIPGQLLWTPGPKLFHGSLEELSQALPSRAQASSEQPPPLPRKMCRSVSTDNLSPSLLKPFQEGPSGRSLSQEDLPSEASASTAGPQPLMSEPPVYCNLVDLRRCPRSPPPGPACPLLQRLDAWEQHLDPNSGRCFYINSLTGCKSWKPPRRSRSETNPGSMEGTQTLKRNNDVLQPQAKGFRSDTGTPEPLDPQGSLSLSQRTSQLDPPALQAPRPLPQLLDDPHVNLPFLCEGQDPPCPPSPLFLLHINIFLFLNILLPSPPPATLRDFTPGRPPRESRGHYGGRG

SEQ ID NO: 499 - DNA, 70704 bp, Mus musculus
  misc_feature (1)...(70704): n = A, C, G or T/U
ttctctgacctgctgtggtagtgtcagctcctgtgaaggaagtttccgctttgcaccccacccggatcacagttcggttgtagggcccgctctctccggctccacatcagcgcatctggatcatggggttacccaaggggccagagggccagggactcccggaggtgaggacctctgtccctgacaccctggggttgctggggagagagggccgagcccagggcggcgggcagggaccagcctggggtggcggggacactgtctatggttgctcaggtgtgtctgtcccaaggcgggccctaggtaccctggaggggcagctgactggtcccccggcgtgccagggtgcatcgtgtcgctgggtgcaaacttaagggttcctgggtcctctggggacagaggaaacatccagatcccggcccagatgcaacctcacacatcacgaggtccccgggaattcctatctcgggttgtctggaggcccctcacattgcgagactggcttcccccgggccaaggctgctgcgcttaggagtctcagcagtcacgagatgagcggtgggactgtcctgctcccggtgtgcagcgggcggtgaccttgggacacacaccttctgcgggacccatgtggccagcctttcattcccttttgtcaggaaggcacgctacctacccggcttgtagcctcctgcccctccccccgtcccacgggccggggagggtgaaggaagtttggaagctctgcgcacatcagggtgatgacagagttgaggacactctctcctgtggtgcctgtgtcgggacaggaacatgctgcgtgttctaaggagggaggaccttttcagaaatggtttagtcgagtactcagccagtactcattcgatcctatgaacaggactaccacgtaggctgggaagaaaagtgcaaccactctctaacggtgggctaccgttagagcttggctgtgggatttccagttgtcctcctagttgctttactcaaagctctgagcttagagaagagtcccagtttccagagagaattagggaacacctctaaggcacctggatctctttctaaggctggaaggcaggctttggcagaggtgtggtgtgcctatttgacactgtgcctagtgcccgttcttattcagctgcgccgatcttgcttccccgtgcccctcacaaatccttctgttacatcttcatcctactcattacagagtcgaagtgttctgtgtccaggtgatgaagggtgggtatgtgtggccctgggttaggtaaagtttcatggggtctgggttgtaatagttcagattttctttgccatgtaaaaatctctgtctgtctgtctctctctctctgtctgtctctctctgtatgatgaagtgcatatgtgagcatgtgtggaggtcagaatagagcctcccatgtcaccctcatgaatgctgaaaacctcctttgagacaagtactcattggcctggcacttcccaataggctagattggttggccagtgagacccagggatctttctgtccctgggattacaagtgcacagtaccatggctggtgtgtttatatgggtcctggagattgaactctgatcctcatgtcgtgaggcaagcgctgggctattgttgcagctttaaggcttttcttggccgtctgctatggagtcctgtgtagggcttccagttctaccctagttccttcaaactagtggaagtttttctaaaagtaataaacacaccactttcatgagtaggtgtgactcctcatagatagccaggaggctgggtctgatttgttactcttttctagcttgttctacatcgtgagttctggagcagctgtgggtagggagatgagaggggtgggcatacatagtgagatcctgtctcaaaaaagaaaaagcaaaacacagaaagaccaaaatgactgttatagtgtgcacacagatatagacttaaaaaaaagatataaaggctaaaagctagcatgagtataaagttgaaaagctccaaataccgagggtttagggcagagtgcttacatatgtgcctgagctctgggttctgtccccagcacagtgaacagtgagggtggggtgcctgtaatctcagcactggggaggcaagagaactaggaatgcaaggtcactgtccacatagaggaatggagaaggccaaccctgggccacaggagaccctttcttaaaagacaaaacaaaattgctgtcacctggctctcactaatccagttaactcctgctggtcaggttttgaatccctttgtgtgtatatgaaagaaagcaatagctagacccttccagcttctgagagctacagtgcagggcagatgggagcttctctggccttgtttaagagctctctgcgatccatctctatcagtctctggttatgaatttatttccctttacttacgtatatgtccatgtgtctgtatgtgcgagtgaatctgagtacctgtgaagtcctgacgagcgtggcagataccagagatgagtaaaggtggtggtgagatgcttagtgtgggcttggggaactgaacctgggtcccctagaagaacggtatgtgccctgaaccactaaaccgtcgtctctggcctccagtgtcctacgttagtaactggaggtattatccagtgtgctggggttttatggtttcaagaaggatggttttttgttctctgcatatcagcacatgaccactttccattctgtgtaagcgcgttaatgtgtaaagtgaatttggaatcaaacatccccattcagtgtcttaggccaaaaacttatttcattggttctatttcaaaaatacagttgtacatcctgaaatgacaggcagccggtggggatgctatatgcaatgaattgaggtgggagattgtccttctgggctatagtgtccccttcttggcagtatctttatgacacatgatggctgaatactcgaaggaattctgtcttatttacctgtgtgtgtgtgtttgcatgtgtggtgtctagacatgcctgtatgcgtgtgtatatggatgttcatatgtgtgtatagatggtcacacgtgtttgaatacacatgtatgtgagtgcatattgacacctgaggttggcatcagttgtcttactctgccatttttctaccttattcattgaggcaaggcctttcaattgaacctagagtttactagctgggctagtctagctataaatagctagcctgtggtctttgctttccaagtgctgggctcacaggtgggccaccatgcctgcccaggatttgcatgggttctggggaatctgaactcttgtcctcatgctaatatgaacatccgactcttggcagcggaaggatttacttcatttccgttcagtggagatggcctttaccagttacgtgcatcccttttgttctaggtggagacgagagaagacgaagaacagaatgtcaagctgactgaaatcctggagctcttggtcgcagctggctatttcagagcaagaattaaaggcttgtctcctttcgacaaggtaagagaaagcctcgatagccactgtgccgtctctctgcaggactgcgcggttactcaaggtagcggaggataaactgattgtgtttttacttcctctgtacccgtggtccagattcctcggggatgtactcggatttcctgttcaaagtcagtagatgcaattgggttccattactgtgcacactattttagggactgtaaacaagcaagagagtattttctcaggccgggagactcctcagtcagtaaagtgcttgctgggaaagcatggggacctgacttggatccccagaacccatgcaaaaaaaaaaaaaggaaaggagagagggagggagggagggagggagggagggagggagggaggaaggaaggaaggaaggaaggaaggaaggaaggaaggaaggaaggaaggaaggcaggcaggcaggcaggcaggcaggcaggccagacctgtggcatgcttgtgatttcagtactgggcaagtggagacaggcagatccctggggctccccggccagcctagccaaattgatgagttctaggacagtgagaccatgtgtctcaactagatagatggatggatgactcctgaggaatgacacccagtgcggacctgtggcctctacatgtatgcatgtgtgtgcacaaacatacgcacacaggaacactcacacatgtacacacacgaacaaaaaatcatttctcttttaaggaacatatacttcgggaaggagttataaagtctgtggaggaagtaatctgagttcatagctatcctgaaccgcatgcttagacaatggcagatatcctgtagctggcaatgcttgtttagaggggcgagcttcaccatgggatggagtattttatgtctttttaacttttgttttacagatttattttagttttagttaagtgtatatgtgtgttggtgtgtacaggtgggcattggatctcctggagctggagttagagtggggaccgaactcaagttctctacaggagcagcagacacttttaaccgccaagccatcccttcagccctggggtggtggtgtttaatttagcagagctgtgaacagttaccatgcacaggacctagtgttaggtgttgagggcacagagataaaccatagcccttcactcaaagagctccaccgtcgtagagaagagtgacaagccaaccagcagtcagggcctaaattatatggtccccagtctcctcaggcacctgggaccaatggtaaggcaggccagggaggctttggaataatgctgcaggccccagggatcgctctcctccttctttgtcgcggaatccgcaagggatgttttataagaagcacgtccagacctcctccatcgagcttctgcgtaggtgggtctgggctagcgacctggaaatgtgtattttatcgtatatctcagccattaaataaggaccagaaaatgtctgccttgctgcccacatgcctggttggtaaaagacatcctctctctccatctggcatgtgtcagaacctgggctagaaatctctcagctggggctggagagatggctcagctatctgctcttccagaagtcctgacttgagtccccagcaaccacatggtagctcgaaatagttataatgggatctgatgctctcttctggaccgtaggtgtacatgtagatagaacactcacatactttagatatatttaaaaaacaaaaagaaagaaaagaaagagacagagacagataaagaaatctctcagctgatgactcagtaggctgtgcatgcattaagatctgagcttaatctccatataaaaagccagctatggtagtgggcaggggtaatcccagtactgaggtgatgaggatccctggtgcgctccagagtcagtgagagaccctatctcaaaaaccaaggcaaagaacaatacaggacaccattgtgtctctctggcctccacatgccaatcaacaggcgaacacaaacgcatactcactcacacatgagcacatcacataaaagaaatccaagcgcgtactatctgacccttgcctaggaagaagagcaatgagtgctaagactgtctctgtaggtattggtggattgcgcaggacagttgatcaaagaaatgagagccactgcaggatgagttcaggcttctcaccagcaaggggggaacctctgtgggactgaaccccaacagtctcctggaagctctttttattgttacacaaaaggcacctttagcatagcaatttcgcataccaaaatatttcatctgacctatgggctatcgtgaaggacccatcatcaaagcaactctcagccatgagagacttcctggtttgccaggcctgtctccagagtaagatgtgcaaaggctcttgagataccttcaaggaaacaatcccatcaaatctcagataacaatcactaacaaaagactacttcaaagcctaggcaccatcactccagatacctgccagatacaacagttctgctaaaacagtcagctcctccgtcacactggaagtactttgagtgctcaggaatcagccagggccagtagcttctgtagcagacagtatagggatgggcactgccacgatgggcactgccaccactgcagaaggatttatgacggtgccagctgatgagtggtgggtagggaagacagactctctctagagacacattgtatgggagagctgcagagagagctgtcagtaaagttacactgtatgacgacttaagctcagtccccagaatccatgtaaagatctgggtgttgtggtgagcacttgtcacctcggcactggggacatggagacaggaaaatccatgggcctctccggccagccagccaaatcagatcagcaagcgagagaccagtgagagaccctgcctcaacaaacaaggtgtacagcatgagggtcaataccagatttgatatcttgcctctacatgcatgcacacacacacacacacacacacacacacacacacacatgaacacatgtgcatacacaccagatatttatggttttctgagctttttgagtctgtatgggttgcttaggaaaggagtttcctcccctggcctctgttcccctccttgaggggctcatgagcagtctcctctcttacaggtagtaggaggaatgacgtggtgtatcaccacatgcagctttgatgtggacgtggatttgctctttcaagaaaactctacaatcggtcagaaaatgtaagttactggggcttgccatagatgggccaaatgatggggaggagggctttatagcaaagatggttcttatgtgtttatatacagattcctttgtatttttcctgctttgaagctgtattgtgtgtgtgtgtgtgtgtgtgtgtgtgtgtctgtgtgtgtgtctgtgtgtgtgtgtgtctgtgtgtgtgtctgtgtaggccaggggatgaccttagctcttgttcctcaagcactgtccactctttgaaaagacatctcttactggcctggaacttgccatatatatgctaggttgacaggccactgtgccccagggcactgccagggtactggattgtctccacctctccagtgttgggattatagtggtgtggcactatgcctgacttcccctacctttcattgaatgtggagtgtgtgtgtgtgtgtgtgtgtgtgtgtgtgtgtgtgtgttaggattacaacttaggtccttgggcttgcaagacattctttttactcactgagccatctccccagcccaagcttctgtcttttaacccattagcatcgtgtagtctctcctgatttctaagtatttagagtcgactttttaatgtctttatttggccttatacccccaactaccatcctaacattgccttcaaaatggtaagggcataatatttatgataatagttaagtagattcttaaatgtatagtcatttttatagtaactactatataagggacaggatcagaaaaaaaaggaaatacagtcttttcaacctaatgatactttaaaagaatggtgtgtgtatttatgtgtgtgtgagactgtgtgtgtgtatgtgtgtgtgtatgactgtgtgtgtgactgtgtgtgtgtgtatgactgtgtgtgtgactgtatgtgtgtggtgtgtgtgtgagtgtgtgtgtgtgtgtatgcgtgtctgtgtgtgtgtgtgtgtgttgtgtgtgtagatcaaaagataacttgagggagtccatttctccatcttttaggtcccagggattcttttttttttttttttttggtgtttcgagacagggtttctctgtagccctggctgtcctggaactcactctgtagaccaggctggccttgaactcagaaatcctcctgcctctgcctcccaagtgctgggatcaaaggtgtgtgccaccatgcccggcagcacacttcttaacccaccaagccttcttgccagtgtaaatggtactttttaaaggagaaaattgaaagtatcaggtgaaaagagtcttcattaatcctttcaataaatatttatcaagtctgtgttactactgcagctcagacattattcaggtactttggaaacattaagaaattccctgacttcataaagtttataattatcatggcacagactacagatatcaaataggtgaagtgtggggctgaagacagcttggtaattaaggatacactgctctcgcagaggctcagggttcagccctcagccccgagcttgggcagctcacagctgtctgtgtcttagttacttttctactgctgtgataaaataccatgaacaaaagcagcttggggaggaaagggtttattttatttacatttctccatcacagcccatcttagaaggaagtcagggcaagagcctggaggcaggaactggaggggtgatgcttgctggcttgctctccaaggcttgctcggactgttttcatgtacagcccagagccgccagctctggggcagcacatccacaatgggctttcccctcacccttatctaattaagaaaatggactacgggcttctccatgggtcattctagtggctgtgttttctcagttgatgttccgtcttcccagatggctacagcttgtgtcaagctgacataaaactagccagcacagtccatgactccagctccaggggatccaatgcctgttcttgaccacacatacccataattaaaaattaaaatgtgaatctctgtcctgcctttgaatttttgagacaaggattcttcccccccccccctctctgtatgtgtgcatgcgtggtgtgtgtgtatgtgcgccatagcttgcatgtagagttggacacaggtaaaagttgcttctttcttaccatgcaggtcctggagactgaactcaggttgtcaggtttggccgcaattgcctttatcctcttagccatcttgctgtccccgttgtttctcatgttttaggtctgtctgaacgagagctggtgacttgccagatgtccaagaggtggtcgggctgggatttagatccgggacaaatgaaccatcatggaggaggaaatagtgaatgtaacacgtaaaactttaaaagagtccgctcgatgtgctggtgcacacccgtaatcttggcattcaggaagctgacgcaggaggattacagttttgacactatgcttaactgtatagcaagatcctttctaaaaagaaaatacccttaaagtatcagacagtgttatactaaaatctcaagctcagaggtttgcctggtgatccacatgtgtcccttgtttgattttgtaatgttgctgtggtagacaccatgatcaaaagcagcttaggggagaaaagagtttatttggcttacaggtcccaggctgtgaagaagtcagggcagcatgcggaggaagaatgggagcaggatccatggccgaagcctgctcactcgctctcagattgatgcttggctgactttcttacacactcagggtgacctgggtcgggatgctgctgcccaccatggagtgggtgatcctagagcagttaacaacataacctcccaaccactcacacaggccagcctgatctgggcagttcctcaattgcggctctctgctcaaatgacttcaggctgtgttaggttggccgagcttttaaagaagctctgacttttccgaaacagttctgctgactttttaggaagtctgagttcctgagcagagctgagggtggctggcgaatgtttctaagaagtcttcctgccttctctgccctgcctccctactgtgtgcttccttccctattgctcccgccaccagggttagtgctggcagccactcctgcttgttgctgggactgcctgggcttggctctagtttctgggaggcagttttaagagactcataaaccccaacatgacttgctatatcctcccctctgggcacttatgaattgcttgattaagctgccagtgaggagtggctagggagagccctctggaaaagcaagaaggttggttgtgtattgtcgaggtctcagccgctggatttgaagctcccaaatggaactttttcaagctcgagctctgtggcccactagggggagcactcttcctgctgaagatggcactaaagaccagcgtggtggtgtgctgagcataaagacactcagagccaaccagggcctggaacttgtctcccttggattagtgtggattctgggtaggtggtccgcagcaccacatgaccaggacgtggtggcatgaacctataaaaccagttccaaggtggaggcaggaggatctatctttcttgtctaggagtcaagtttgaggccagcccgagctgcacaggaccttgccttaaaaacaaaacaaaaaccagaaaaacgaaaagaaaaaaaggaaagaaggcaataggtgtaatacatgatgggaagaatcctttgtgaccttacatgcatgtagctgaattgtgcttctcatgttggtctactgggatgaacttggtcaggtctgtcactgtcaccctgaccaggctgggacttcttcacagttctgcctagactttagagctgtctttagaaccactcagtgtgtcctgactctgcttactgttttcttctggacagtgctctatcggaaaagattgtctccgtcctcccaaggatgaagtgtccccaccagctggagccccaccagatccagggcatggattttatccacatattccctgtcgtgcaggtgagggcttctgcgtggattcttgcctcttaactgggagttcctggaacacacctggctctcacagcccagcctggacccaggctgtagtgtgggatgggtctggggccctggaccctaggtgtagcgtgggatgggtatggggccctggaccctaggtgtagcgtgggatgggtatggggccctggaccctaggtgtagtgtgggatgggtctgctgccgcgcagctgacagggattcttgccagcaatctcaaaaggcagctgtgctccctgcacggtagtagtttcactttggcttctgctgtgacctttgaaggttcccaccaatggcttttgttttcccttttcatatgtgcattgccgtgtgcatatgtgtgtgttgcacatgtgtttgtgggtacatgagtgtggaggtgcatgtgtggggacatacaagtgcgtgtgggtgtcttgtgtatgtgtgcatgcacatgtgtgcatgcatgtgagtacatgcatgtgaaagccagaggacagtgttggccattgacccttacatgactacttgccaagtagactcgaccagccggctaagacttgtctgtttctcttgcccatactggatctgtctgtgagagcagatcctctttgcaagtgctgcagcagtcatggtggaaagtgagtatctgaccgacattagctttgacagcaggaactccacagcgggttctgtgagaggctctgggatgcagccttccccttctctactgcatcacactaggtatggtccatcaaagcacatctccccagacacagtggacacaggcttgagaggtcagaacggggagaggggctggtgatccgcaggaaggcagaggtgaaccgagacaatcgctctgtggttgctgctttctgtttgttttagttttggttttggattttggatttttgttgttgtaattgtttgttgttgttgttgtttttgattgtttgagacaggtttttccctttgaagccttggctgttgtgaaactcactctgtagaccaacctagccaaactagtctgcctctactcccagatgcggaagggtgtgggcaaccacacctggctacatggttggttctcatcttcaatttgatacactgtagaacctaactggaagagagttgcactggattgtgtagatcagcttggcctgtaggtgtgtctgtgagggattgtcttgactgctgtaattgatgtgggaagacatagactgaaagtgagcaatgccagtcctggattgggtccctggactctatccgtagagaaagctagctgagcattaggcgtgcgtgtgttcctttctctctgttcttttctgagctgtgactaggtttgaagatcctgactcgacttcctcacagtgatggacctgcgattgtgagataaaatagtgtttgcttttgctctcctaagtctttgttttttttttttttttttttggttgttgttgggattttctatcacaacaacagaaggagccaggacaaacaccgtgtgatccagagtcatggttcttggtgcctgatgctatctctccctgatgctatctctcaccctgctctgctatgatttcagttaatgtccaaggtctctgggggtggggtcggtggtagagtgggaataaatggaagatgctaataacaggaatgttcttcctaggatatacacagcacaggaatgtaccctgtggagtatgtgctgtgtagcatggttttttttgtttgtttggtttttttgtttttgtttttgtttttcatgaagtcaacttattggggcaactgcttcctaatcgtgtcttttgcttgtagaatttgagtccttgcgatgattctggacgtaaagcatctgtggaatcccagtgacctgaatttgattcctaggccccacgtaaagatggaagaagagaagcaactccacagagttgtgttctgacctccacatgcaaaccatggcacacaagtcatcagtacaaatgaactatagatctccctattcctgccttaggagtgcctccctatggcttatatacctaggtgcctaggcagctggacctggccgagtttgctgtgcacttgagaaataaactaccactgcccccgtattgttttgaggatgtgagagttctctctgaggagggactgtcaactctaacaaatggttctttcttctgatgtgcttgtgaataacggaaagaatgaatgaagagcaggcattatccacagtgtgtgagtgtgagtgtgtgtgtgtatgtgtgtgtgtgtgtgtgtgcatgcgcatgatgtgcatatttatgtttgtgcatacgttgtgtgattatgtttgtgcatacgttgtgtgataaaacattttctgggaagacgtaacacataggcctgctcacctaagatagggagcccacaaaagattaaagtacacatatcaccaaagtccaatccagtgaaccaatgggggttttattagagtttcttacaggaatccgttcacgtgagggcttacttacaggagcagaaatgactcaaaaccagctgggaatctgagcacactgcacagcctgctggttgtggcctgtggcaggttggagaatatcctttccagctctaagctctgccaggcagctttcctggtttccgtttcttctaggctgctggtcttgtgtcagagtcttctttggtccgcttcttctaggctgctggtcttgtctcagggtcttcttcactttggttgtccgagtgtcttctttgcaggttggcttccttctgtctgagggccattctcagcttttattacttactctgccagggaggggtctagtgaatctggtcagtttcagggatttcctgatgttattttgatcttgtttacgttccagtccttgcttaaagagcttccctgtttcagtcttgaaggaaaaaaactgcacaacagcatatgtgtttttaattacatgatgtttttttaattggaaactcggactagcaaagccaactgcttccagacaccagctccatgagactggcaacttgaacagaaaccccatgttagtcacttgatggggaaacctcccagttgtagctcccggctttatcttgtagctgcagatcatttgaggagagtaatgtagtgtctgtgtaaggtcctataaaggttgtacctgaaatgtcacaaggattcagagaatgttctagccagtgatcccagggcctcaggccctgtactgctacaaactcttctaccacctgaggatttctttcatctagcagaagaggggttgtctcaagtggtctctgtagtgtctgtctgtctgtctgtctctgtctctctctctctcaatcacccactgacattaagatgaatgcatacctgtcatcccagcacgtgggatcatgctcacccacacagtgagtttgaggtcagcctgagctccatgagaccctgttccaacaacaaaaggaatgccaaggaactcccccttctcttgaagagacggacaggcctatagctttcaaatgttgcacagttacttacggctagtcacacgaggtcaccgggtcctgtcacctcagaggcccaactggctgctcttgtctcgtagcagtgtgttctcatggtttcttcccacctgggcaggtcagtcgtgccgacatgaatccccgggctgcacagtttccctgcagtaggagtccattcctgtcatctcacctcactttctcccacagtggctggtgaaacgagctatcgaaacaaaggaagagatgggagactacatccgctcctactccatctctcagttccagaagacctacagcctcccggaggtcagtgctctgccccgcttccttctgcttactcattgtctgtcctggtgtatttaatttcttcctctttcaggtgtatgtagattgagtgtgcttgtgtgtttacatgggtgcaggtgcctaaggaggccaaagacatcaggttccctggagctagagttgggaggtggcgagccacctgacccgcatgctaggaagcaaccttgagtcctcttgcaagagcagtaagagctcagctgttgccgtaaatctccaaccccaataaacccatgcaaaggacacacggcttggttgtaatatttataagctgcacgcctggactgggcaatataccactacactactatactccccagctatgagatcccttgctacttgtggctcctccaagccacgtggttctgctccatcttccttccacctcctcgtcctcctccttcctctctctcttctgtctcctcctctctaaaacttccagccccaccttcccttctaccgcccagtcacaggctctggcctttatttgaccagttaaaatggggagaggttcacatggaatcacctgagtatgtgatcccctgctcatcggggcagcccctgttgaggaagcagaaatagcatcaaaacacaaacagcagcagggcactgcacagcactcagccactgagccatctctccagctctctggggttttctcagtctttaattttattcatgtataaggtgtagcttgatcatatctacttccaactcctttcctgcccaggctgggcagtctctaacccgttcccttcccacacccatgccctccttctgtactgtctattacccgactggttcaggtagtgctgcttgctggaacattgactgatcttgtgcagatagccaccgatcatacagtgacttccagtgtagagagccatgtcatgtgttcacagccctccccacccgctccatctctcacattctctctgcattcccctctgtgatgtcccctgagccatgcagcagtcccatacatgtcccatgtcgcatttaaggcgagcacttgacaggcaggtattctcggtgctttggctggtcgttgttctccgtgtgaactgctgacccctacagaagcatcatctctggcaaagcttgtgcgtgctcttccttcctgttctctggtggtgtaagtgtgcactgggagagtcctgggtgcttaagcataggtccccctgcaccccaccccccctcccctcccttccccttggcgcctctgagcagcctcgtgttcattagaactgctccttagatggctgttaaggataaagcaatttttttgtgaattgcaaaagcttgtgcgtattatgtacatggccaggtgtgtgtgtgtgcatgcacgcacgtgtacacacacgtacataggccacatgttgatatcagctacctccctcagttattctccacattttttttcctttttgccccccgctcttcgtttttgatctatggctccctctgaacctagagctcatagattcatctagactggctgatcttcctgtctctacccccagtgctgggattccaagtgtgtgccacctcgcctggcttttagacgtgggttctggggtgtatccaatccaggtcttgatgcctgtagaagtactttactgactgagctgtgtccccagcccacggttctatttttgtgagaagctttttaggagactgcttgtggaggagcacgtttcctgcgggcacagttagtagtaactgtgacacgtaagagcaccaagcactcaggtactctagcacatcgctgcctccctcttcatcctgacaggtgctccttcatgcaggcggtggtgctcctgtttcgcagatggcagagctgaggcttagagttgaggttacatttagtgctttgaagggctgggcatgagagtgtttgtctcagtcactactctctccgtggcccgcctctctctcactaactgtaagtccctgtcagcattatttgtagaggtcctagctttttcccatgggagattcataagaaaattgagagctggggaaacagctcagttggtaagcagctgccgtgcaagccagaggtactggatttgagtcccaagtagacattttaaaagctaggctatagtaccagcactgtcataaaagctaggtaggtccctagggttcccaggctagccagttttgcttacttggccagcttcaggacagtgagagactatctctggctaatcggcacctgaggaagaacaacttcggttgtcttctcgccactacatgcacgcacacacatgtggacctgcacatgcatgaacatacacgtacctcgacacagacttttaaacagctcctttggacttctttacgcacagcagtgaggaacaactgttggataagggagacctgtgtgtgcagctgacttttttccttagtagaattggctgagtccctgtgttctgtcttgcaggatgatgacttcataaagagaaaagacaaggccgtcaagacggtcgttggcctctcggtaagtccctgtcccagcactgcacggccttcagcctcccctgtagacgtcacgtgtcccccaggagctggcagccaggaatgtgtgctagacatccctgccggctcgacacacttcgtaccaggacacaggagcccgctgctacactccaagtcccgtagtgccagttataagggagaaaaatcagaatacaaagcgcggtccccttcttaaactggtagcgggagtaacggcaccgctctagagaatgaagcacggtagctggcgaaggcaactcactgccctggcccctccccatggtggctctgggaagacagagtagctttgagcttctgcaggaaggccaccgtacgtggtgagttctggccactggattcaatacacatgagacatgtgcccagtgggggtggggagctttgttaagctgcttctggccagagccaggagactgcagccgctggctttgcgctcaagagaatacagcctctatgcctgatgcacagtctctgtcttccagaggcagcatactacagcacactgtgagtctagcttatgacgtcattgtgtcatagtgcatctactcaacctcatttgcaagggctcagccgtagacagatgagaggacaggtctggctgctagacctcacctttcaccttgtttaagatggtgtattttggttattttttgactgtgtacagcaggcctgagagtttctggtgattctgtctacactgccagtctctctgtagcagtgctaagattaaagatgctcaaattatacatctgtttttgatttttgttttttaacgtagcttctaggtccttattcttccatggcgggtaccttttatccacagagcccttaccacaactaagctgcttattttggtttttaagttagtgctcgttaaatagcaagtcagccagcttaaatatcaactgtgcgtttaatgcagacgacagggtggcagtaagattagaagctgagtttgcctgcctcatagagctttgtgagctggctcaggaatctcttcagaacaataattctggacttgaatttgtgttgtcccgcagtgacgacactgaaaaagcaggtcacttgatggtagcagacatgaggagctcaagcacagcagccggcaccccttcctcttcctcctctattctgtcagctctgggagggaaaaaccttgacaagtttgtttttgagacaaagtttcaccatgtagcccttgagtaccttgaaattgtggtagtcctcctgcctcaacctcccgagtgcctggattacaggcgtgcaccaccatacctggctcagctacacaattggtacagattcatggagtctggagatggcgcctgtgctggacccgtgagaagaggatagtgtcccagggacagcgctgctaatgggagagacaggcaggggacaaggttggagctgcgtctggataaacatggatgaatatcgtatgttgtctcaccgtctccatcacttagaacccggggcttcacttggtttgctgttttattactgtgaaatgttagaaaagaaggaacgtggttgtaagtgacaggtgtctgctttggggcggggtgtgacacttggtgtaagcacctgtggagccctggtgggcgggaatcctggattgaagcggctctgtcaaagatgccgcaatggtcagctttgattgtcaatctgacacaatctagaatcacctcggaagacagtctcaatgagggattgtctagaataggttggcctatagggggctgtcttatttattcactgatgtggagacccagcctactgtgggcagcaccgttctctagaagggtttctgagctgtgtaagaatggagaaaatgagctgagcacaagcaagcgaggtgcattgctcctttctctctgctcagacagtggaagtgatgtggtcagctgtctcatacctgctgtgacttccctgtgtggtggactgtaatccagaacaatgagctaaacgatcccttccttccctaagcaccttttctcagagtgttttaatcacagcaacagaaaggaaacgagcccagttatgctgggctgtgagaatgagtgacttcaggccagtggaggcagcttcccccttgagtggggcgtggtgtggcccactggagccttccagtgcagagcgccagattggtagtggcgcttcacttctctggatttcaataaagaagttgtccctggcgattgtgagggcagcgatcagagggttgacacgtccggggtatatgtcagggggtaggcagtgctctccctaccttgccatttcagatgtgggctcagggatcactgtgccatgtgaaagcaattgtgatggtcccttcgaggaaaagtggctgtcaggcacacaggggttctctgtgttagggtcaccttaactctttaatgccattcatgtcattctttatcacttgccaaggcaaagtgtcagaactgatcagagtgagggagaacgtatttgaagagtcctcgtgctgatgtcattccgtcgctgtcacttaatgctttgttagctatgggcaggttgtttaaacccaggaccagtgagatggctctgtggatcaggatgctttccaagctaataacctgaatttgattctcatcccagactccatgtgatggaaggagagaactgactcccacaggttgtcctctggcctctgcatgtgcaccatggcatacgtgtgcgccctccctcagacatacacataagagaaatagtgagatagaaatctaagctccgcaggtctcatctctaaacagaaacaagcatgggaggcagtgcatagggagtagccagtacaggcctggtatgtgctcatagcgagacagcgaggctgggaggtgactccatagggaaagagctggccacataatctcgagggcctgggtttgagtgctggaacccacatgagcttgcagtctagttgccaggagacagcacgagaggatccctggaggatgctggcagccagcctagccacatctgtgaagtttggtaaaagcaagagaccctgtctcataaaacctcctacaagctgtcctctgacctccacacccaggctgtgggcatgtgcctgcgtatgggtgtatgcaggcacatacacacatactgaaaaagggaacaaataaataaaacgtacattttaaaaaacaaaacaaaacaaggtagaaatcaaccgaggaggattcctacagctgacccctcgactccacaaatcatgtgcacccccaaacaaacacaaagagaaaatataagaggttaactctatataatgaacgtctaaagtatttcagttttgatttctctgttgtgtgtgtacatacttgtacatgagtatacatgccacagtgtcctcctgctgccacgtgggtctcagggatgaaacccagtcctaaggctcaccagtatgcagtctgacccactgaggcatgtggctggccctgtgtgacttttcaaaagtgaacatagccaaacagtattgttaatctcagccttgaaattgacacagtcgtgttaacaatgaacaagacactggacgtatcccggaaatttttgtagtttgtggtctgttggaaggagctgcccatcccagaagccgtcagtggcagaaatggggtaagatgcctgttgcttgaagagtgacttagcaggggctctgtacatggcttgcagtagctggtgttaggttttcattgatcaggctaccccatacctcagctacagatggtactgtgagtggtgggagagggtcagctgtagaggcagcccgtgggtgctggagatactggcacatgcaagtaaggagaaaagccaaggcatttggagcctagtgctgttctaggctaaagctatcctaggcccaacactatatcctaggatcttagacaaattatttatttagctgtgggaggagggttgttttggttttttactgaaacaggtctcatgtacccccaattgcctttgacactgtatagctggggatgagggataacagtgaacttgtaatcctcttcctctactcaggagagcgcagcaacaggcatatcctaccataccctggctatgtggtctgaggatggaagccaggactccggatgctaggccagcactccatcagctgagccgcatccctagcccctgcttctttggcattacactgagaagaatagtgtgtgccctgcctttgcctctgcctgagcggtttcagagagccaaaggtaagatgcatatgaaggtgcattcttaaagtgtgcatggagccagcctgaggccgctgtgcagagtgagcactccccttgactctggctttcctcatgctattgttttgaagtcttttcttagaagaatccaatttcctgtcttgagtcattggctctttcactggtaactgaggagaacagcagttaagcgcaattatgcagtgttattataataggcgagcttggtgggaattaaattacacgcagtcccaggttcaggggcccattctccttttcatttctgtataagtctggcttgcattatttatagtttgctgtttgtatagacaatgggggtgaactgggggatatttttggaaggactttatgagagcagccctcaagcatcatgccagatatttgatgcaaaacgtgagatgggctggtgagctgccttagtgggaaagggggcttgctggcaaacctgagagaacccagcccgctcccgcaagttgacctctgacctctacatgcacaagtgtgattacacgtacaataaatacatgtttaaaaagttgagatcatttgtgtgtcacaggtacacttaacttcataaagaaaagtacagtgaggctcaggaagctgggttatctccaaggaaaggtcctaactgagtgaagtgctatgtttgaaggggcttatcctgggccgtgccggctagggacaggcttgtgctgtcacagtgcccattggtccacacacagagccatctcagcagtcaggaaggacatttatgggggcgggggatggagtgacaaatcaggccatcagaaggtggacactagtgattgattattgaacatgtactgcatgccacctactttgatcaagatagatagacagatagatataaatattttacatgtatacatatgtacagatatgtgcacattcaaccagaatgtgtgccttataaaatagacctatatttattgtatgtagtgtgttgattgcatacaatagcaggacagttaactgtagtcctacctgctctttaggctgaagcaagaggatctcttgagacttgagacaaagagttcatctagataataaagcaagacactgtcttagaagagggggaacggacacagggcattttagttttcttaagctttttgatagtgaagcttcggggcacatttatttctgttactgtgacaaaatccaccaacagaaagcaacttaaacaagaaagggtttattttggtttacaattccacagggatagagtccaccatagtggggaattcctgactgccaggaagcagaatgcttgcatctcctccacacacaggaagcagagagaacaggaagtgggcgccaggcacaaagccatcacgaatcatgtactccttccatcaaggctgcacctcctgaactttccatagtctttctaaacagcagcaccagctgggaccaagcctgtggggacagtttacatccaaaccgcaacatccacattgctttcctgttagcctatgaaagaactgtggtctccttcactgtgtagagagaccttttaggacgactgattatcacaatgtctgatagtgagctgctttgtgggaaggtcagcgcatgatggctcttcacttgacaggctgtgttcggttcagaagaccagaggagaccttcctttatttcaaagccagacagcatcataaagagatgctcttctaaagtcatctagacttttggtgtgattttaataaaaacaaagagtttgcataaggaacctaacaggcaggcgctgggatatgaataggcgtgaattcagatagagcagagctgaaggcttcaagcgtgatcttaagacgagaagcactgagcggcggtgggtcattggagcccaggcctgcctgtgtgaggcggctcatggtcagaagtcagacgcccggtgggtaggacggggatgctttgttttccatttgtaaaactatggcctcctacctttcaccacaccacagagattttaaagctaaacataaactataatgtgaatatatttccttagtatgttaacatatgaggtgttttcttccgtgtctgcttgtctcattgttccttgcttaagtaagctacatgtgttggtttcctttgtgttgttacaaaaaacaccctcagaaaaatgtgagagagggtttattaaggctgcagttgcagttaataaggcttccaggtcgcagcccgtcgttatagggaggtcaagacaggaacttcaaacagccagtcacagccacagtcagagcagaggaaatgagcgtgtgcgtgcttagctcacgcgatggtgcttaaccggagggaggtttgtgtgtgtgtgtgtgtgtgtgtgtgtgtgtgtgtgtgtattcctcatggttgtgatcacaggttgaactgatctagacagttccttactgagaatctacccaggtgattctagattgtgtcacactgacagttaaaaccaacaattccagtgtaaactctggaattagaggagcatattgttaaaacgaccttagctaagtccatcagcagctgtgtacagagccggacgtagcagcacgcgcagtgcgtcataatcccagcactctgcagctggaggcaggatctgaagttcagggccatcctcagctgcagaaggaaagggagggagggagggaggaaggaaggaaagggagggagggagggagggagggagggagggagggaggaacgtgaaggaacacgggagggagggaggtgagggacgtgagtggacacgtggagggacgggagggagcggacgggaggaagtgaacggaacacgtggagtggagtggagggagtggagggagggagtggagggagtggacgaactgttgggagcgaaggaggggaaagagaaaaacagtctcgaaggccggtcctgtcagtgagcttctgccctggccgtgagaccttttcccttcttggtacatgaggcttgtggcctccacctcgttacagtggtagaggcagctccagcatggctaaaccttgggctccagcttcctgtgtgttacactgacagaaacacaaatgaggagagtgggggtttatttggctaccatctattggtgaggggcactcagggcatgaactgggccagctgctacctcacagtaagcagagagagggagcgcacgcaagcaagcgtactgcatagtgcccagctggctctctcttctctcttatagtctgggcccacccccagggaatggtaccactgactctcagcctcagtgttctcacagtgattaaggcgatcaggacaatctcccacagacaagttcacaggccagcctcttcctaggtgatcctagcttgccttaagttgaaagttagcattatcacacctagactctgtcctgctgcccctgatgtgagctaaccgggtgggcgcccccatcctttagtaaaggtctactctgctggcatggctggaggcacccagccacaatccaggggagcctctcatgttgcctttctcgtcccctcaggatgcttacaagccccggcgaaagtaccgacggcagcggggagcagaggagctgctggacgaagagtcccgagtccactccacacttctggaatatggcaggtacagagtgggtgctggtcatcgtgtccaaacccagcaccacatgaaaaagtccagagtggcggcacacacttgttatcccagtgaggaggtggagacagggagatagatgctggggctccgtggccagacagcctaaactaagcctgttgagtaagatccaagccactgggagaccctaccttgaaaaccaaggtggaccctgtcctgaaaaggaaggttgttctctggcttccactcccctgtatacacacacaaaagaataggtattgatatatttagtggatggatagatagatagatagatagatagatttatagaatatacatctaaataaaggctttttgagttttcatgtcagcttactagccctctctcatcctcaagggtgctttacccttcttaataaactgtcgaaagaaagaaagaaagaaagaaagaaagaaagaagagagagagaaagaaatgaaaggaaggaaagaaagaaagaagcaagcaagccaacaattaattttttgttaattaaaattggacagctgctggagtggtggggtatggtgttagtctaagactggcaggcagaggcaggtggatctcagtgagtttgagaccagcctggtctacagagtgagagctccaagctagccaaggctacatggtgagatcctgtttcaaaaaagaatggagacagagagagagagagagagagagagagagagagagagagagagagagagagagacaagcaagctggcttctgcctgattgagtccacatttgcagctgtgactttctggtttcgtctctgtgcccacctttgtagttctctggaaatggctgtgaccgtgcatggactccgaccttcttggggagttggtgcagaggccagggctcgaacgcccctctttttaaacagacagtccacagagcacatgcagccatttcgtatgccctgcagtaatcctttagggcaaagattgatctgaatagaaaaatgaaagccttaatagtaagccttattacttcttaaaattatttgtcctggagagagttttactttatagcctcacttctttaaaaacatgcaagcacaggcttcccttggtcaacactggatattaaccttgcccatgtcctgcattgtctatccagggtgactgatcccttgatgtgagtatgtgcctgtgtctcctgcctatgtgtggggatagtgttccaactcttgtgtggctgacgctaactctctcactagcatctccctgtgtgtcttatggtgccttccgctgagaaatagtggtaagcaagaggaaattagacttagctgttctagctttccaaggaaaggcagtgcttattagtgtgcgtgtatgttgtgtgcgtctctctgtgtgtgtgtgtgtgtgtgagagagagagagagagagagacagacagacagacagacagacagagacagagagatgagggctgtgtgcaagccatggcctgttttgccgcagaccttttgggtccctatgtctgtgtggaacggggtctctggacgcgggtgggcaaagggtggatgatgacagacagacacacacgcaggagagtttgtgtggaatctgaatgtaattttacaactcgagcatcagactttttatgcagaggacaataaggaagttgggtgacatattcgcaaggtacaattgaggtaaccggaatcttacataaaacagaggaatgcaaacacaaaaggtctaacgggaaccacccaggatagaatacattgatatcagctgggatcaacgaaggctccacctaaaattcactaatcttagaagccaggtcaagggcttcgcgtccttgccatagttcctattttagtctcttgtatagtccaccttccccttaggccattgtaaatatgtgtatgggtgtaactctgctatagtatctattctggtttctcctttggtctgaaacttccttcttcctaagcgatggtaaattcctgtgtaagggagtgacttagcttttacaatcttgctgaattctaaacccttgatcttggtcaaggatgcccttggactgttggaacactgggggaaggctttagccatgtcagagcacttataggaaaaactgaaagagagcacgtggatccatactctagactagcgtggtactggaactcgggaatgaaaaattaatgtatgggtagagaacactagcctccaggaggagagcttccttgaaactcttttgcctcatgagtgacttttaagcctttcggcttgtccagttgactcgaccagagagcgtagcactgtttgtgtacagggtcagctctttccttccacctccatgtgggctctaggattcgaactcgggtctttgagcttgcatgaaagcacctttacccattgagccatctcacctgcctctggtagtgtggtggtgtttggctttgtttatctgcttgtttggggtgattctctgaggtcatctctctcccacaaatgaaactagtgtttcagaagctaccgagtctgttcagcattccttctgctgctgagaattgaatatggttttccaattcagagaccattcataccagggacattattttgagagggagcaggaactgtataaaattaaagtgcatagccccctgttaaaaattgttaataaaggcctggagaggtggcttgtttggtaaaagtgcttgctttaccatgacgaggactgaaattcagtcccaagagcccacacaaaacacacagtacaaaactgcctgtgattggcattcacttgtaactccagggctagaaaggcaaaggcagaaacaccctgggggctccctgcggccagcctcctctaacgggtgagctgcaggccagtgcaagaccctgccttaaaaatgaggtgggcacactcacacacactcatgaatgataaaggattgtgctgaaagcatggtgtgacctctgtctacactgtggagtagctgggagctcccaggaactgaatcatgggactcagtcactcagactccagactatgacttggaactacagatttaagccaccctaaattctgggttccagtgtggaagcagtttcatatcttaaatccgggcacttttcatatacaccggtggaaacgttaggtaggctcagggttacagcacacttagagaagtcacagccagaggccttggatgccatctcataactcttacccttttggttggtggaaaaaaaattctttaaatagtttattcttgaatcaaatatatgttactaaggccctggaacatgaattcctacatggaaatggtttcctgaaactatagaacaaannnnnnnnnnnnnnnnnnnntacatataataaataaataaatcttttaaaaaaaaaaaaaaaaaaaaaaaaaaaaaaaaaaaaaaaaaaaaaagaaaggcaaaggcagaaacaccctgggggctccctgcggccagcctcgtctaacgggtgagctgcaggccagtgcaagaccctgccttaaaaatgaggtggacacactcacacacactcatgaatgataaaggattgtgctgaatctgtctacactgtggagtagctgggagctctcaggaactgaatcatgggactcagtcactcagactccagactatgacctggaactacagatttaagtcaccctaaattctgggttccagtgtggaagcagtttcgtatcttaaatccgggctcttttcatatacactggtggaaacgttaggtaggctcagggttacagcacacttagagaagtcacagccagaggccttggatgccatctcataactcttacccttttggttggtggaaaaaaaattttttaaatagtttattcttgaatcaaatatatgttactaaggccctggaacatgaattcctacatggaaatggtttcctgaaactacagaacaaaaggcttttttaaaattaaaactacatcaggtagatgtgttaacaaaccaaggagatgtgctatgggcagagatgctgctgtccggtgacattcttagtggaagcaggtggtatgctaaattcatttcatcaggttgtatcggattagaggtgggcagtgaatgactgtgaaaagacttaaggatatcaccaaggtagttcagctctggatcctccacattccaaccctccacaatcctgaacttctaggtctaccttgtaaaaggttagctctgatgtggcttttcctgttaacttggcagcactgactaatctgcagaggctgcagtaaggtcctttacaggactgtgtggagacccaaactttagccttaggttgaattccctgtactttggcccactgtcctgcaacgtctgccatgtctgttttggtcttttccagttctattgcaaagttaggcaatgtttataacatcttacttcctgcattttctttcacttgtatttttttttttttaattcaacaaacgttagaaactcaaactgtaaaagcagcagcatccaccagaagggtacagacacgcgctcaagcaattgaccatgaccaacagagtgggggcttgtgtgggtgctagaaggtcaggtcttgctctgtatgtgtgcacttggacaagtgggagcttttgagacacagagcagagaggcagatgaagggagagaactggtgtgaggctccaggtggacagtagatggagcaggagctgctcggatgagcctgagtggggccttggaggagggagctggccagactgcttaggaacctgcagtgcatcttggaaagtgcggttgggtgggcggtggaagagcaggaggggaggggtgaagctgcagaccctccctagacagtgacagcagcacactgctcccatgggcaaggcgtgtcccaagcagggcagagcaaaaccttaatttgtgtttctcttaagtgcttgcatgcaactttatttgaaactaagatcttagaggctggttgttcacattatatcttttgtttggggttgaatcttttgtgtgtgtgtgttattgtatttgctttaggaaaaaaaaaaaaaagcatagtttttgttttaagccagaaaataaactaactgaagctgaaatgcagccatgcgcctttaaattttagctctgctaaagtgagtccacatgaatgacattatgtttgggttatgtgtgaaaataaaatatgggcgtgacttgaagtcattaaagcaatattaaagtctgcactggctttaaatacattgtctgtttgcacagatgtttttaaggcttttagcttgcagtgtggttttgatttttagcttgcagtgtggttctgagatgcaattcctgattcgaagagtaacgcgtgcccttaaaggatgctctctactgtcttagcattcccgtgtgtagcatctgaacagcaaataccgtgactggccagattcagaatctgataggttatgtttctggggacagcacatggaatattttctctaagcattgaataggctaaatccttttcatagtctgtgaaaagcctaagtgctggggctggggagatggcctttgtggtaaagtgcttgtcacgcaagcctgagggcctgagctcctgagctctgtacccagcactgtgtaaaagccagttggaagggtgtgcacctgaatcctagcgctgggaggcagaaacaggagggtccctgggccttgctggccagcgaagttggtgagctcctagttcattgaaaactaaatgtctcagaaaaatttagaaagtgactgaggaagctatccaatgtttgccagcctctaccctcatgcacacacacacacacacacacacacacacacacacacacacagagcatccaataaaaaatgcacttgttggaatttattgagatttgtgaatagtaattaagttgtttctcatggcttacaggagatacggatttagtcgccagagcaaaacagagaaggtaagacctacctagccaggtggtggcagcaggccctgggcaggcaggggtcctgggaatataccaggcacctttgtcccctgcttgttcgtcttggtatctctagcctgccgcctctgcagtccaggaacagaggcatccgagagctatagagcaaggatggttgaagtccagttgatagatgtgatgctgtgtcaggcacgcctcaccaaccctgactggcctgcatcagaagcaggaacttggcctggaggccctagattatccgatctcttttagttgggccccagatgttttctttcacaggctacccctctgtaagccagtcttgttcccgctgagtctccaactctggtgctcagccgttttctcatcttcccttctaggctgaggacaagaaaacagcacttgctgcagggctgtcagctgcagagaaagtggatgctcacgaggaagatgagcttcaggcagccgaagaggtgtgtggcatgtggtggctcttggaggttcaagtttgggtcacttgagggaagcattagctctcacccacagctctctcaagcagccttccactcacagttcccttttttaaaaatgttatgaggttcgccattacccctcattaaagcagcagctctggggtttcaccacagagacctgggcaggcgctcgctccagtcagtctcacacggttggtcagaactgctcctcactgttctcttcctctttcagcagcgtattcagtcactgatgaccaagatgaccgccatggcaaacgaggaggtgaggacttgtaggggagggggttgtgtagtagagatgcagatagagacttggccccatcctgatctgtcctaggggacctgaggcaggggaataccatcttcagagccctctgtcttcagaaggaagccttttatagtgcttagcactgacatcagggccttctaagaaggaacctgttggtactctgttcccgcaggagtgatgcactgacctttacggaagagcaagggtcagtcctgcttatctgaaaccgtgggagcccgtcttcttctgagcgcagctgtctaggcgatgaaatcctaagttgccagagagccttctcacaggtcaaggcctgcacagaaggagtaactctgccctggatgagaaagacctgtgggaataaagagatagtttagacagatggggcttctgattcctttctcttctcatctgtgagcctcaggtccccaaatgtctggacatgagggtggagatgaagggatcctagaggtaccctggtcttaaagaggaaccagtacctaaggggaagttagaaaggatacccaagacccaagaccagaggggaagctagcatagctactaaatgacttgagagagagtggtcattccaggggcaaaggaagcaaacacagccaactgagtgctggagacaggagaggcagggcagctctgacgcttgtcctgagctttgtgggtgagtcagaggtcaaagccaagtgactttcctggggcagtgctgtgtattttgtatttagacaaagctctgtgatgggcacgtgtccctaagaatatacgtcatgtgattgcagagccgtctcaccgcaagctccgtgggccagatcgtgggtctctgctctgaggagatcaagcagattgtgtctgagtacgcagggaaggtacgtgactgcctgccagcgcctgggccttgggtcacacccatggcttcatcctccccttcccagaagcaccagcaccaggcttgcccatgcacagccatctacgcccgcccatgagctaaattcatttggttccaaggtgctaatttttttctataaatattaagggaaaagtctgtcttgaaatagcagtcacatctaatatgtcgccacctgcaaatccaggcagtcatctttcctgccctgtcaggctgcttataactcaggcttagtttggcttttttgcttttaagaagacaaacttcataactcagccaagcccaaggcagaagtttttcctggacactttattattgagaaatgtgtagattgaacaaaagcctcagtcatatttcaatgttacttctcttcccaccctaaagagaggccagggggccttaaatatttcagagatggagtgatgaccatttttaaaatagctttaattttttattattattgatctattggagggggaggagagttatcacagcatacatgtcgaggtcagagagcaactttatggaatagattttctctttctacctttatgtgggtcccaaggttgaactcccagagcaagcgccttcccctgctgagccaactgggcagcccggtagtgaatcattttgcacataactgagtctagtgtggctgtgctttggcctgggtgagagatgatttacaaggctctcttgggtttttcatttcctgttgtgataaaatgccccatgcaagcaacttctgggggaaagggtttctttggctcacggttctgggttatagtccatctttgctgggaggtggagtcaggaggaatgtgaagcagctgatcccagccacagtgagagcagagggcagtcagttaatgcgagcatgagcatgcgagcggtggctccctctcctgttcctctgcccagggcccagcccatgaaatgttgcctgtgtaccttgcccactccacccaactacacaattctctcacagtcatgcccacaggctaacctgagcctcactgagcctcctcacttccagggtgagtctggactggggctagtttgtgactagagctgacatcagaagggtctgttagctcgtccctcctttctcacctgtgctctgagtgaagggtgcttggggaattgctctcccctagggccaaagtgaggtctccaaggcatggagcttcagagcaggacagtgcgtaggtcgatgtctggggtgggtttcctgtttccctgtcgtccaagggtatgcttctaaacatggctttccctagctctcatggactccaaaaggtctgtctttgcatgtatcacctagaaaggggagcactggcgtgccatctgagactgaaccaagagagattttgcctactgtaaatgtacagtaaactcaaaagattgcaattcatagttgtgaaaggggaataaaaatcactgccccagaagtgtcctggtttcctgtcagtcgatctaagtagcaaggctgtgagtctgacataattctagactgcctgtaaagagctttagtcagcgaagttcaagaggaaggagaactagatgtgtttccactctgcctgtgtataaatgtaattgtgtgtctgtttctgtgtgcatatatgtggatttgtgtgtctctgtatatgtatttatgtatgtgtgtgcattggtatttgtgtatatgtctgtgtgtatatatatttatgtgtatgcatgtgtctgtatctctgtgtatatgtttgtgtgcatatgtgtctgcatgtatgtttgtgtgtatgcttatctatgtatatgtctgtttctgtgtgtgtgtcggggggaggtgttgtttacatgtataatatatgcctgcttgttagcatggggcatgcatgtggaggccaaagtcattgaaaatgacttgtgaggcctggtcctctcctcctaccctgtgggtcccaagaggtgagcttgggctgtcaagcttggcttcaggcatctttacctcctgagccagttctctggccctcagtctcttactgcgattaatgctttcactaggtttcattgattctgctgttcaggtctatcgaggcttttccatttgtatccacttaccctactactgtttgtcagagaacatctttgtttccctgtgacacttgagctttactctgcttttgtgtttcctgtctaatttaaaatacaaaccaacctttgtttcttatccttctgtttgcttcaggttccatcaggaaaccttgctgttgtgtttgcttctttctgtcttgttgttgcatccagccaaagactggttgtgttcaacctggaccccactcgtgggtcgcattgggtttattgctgcatgtcacacctctgtagaggtgcacagcagctagttaagatggtgttgaaaggtttagctctgttttggatgctataaggaagggcctgtgaccttgactctcaacatgggctcccacacaccacacctgttgctttgttgccttcttgtctcagcaccataggttggcttggaactgggctctggtgtcctctgagatgggcattgctgttatcagttttgttaggagtagtaccactgtggtcagagatgaagacaaagtgttccaagcagactccattagtgccatttaagaattgtccaagctggactgttacctgtgtgcatttttctttagtgaggagaaaggacccccccactttcgcagggtagaatgtaaagaagatttttgccaacaagggataaattgaacagcctgcctaaagcaagtgcttgaaagaaaagggctaggctttgggatctaaaagtgaggaagaaataagaaaataagtgtcagactcagctttcagttttaagattcacaggttcttctgacagcgtgatgtgatgagtagcccacgtgtttcaacgcaggctgggagatagctaactcagtttactatggttcttgtaaggctgcaggttggggggtatgacaaagcatttgtagttgtcatccacgagtgaggctctgggcttggtaggtcccatctccctgttcctacctgacactctcagaatgttctagaaggcctcacgaagccttttattgttgatatctaactttctccagagaggagcctctcactgtggtttgcagacaacataacagcctgactgtgcaaactactctgacttcactaatcccaggggcatcctaagaagcagccaggccggggcatatgcagggtccttggaagagccctaatgctgctgctgctgagtcaccacctggcatgttgtcgccttggtgcttagccagctaagtcagccttagctgatatgtctgggggaggtcctgatgggtcttctggggggattctgtgggtctgaaggtgtaggggatctgtgttctgcaaacagagtctgcatgtcctctctgttggcatcttgtacacttttaattcatgactgtttatgtgccggcagtcagtcttcaccttctatgttgtttgaaacctctcttgttctgtgctgagttctacagccttgctgacccatttgcttccagaatattcttctgtctctgcctgtaggaatgctgcaccatctccccagcccagcatttttaatgctaaaagaatatttaactgtttctcttttttacacctttatttacttgggtgtgtgtttgtatgtatgggagcaaggagagtgcgtgctgtgacttatctgtgaaagtcaaagagagctgtctagacttggttctctctcccaccatgtgggtcctagtgttgaactcatgtcgggcatggtggcaagtgcctttactcaatgagcatctcgctggctgagataagttggtttttccaagctgtcttcttgcttaagaccttctgccttcctccctcttcatacatatttgtccttgtctgttgctgtcaaaatggaccacattctattgtttaattgagcaactcacttactaaataccacggttgttggtgccgaggaaataagtctgtaatgttatatacatttgcagatgaagaaagtgcaggttatagaggctcagtcatttcttcattcgtgtgcagctctagtacgttcctggtttgtgcaggaccacctgcctttacagcctgtctgtttagccagctggagggtcatggggggtggggtgaatgtatgtgccctctgtagttcttcttctgagcctgcagcaaccacgtgcttcctcaggcatgcacacctccaccgactgcctttgtactgcattggaaaggatgagtgcactaggtatggacgaaccacagaagtaagagaacctagtacagcctggggcttacacagcacgacaagccttctggctactgaagttccttttaccatcttcatcgttgtcgtcattcttttatcatcatcaccactactaccactgctgtcatcattgtgtgtgtgtgtgtgtgtgtgtgtgtgtgtgtgtgttagacacatgtgcgtgttctatgtgtaaagtcagaagacaaagtcagttggttttctttttcctcctgtagtaagccaaggcatgcactccctttgccctcatatatacgacaagcacataccagtaactaaatggggatcaagctcaggagacaccttctggcctgtggaaactatagacgtttcttctggggtatccagtgactttttttttttttttttttttttttggtttttcgagacagggtttctctgtgtagtcctggctgtcctggaactcactctgtagaccaggctggcctcgaactcagtaatctgcctgcctctgcctcccgagtgctgggattaaaggcgtgctccactacgcccagcttccagtgacttttcatgtcactgtagaacacattataacattttcaaatagctctttctaaagtatagtattttaggcaaaagagatagcttatccaattaaggtacttgctaccaagtctgaggatcatggggggaagagaaaactggctccagcaagttgtctccccatctccatccatgtgtacgcatgcacacacaaaaggagtaggagtcagtatcagttctgaggtaaagtacagcatcccagcccagtgctgtttcctgtgcctcctctgtcatcttatttccatggggacatgtgctcatgtcctcaagagccttatttatggaaggcattcttctcccagctggttctggaaggccccgcccctgaccttctgaggactgcactctggcacccagtttgagagcacctttgtctcagcagataattagacctggggctggtccaagcaagcacatgcagaactgcagaggaaagaaccttccctctggagagctcagatgccgaagcagctcagcctaggtttgcaggtggtacattctcccctccccacacacacatgatgatttttgttttatattttatttccttaaaatacattactcttgtattttatttgacaatatcatacatgtctgtctataatgtatcttggtcatttttgccccaattaccacctctcccattcccactgcgcccttcttcccaaaaaattctcctgattttgtatcttttgtgttttgctgctggtggtggtggtggtggtggtggtggtggtggtggtggtggtggtgtgtgtgtgtctcccactgagtttaattaaggctacttggataagcctaggtgaggactgtttattgtagcatgggcagaccctactaatggctacacaataaagaatgtgattctccttccccacagcaagcagcaacagccagtagttccttgggtcaccaggtgacctcatgccctcctcccactacccctaggatggaaagttggctggtttgatcttacaagtgtctcgtgcaggtaatcacagccatccatgaggtaggtcaccactgtggtgcgcttgtcctgcctaagagacagcgtctcagagcacccctcgccctcatctggcctgtacgttctttccattcctgtccccctgccttcagtgcaccaccgaggactgccccttttagggctgacctgttcacataacagtgtgaactgactggaaaagagtgcctcttcagttctgccacccacgggcctggccagtgtgcgtcccagcaatgctgctgctagagcactcgagggagagctttatgttggccggctcccttctgggcttcctgggaactcagcttttgtcaggaccctttgcctgtgctggccttcttcttccttaaggccttcacttgaaggcctggccaactgttttagtcagacagcctcttctcatatttctatattaaatcctgagagacattcatctcggtgtgacaggctccggtcatttattttcctctcactccattccttgtatccaagttgggatctgtgattggcagtgcctctgtagactggagatagtgatttcccacaggaacatgctggtctcattaaattagcacctagaggccttaaggacgtttatatactaaatctgatagggtgggcccagaagaaaaaaattaatactttatgtgcctacttgaggttctgtcttcatgttatgtaactgccctggttttgtgacttggccactgtttctaggttatgtgtaatggcttctaacaatagttgtaaagacaatggggggcttcggagatggtgccatcacacaggcatgaggaccggagttcagtccctaaaactcacataaaagtgggtgtaggtatggtgggcacatttgtaatctcaatgctgaagaagagagactggaggatccccagggcttgctggccagacagactaccataatcagtgagccccgggttctaatgagagaccctgcttcacaggaaaagagtgaacaacccctgatcgacatttagagttgttctatgactgctactcatgtgcgtacatgtctacccagacacacactcgcactcacacacacacaaacacattaaaaagaagcagaacatggatcagggagagtggatggttggtccatgaggagtgcctcagaaggtcacttgcacactactgtatgtccagaggacagcagacagcagtgagagacagggacatcgtcctgtagactaactgtgggtgcttctctgtaagctgaactgtcacatacaggcgagtgtgtttcggggttagtggccctgattctcttgtctgttcctgctggcttcagtgctttgactgccaggagtttttcgattacatgtacatgctaggagtgtgtgtacacaccgtggcatacacacctgggcgactcccatggagggcagtaagacagcttacagaagtctgttctctcctcccgtcatgtgggtcagaggatcaaactcaggttgtcaggcttggtgacaggcttacctgcttagctacctgtctagcctgcttgtgagttgtgactgtggattcaccatatttcactaaaaactttctgtggaagtttttggaggcagaaggtttcagctctgtccttcctgggaggatctcgtcttgtttcttgggcactcgggtacacctcaacactggtctgttttagagtcctgactggcaggtgttttctgttgggttttgagacagagtctcacggagctcagtctggcttccactcagtctgtatgtgaggatgatctgacctcctgatcttcctgcctgtgcctcccaagtgctggggttgcaggtgtgcacacttgactcctggctggcagttttatgggcatgcagggagcactatggatttagatggcagaactccaagaagctagccaaattttattgtgtaccttttccttttacactgaagccaaggctaatgtggagtctttattgatcaactgtaaaaatcaaagctagacattacaaggttttggaaaataccctgaaggaagtaagccatcttccgtgagggcacgtgcctttggagtcccacattcacttacattttggcctctcggatttgcatcgcgtcttcctagctcatagctgtggtttgttgtctgtttgcttggtttcaattggaggctcacaagatgtcggaaaacctaagttccattgatgactgtggagcgcttcgacccccatgtaaggtgggctgcagggtcctccctttctcatcctggagactagattgtggccggaagggactaatgggggagggggttcctagactagaagaaagttagaagtggggatgtagctgaggggtagagcacttcgctcacactgggtttgatcttcagtgctgaaaaatgggaaacagggatgcaggctagcacataggtaaccttcaggggctccttcgattctgacaggataccaatgtaggaaatgtaatcatttcttatttctcttgggtgtttaatattttgaactagactgctgccatcaagtgacatttaaagccatctcccctaagaacaggtgtcatttctgtctgtcatattagaaaacatgagctctgcagccgagcctgttaatccactctgtggttttacaggcacgttcttaatctgcaattgttgaacaaaatgagatcagcatattaacccttgctcctggtggggacacagggcgtgtttgtcgatgctcagccttttcagaacagatgttgtattttataaacagactgttaagataccaaggacttaaaatgttcccatggagggttggctgtcaagccccatcttgtcttcgccatcttaccaactttgcaccattgttaaaggtgtggtgtatcttggtcctcttcagcctgttctcctgctgtagctttcagtcagccagtgtcagatgagctaggctgttttaagggcctgttttctgccttcagtctgggttctcctggctgttagaaagataatttgggagaaacaaaaatttagagtgtataatacaaagtatgtttgaaaagcaatgagactaggttaagaacatcttcactatagctctaggataaactgctttgttgaaaggcttcccatctggaccagcggcttcctgaagcaccacttcacttagactagagaaaagggtcaacatggagatagaagtcaggatcctgagttagttaacgtgaaggaacactttataaatgaaagtttaagaaactgcaggggctgcagggatggctcggtgggtaaggtgcttaccacacagcatgaagacctgggttcagatccccaccatccatttaaaaagtgggatgcagccgcacatctgtaatcccatccaggaagatggagactgtaagatcctctggggctgcatgtatacgttcacttagtacgagcagaaagattttgaaagcccttgtttcctggaacatattgtaataaagatagaacagatttgaaaagacttaagggttcttcctgtgcgcatgcattttctatttatatgattctcagtgagagagtggattggagagagaaaattttcattcttcctaaaacccttggtggggtctgtcaactcatttgcttcccaaacaataggtccattgttgagttccaggaactgagaagattaccaagtgtaatagtcaaggttgtctaaggagcagaactctgtgtgtgtgtgtgtgtgtgtgtgtgtgtacaagatttgttagagtggcttataggctaccatggctgtcttcaagtggaaagtccaagaatcgaatactgttcagtctatggggataaatgtctcagctggtcttcaacttacatcagaatcccaaagaagtagacttgaataccagtgaaggaatgcctcggcagcaggatagatgaacttgccagcaagagtaaggacaaataggcaaaagctttctttttccatgtcctttatataagctgccaccagaaagtgtgacccccaaattatctaatcaagagaaacccttcacaggtgtgcccagccatttgggttttagttaaatccaaagcaagttgataaccaagaataactgtcacaagtgaactagaagaccctttggatgaagaaatatttctcaacacatttagtttcagcaccctgttcaaagattcctaaaattttctgaagactggggaacttgtggattgatttgtttatggataataatcaatgtattccatgtcaacattagagcaacgatgtcacatgtaacatctagggaattacactgcacagacatgacaaaatgcgtgtggagattgcaggtaccaccttagtgtttatgagtcctataaaaagaagttaagagagcctctccaggcttgctcaaaattcagctatgggtgaggaaaacaagaggagagacagacagacagaaagagacagagagagaccaaatagtttgaaaaatcctttttctggaaatcaaaatatctactggtctccttcaagaaagacttgtaagtaaatattagagatatggcttggaatagctgcatgtgagctgcatgtactaaaaaagaagctgagaaaaaggcagtttttattccagagactgactataaaagctgttgatgggagggagaagggttgtgaatttgagaccagttacctgggttacagagtgggatattgtgcgtgtgtgcatatgcatgcacagacacacacgcacgcgcacacggacagacagacagacagatgtgactcagttggtggaatgcttgcttttgcttggtctccagccctgcatacaccaagcatggttctgcacttttgtgaccccagcacttgagaggtggagccttgagggcatgctcagctgcaatgctagttctagggcagcctgggcaaacagagccacactgtactgagggggtggggggcagggatgggaaatgaattattccaaacaaaacagcaggcttgtgtaattctgatagtgatggcaaacgtcctcgggctgtgcctgtgctgttttggagggcagggtcaggggttaggttggatattaaaatctcattcggaaatgaggtgcaagctacaaacagggccaaatgaatcatactgttgaggatgggccagtcaaagcgggtaaggtacggtgagttcgttgtaactctggctttgaagtgacttggactagggatccctcctacattttttttcttctaccgtcaagtagttcagaaagagtttatccttcaccaggctataggttgtaccttgatgtaggcaaaattaatcttaaaatgttaattcccgttccagaaatccagcaagctgagtgtcttagtgtcggtcttattacatcatttgagccaatcaatcttccccctcacaagtgtgcctgggggttgcctgtgaggtgattccagagcttgccaacttgacagtggatactaaccgtcactcgagcatgttagtgggcggggcgttttctgaagtgctgggttgtgatacctgatgtttagtttctttttttttttttattgtatgtgcatgtacacgcatgtgcatgaaggtgctctcaaaggccagagccatcagagctttccaagtagaagttcacaatggttgttagctgccaggaacaatcgtgctagaaactgaactctggtcctccgaaagcagtgtatatatactcttacctgctgggctgtctatccggctccaagggttttctatttcctttctggcctgtcagcctctagtatacagaatgttaatcttggctcttcactgtggtcttacccagcacactctttccaaactccagagtcattaaacagaaaggcaaatttaaaaaaacaaaacaaaacaaaaaaaaacccaaactcttcattatctcttaatggtgttactagcagaggtgggggagcatgcatgtgagtcagaggacaacatttggggtaggttctctccctccactatgatgggcctgggggttgttctccagcccttgccaccatctttgcatcgttccttagtagtagtcagtacctgttaggaaatgtcagtcctttaccccgtgacactcactacccagaaatctctcctttgcctgcctccagttcttaagcctgtgtgtgcttggccttctcgtccccatctcacgtgtccagctgtagaaatttaccacctgccttctctggcaacttactccttttgggatgaagcaggaaatagttgagagagtggcctgcggaacggggagagataagtgggcggacttgctgcttatcatatatacgtgctcggaaatgactagactttgcaactttatgtttataaaactttaatgaaaatgaatcagtttataggttattccatttttcattacacttatttacatttgggtgtgtgtctgtgtgtatgtacatatctatgttttcacatgtaccatcccatacatgtggcgatcagaggacaacctgtacctataagagtctccttctgcctaagttttgggggattattaggtgtggtggcaagtgcttatatctactcagccatctctctagctccagcttataactgcatgattccaggtgttcttatgaagaaatcgctaagagccctgagtccccctctcaggaccctctgttgcctggataattcatcatgaccttagctgggcagcctgcacccatgctctctcccttcctccaaagcacaggctgcctcagtttctgtcagacttttcctgtctagattttggtcctgagcaggacattgtagataccctggatggctgtgactggctgcccagaactgtcttgcttacactgagtagggatagacaacctgaatagaaatgagttcattgtctgctttgggttttcctacagcagtctgagctgtccgctgaagaaagtccagagaagttaggaacctcccagctgcatcagcggaaagtcatttccttgaataagcagattctgcagaagagcaaacatctggaagaggtgagtgtctttctacttccactccaggtagtgaccgttcttccaagagaggagaagttggtcaggagataccgaatgagagagagccttgtggtaaactggtcaaaggaggctctggtgcaggcatgctacaggcgtcagtccatctagctgcatgtacttttgtaaagtgtgtgtgtgtgtgtgtgtgtgtgtgtgtgtgtgtgtatgtgtgtggcaggtatgtgggggtacttgtgtatgggtgtgcatatgtgaacctgatggatatgtagacgccagccttccttgatcactgtccactttatttactgagacaaggcctctctgaaccgttttgactagtctagcaagctgttgccagggttattccttgtctctgcctcctaagctctggaattaaaggtaagctaccacactgacacctagcttttcacatgggttctagagagccagtcttcagttttcagccttgcatagtaggcgcttttcccctaagctctctgcatccccatgaataaagtttcactggaacagctaagcactcacctacttgcctgtttttctgtgattgctttcaagctactgtagcagagttgaacagtggtaacagagaccaaatggcccacagacataaactaggtactgcttggcccttgataggaaaggcttattaactcggatcacagaagtacagagcaaggcaggaaagatggattagcctccactggctctttttgcacttgcagaggacatgtattctaactcccatcacccacacttgctgctcacagctggctgtaacttcaggggcctgacaccctttattgcctctgcgggaacctgcatgtgtgcacaagcatgctagtgtgcccgtgcatacacacagacacacatgtgaaaatatacaggaccaaaatggtatttctttgctcatgtgtagtattgtgtatgttaaatgctaagcaaaattacagaagtgagtgaacagtgggccagggccttgcctgccaggaccctaaggtgtaatggagacttgcggtgaatgaaacagccatcacactgccactcagttacagttgcggtgacatggtaactgctaaggggaagtctgggatgctgggactaatagagctaatggagcccaaggtcatggctgactgcatctggagagataaatgggcactggctgaatggaaggcctgtgtggagctgttgaggagcctggtggggatgtataaagcaacgctggcaaaggcgaagggagggagagttggccggttcttttctgatggttgagaagttgagtgactgtgcaagcatcaggccctagtaagttcagttccccaggtccagatggaaagcctcggcattgctgtatgcacccataatcctcctcgtgccaaggccatgctccacgctggtttccgggtgtggcttattttctcttctctgcagcctaagacatagctcactggtagactgttggtcatgcatggaaccctagcttaactccctagcactggaataagtaaaagtggataaaaatgaaagtccttctgtgtaagtctgttttaagccgatctgggtttccactttctcattgtaaaagaggggtcccatcgaagtctgtactgagtaaaggactccattcaagcagatgtcctttttctctcactcacagctgcaagcgaatcataccagcctcaaagccaagtacagcgacaggaagaagacactgacagaggtaagcagacctcccccaccacacccccaacacacctgcactgtgacctcagggccctcagtcaccactcacatacatgctgatagcacatgacactcatgaagacagccccaaagccactccaggaaagctggacactagctggctgtcacattagcagcatgggctaccagctctagcgtatataggtgtatcacccacaagcctaccagtcacaactcagactccctagatggaagggtaattccctttgaacgagcactgtctttccagatctctgtgggcggccaaacattgtatctaaagtgtatattgctctgtagtatttctctagtcagaattcatttataaattggttcactgttttttacctgtgctccattgtttgtgtactctgggttttgtgttcatctggtttaatgtttcctctcgctatctctctatactactgtctattcttcccagtttcttggtctgttactgacaaaacccctgacaggaagcagcttgaggaggggaggcgttagtttggctggcagttcgaggatgtaatcagttgtggtagagaagttgagacagcaggaactgtctgagttgagcagctggtcacacctcacccagccaggcgacaggcagatgactgccagtgctcagctcaggttctcctctttctgtagtccaggtcaccagccttgggggtggtgcctcccacgtacagggtaggccttcccagctcagtgaacctcctgagaaactcacaggcttgcccagaggctaacctggcctggctaatccattacacgtgtgcccagagcttgtctcatgagtgattctagatcctggcaagttgacagtcagtattagccatcacgacagcttgcctccattgttctgcagaagggtgctgccttctgtgtggtagatcagctgacggtaagagctactcagagctgggaaacttcccattctctctgctgttgccagcaatctggggctctcagatgctctcctctgggtaacggtctgtcttcggtgctctgtcaacccagcctcgctcccctaatacaggccgtagccctacaagccattcttcccacctgtgctggctagcactccatacctgactcccgtctgttccctgtgagttaagccacctccgggttccagcatcatagcctggattatttggagacttggagtgagagggtttgatgagacacctgaccgcactactgccattttcagctagggatttttttaaacctgtgttttgtttgaatgagtcacatattcacacagttcacaaaaacctcacaaaacacaaaaagtgaatgcctgtaacccaccatctgtctactcactccagggtaataaaagcacagccagtattttctggatctttcaagaactgttttggttttatagcaattataccctacatacttgtgcacggtccctctttataattttgtttgtttgtttgtttgtttgtttagcgtgtgttgggggtgctgttaagtgtgccacagcacttatgtggaggtcagaggacaacttgtgggagttgattctcttccaccatgtggattccaggacctggagtcagattatcgggctgttactgagtcatctcatcagcccacatctgcgtactttatctgctttaggagtttgccatggtcatggttttatactttgctctctagatcattgtaaaaggtgtactttacaatagaaggggcggagagatggctcaggggtcaagtgcctgctgcataaagacctatctatgttcagaacctaattgtccaggtaagagcctggcacattgtggcacctgggaccccagcactggggctcactaggcagcgaggatagcgaaaccatgacttctatttcagtgagatatcaggtctcaaaaattaaggtagagaagcaaaactagacgaagacttctctgcatcagcctctgcctccacgtgcacaccaagcacaggcagtgtatccgtacacactcatataccatacacaaaagtatattgctgtacgttaacatctgcattttcttaaagatttgtttcattagtggattcagaaaaccatttgtcttgttagggtttctgttgctatgacaacactgtgatcaaaaagcaagttggggaggaaagggtttattgattttaatttgccattcatcagtgaaggaaattgggacaggaactcaaacagggcagggacctggaggcaggagctggtgcagaggctgtagaggagggctgcttactggcttgctcatcacagtttgcccagcccactttcttatagaaccatcaggccagagatggagccacccacaatgggcagggccctccctcattggtcactaattaagaaaattccctacaggcctgcttacagcctgatcttacagagacattttctcaactgaggctccttcctctgatgactccagcttgtgtcaagttgacacaaattcagccagtacaccactcaagaggctgggaagtttcagccctgccatactctcccactctctctcattcttcctttccccctctctcttccccctctgtgtgtgtgtgtgtgtgtgtgtttatacccacccgctttcctgctccaaggctgtttgttttccctcctctgtctgctgcactgtgaggtcatcaccagtgtctccaaagccggagcagcatttagtgggttttgactctgacctccctggcaccttccctctaacccatctgtctggcccatctattttctcagtgtgcaaccagatccagtgggctcagtcatctatccaaaatgagcgaggaagccgggtggttcgtggagcacaccctcctgtttgcttttaagtcttcatagctaatggtgaacctgctctctcttgcagttgaaggatcatggtgagaaactagacaaagagcaggcagccctggagaaattagaagccaaagccgacccaaggtaaggctttctgcatgtgccaccatctttttgaggaaactggctgcagtgtctgatgcttgttttgtctgatcaagggacagaatagccagaggtcatgggctggtgctccatttccattcagttaatgtcacgtgaccaacagggaccagcagtcaccttgatggtcactgagctatttgggctgcactgagccacccgcctctcttccagccctccctgtggtcagagctcttctggtgttctgactttaaaaacaatgagacaaggctgggggcttagtaggcaaggtgcttgctttttaagcatgagagtcttaagtttgatgtcccagatccagcctgcaaatgctgggcctggtggtatacccttttgatcctagagccagagaggcaaaggcaaggctcctgacactcgctggccaggcaggcaggctacttggcatgtttcaagccaccgagagcacaggaggaaccagcttctgcatggagaagagtgcttactgtgtatgaagcctgatgggccaggttcactcccacaagttgtcctcagactgccacacatgctgcatgagcacactcactcacacaagataaataattagatgtaaaaacaggtcttagttaaaagaaaatcagaggcttgcacctgaagaacaacagttgagattatcttctagcctacatacatgcatatgcacagacacatgcaattgcatgagcgtgcatgcacgcacacacacacgtgtacacatacatatacacacacaaacacacatttttttggtaccatgtttactctgagtactattaaataagtgatatatgaatacaatcaaagttccttgataattccagaattgacattctcactctagaatcctgtgaggtgtatccgtgtgtatgtgtttgtgtgtgtgtgtgtgtgtgtgtgtgtgtgtgtgtgtgtggcttgtctcctcatgggctctagggcccaagtgcatagtcagaaatggaaagtgtgaccatttgtcacagaaattaagaaggagctctgtgtattctcactgtggcttcagcagtgattcatgaagccacatcctaaaggtctgccctgtgccattgtctggtctctcctcagcatgctgcagaacctgagagcacttgtagccatgaatgaaagtctgaaaagccaggagcaggagtttaaggcacactgccgggtaagtgctgggtggtattggtaacaggcaggagggttcttggtttcccttccctgtgacgctgggacacactagccagtgcagtgtcaaaggctgacgtgggctttggaggtgactctgtagataaagtgatttccactcttgcaagcctgggagagttcttttccagaaaggtatgaacttgcaagtgagagcttttgtcttagcacaaactaatgagagaaatgtctgcaccaaatagttaaattgcacagacaaaatggctcaacaggtaatagtgcttgccaccaaggctaggagcctgacttcagtctctgggatgcacacagtagaaagaaaagaactgaatccataggttttcctctgacccctacacataggctaaggtgtgcaatgtgagcattagcacacacacacacacacgcacagacataaatgtaaaaacaagccgctgtggcttaaacagttaccctccagttggtggcttccctgagctttgtaaaggtttaccttgcttttgcaggaggagatggctcggctacaacaggaaattgagaccctgaaagctgagagagcaccaggtgagaaggtaagccttaaattagccctcagtgccatcagccactttctggctggtgtgtggaaggaacctccattcactccagatagagagggcactgctgggtcaaaggaagggttctaagtctggcgaaccaacacaatacgcttattggggtcagttacaggggcgagggtggctcacaggcaactccaaagggagtcctggtgacttaagggcagctgtgccatggagagccccactttagtcagtggttgacctcttatataacctggggagtgggagggtctcatgctcctcatcccagccactctatttaaagatggcaacagctaaggcaagcctggagtaaacagctctcagcaccaaccattaatccttttccaaaaagcactgccactttcctggagctgggcctataaatgtgtattccccagggttggagagatggctcactgggtgggagcatttgctgcacaagcatgagcacctgagttccaatcccctgcacctgtgtaaaaatccgagcttgaggcgctggagagatggcttcatgattaacagcacctactgcgtctctctgttcccattactgagaaaaggtgctgacctcatttccttactttcagatcatctctggtggagagccgcagggtgccctgacctccaccatgactcacaatgtaagtatctccttatccttgaggctggcattgtcccaagagaatgtgtcagcctcctttctgttcttgctttcccagtatcatctgctctgctgcctcctctgtatagtctgctctgctgcctcctctgtatagtctgctctgctgcctcctctgtatagtctgtgttgctgcctcctctgtatagtctgcgctgctgcctcctctgtatagtctgtgctgctgcctcctctgtatagtctgtgttgctgcctcctctatatagtctgcgctgctgcctcctctgtatagtctatgttgctgcctcctctgtatagtctgtgttgctgcctcctctgtatagtctgtgttgctgcctcctctgtatagtctgctctgctgcctcctctgtatagtctgtgttgctgcctcctctgtatagtctgctctgctccctcctctgtatagtctgcgttgctgcctcctctgtatagtctgcgctgctgcctcctctgtatagtctgtgttgctgcctcctctgtatagtctgtgttgctgcctcctctgtatagtctgtgttgctgcctcctctgtatagtctgcgctgctgcctcctctgtatagtctgcgctgctgcctcctctgtatagtctgcgttgctgcctcctctgtatagtctgtgttgctgcctcctctgtatagtctgtgttgctgcctcctctgtatagtctgcgctgctgcctcctctgtatagtctgtgttgctgcctcctctgtatagtctgtgttgctgcctcctctgtatagtctgcgctgctgcctcctctgtatagtctgtgctgctgcctcctctgtatagtctgtgttgctgcctcctctgtatagtctgtgttgctgcctcctctgtatagtctgctctgctgcttcctctgtatagtctgtgctgctgcctcctctgtatagtctgtgctgctgcctcctctgtatagtctgtgttgctgcctcctctgtatagtctgtgttgctgcctcctctgtatagtctgtgttgctgcctcctctgtatagtctgcgctgctgcctcctctgtatagtctgtgttgctgcctcctctgtatagtctgtgttgctgcctcctctgtatagtctgtgctgctgcctcctctgtatagtctgtgttgctgcctcctctgtatagtctgtgttgctgcctcctctgtatagtctgtgttgctgcctcctctgtatagtctgctctgctgcctcctctgtatagtctgtgttgctgcctcctctgtatactctgtgcagccactgcctcttctgctcggttccattttagacacttcactccttaactagaagacacctatgttgaccacatgagcctcaaagggcgaaagagtgatatagagggaaaactgccttctttgctattttatggcaggccactgctctagttggccatactgactgtatcaggtgtatccaacctacagctcaacagttatcaacttacataaaatattatgagggaattttttttgggggggacttgattgcatgttctcaagcacaaaagttgtaagggattatattgtgtcacatgtattataaataaatagacatatatatatatatatatatatatatatatatatatatattagcacaaccctatttatagaaataggcaaagagtcagacatagctcaaaggttatagactttccatggcatactctaagtttgccgaaccctgttatgggttaaaacagtacttatcacatgtaaagagaaaggaagaggataagcgggggaagcagggggcaccaagcagggccttctttaagggtggtcttcaaaacctgtaggagactggacaagggatataggtgatatctgttatatgtcatctatagctgagtcctgtgtaggaacctggatgcatgtgctctgtgtgttctcgtgcatgcgtgtcccttctgtaattttctctgagacaacagaccatccggccatttttctcgtgccttggtctggtgtagaggcacacctgtacattagctctgtccccaagggactttctgtagtgatgaaaatgcttgcataaggatcttcccacacatactgcatggctattggaattgagagactggtttctcttccttattatacttgatgcaagtttaaatgacacaaagggttaccagttataattttggatacctcaggtccagtcagaaacataaacaaaaaccagtgttagctgaaaacactaagatggagaacagactcttatgggagagttgtctcccttttgtagtagggtgttcgagatatgggggctgcaggagcccagaggaggctctcacttaacattgcatttaggggctggtgaggtggctcagcaggttgagtacttgtcctgcaagcctggtaacatgagttcaatcccctgaacccacataagatggaaggcgagaaccaactttacaaggtggtcatcttccctctacaattccttctgtggcacaaatatgctcccccacagtaacaatagatgattggtttcttctggaaagaagattggattcagccaggatcccaataaagggggaggtattaggatatgatgtggaggtatctctcaggtgtgaagtcctcaagttggtcgtttgagagaaggaactcaggctgagagaatatggttagatgttctcaactttcaaagacttcgtcagagaatggaagttccattctagataactctggctggcctgttgtcacttttaggaggacctggacagacggtacaacatggaaaaagagaagctgtacaagatccggttactacaggtgagtatccacaaggaccagggccgaatagatatgcctggctggtatgcatgtcctgtgactgatggagttataggtgtataagagctagcgtggccaggacctgctcactgctcccattgcaaccagacatgctatgatgtaaggagttgctggcagcaacacaagtgtctgttactttcagcattgctagttggagttgaactttaccctgcattcagagtaagtatgattggcatcacaattacaggagttctgcatgttccaagttctgttcccagaactcatgtcagttgcctcacggcccctgtacctctcatctgcagggcatgtgacaccatcttctgaactccacgggtacccacgcccaggcacacatgccctcacacaaacacatacaaatacagatcattaaaaaggtaaatacattttggtggaagcttaagagatggctcagcagttaggagcactggctgctcctccacgtgacccaggttcgattctcagcacccacgtggcagctcacaactatcagtcccagttctggggggtccagcaccctcttccgccttccaggggcactaggcacccacaggcatacatatacatgcaagcaaaacccccatacagcataaagtgataaaaaacaactttcagtaggttgtttctccaaaggcaagcctcaggtaggtcccagaagcaggattgaagttcaggtctacttactaactagagagttgagagcatagcttcacaaacggggtggggagatggtgaagccagctccaaacctaagcacagtcagtacttcgtttctgagtccgttttgtattgccagtgcctggctcatggagattcaaacccacaaatgacccttggccttgtattacatgtcggtttgggtcactttcttttcttttgtctgtgttcctgggaagctaagctttggtaggaatggccaaagggctccatgggcctatgagaggttattatcatctttctggctcttaattattttgtgagatatccatatcatattcaaatgagtcagatatgtccttgatataagagcactattcttacttttagtgtttcaagtgttatagctcaagctggcctcaaactgtatgtgtagcttgggctggccttgaacttctgataaacctgcctccctctcccaagtgctgggattatagatatgcaccaccatgcatgactacctttcaaatatttaaagatggcttctcagccttcagcaaaaccaagtgcaaatatttaaaggtacatagaattaatacaatctgggccctactgctgtttggagaccctgactgataatgtatcaggtcccagtaacaggaactggaagacttgccctctgggacctggttatttgaggaccaagatctgcacatatatgccaaactacaaggctgtttgtgtggggaatgcactactagggagaggctgagaccaaactagaagatacaaggaaaccaatggcttgctgagggcctggcctgggagaggcagcaggatctgtgagtggagggggcaggggaaagtgagggctgcatctcatggaatttggtgatgctggatgagaggaagagggagatcaaggttatgtggaggtcactgggaaacgggcggggacatgaatggcagtctgaagaaagtgtaagtaaaagctctgctggtctggactgggttctctggaagacagctcagcagtttaaaaagcatttgccttgcaagtgtgcggaccagagatcgcatcccttgaagccccataaattccaagtgcacctagtggcccacctggaattctaccctcagggagacaagaaggtctccagagcaagctggctagcaagagctccaggtgtgactgagagacagacccggcctcagtggatacggtggaagaatgacatagggtgatgcctgccatcaactttaggctgtcatgtgtacatgtgtatgtgtacacaaggccccccccacacacatacacacacatatgaacaccacgttgcacacatgaaaacttgagggggcagtaaccattaggtagcattgtgggaagaatgattggtgtcagctccaactcaaaagagtttgggctggaaaacagtctgtagtggggatggtaactaaggctgtgggcatgtgggcaagaccccaaactaaaccctagtgagcaatcaagcaagaacgagagagagagggtgatgggagaggcgctcaggctgctcacaggtgagcggacagcttgggttgccgtcaaacatcagtatgatagattttgctttattgtatttattgttgtcaggattggctttatctcttagaagcccgtttttttctaaggagagagagaaagggtgggtccagaggggagggggaataatcagtcgggatggattatttaagaaaataatctgagtccaatgtggcaagtggctgagaactgaaggatctagaaactcagattcctccattcacccatgccccagaaagcttccagagtgagacttttcctgtcaagacatgagaagcatactccagtgactgcagttagggaactcacggcgatcaaagtccttggtgaagcagtgagttcttactgcagttatttctgaccctacctttggtgaggactgacttacacagagcaggggtaactcaccaaaaagccctctgtaacacaagtgacaactcatgaaagtgcaaccctgaagcccctgtaccatttgcaggccgctagacaggtggcagtctccttgaagtggttgctaggcagcatcatggctggtcagtggcctctcccagcagttgtttgctgcttccttggggagggacccagtgagccttgtaaatttcccagatcatggtttgttttcttcctgagtctcctgagccctgggccacagtctaccccaattcttcctggcaggagtcttctaactgggagggaactgggatacagcatttgtcaagcagagagaggctgaggcttgaaggacggaggcactaagcaggcctggctgtcagggcaggaggctggaggctgaatggtggggagacagctcagcaaagacttgagcaaatgtaagtgctgatgaacagcgaatgttcacacgttgtccacaggcaccctcacacatgcaggacattctagaaacaaagacacagtcacaaagtatagcatgagtgctggtgtgagacagcccccagggtaaagatgtgtgctgtgcagggcacaggaccaggttcactttctctgcccattaaagaattagaaagcaggagagcaaggtcactagaaggctcggggagtccagcagagccatcgtgtgatgctagggaaaatggagttttctcgtggggtacttggcttcattaataaaagaaattatgaacagactcaaacagaagctcaaggacaatttattaattagagtttaaaaggcaaaccccaaggcaggcgggctgtgaatcagagttgcccaggaggagagtgaagataaacgtggaggcacacagtagggagggagctcagaaaatgagcgaaaggccaagggcattcgtttgcgattttaaaagtgtagtcaggctcttgccagcattacaaaggaaaggacaaagaaaagaaaaccaaccgagtagttaacactcttctgagccttgactcaggaaggcaggcagtcccctggcctggtccctgtcctgtcttgctggactaacccttaagggagcagacaagggcatgtctccacctagaggtggattccgtcctttacagccaagcttgattcctggacccacatggtgggaggggagaacgcccacaaattgtcctctgagttctaccacccattgtggcatatgccaggaagtaagcaagcaagcaagcacatgcagctttacacactttaaacatcagatggttgtaccttaagattcccatgaagaaactcgaggtcagccccgccactcagaaggagagagatgagagagaggctgctgagagagaagcaagaccccggactggtagggcacagacaggaagaacgaaggctcaagaaaatggcagtgctcagcccaggtcctgagatctgcatatagccgtggtgtggaagctaagtggtgtggtcctcatgaaacatcctgctgcctcctaaatacctgacaggacagtctggtccctttgaaaggctttgagaaactagtaggcttctaagtagaggaattcagaatacattttggataggcagcaggatggcacctgtcatctgggactccttacactgcctgtcctctggtcagtcacgattccatgtgaggacctcaggccagtacaggaatgtgtgtctttgtggctggctcagctgtgaggagcagacaaatatagcctttgaccaagtgttctctcctgtccctttgcatttaggcacgaagaaatcgagaaatagcaattttgcatcgcaagattgacgaagtgcccagtcgagcagagctgatacagtatcagaagcgatttattgaactctaccgtcagagtaggtgcattgatcaaacacacagactcttgggctttgtgagggatgggagggaaggggcttcgtgcagtttagcgcaatgtagcattggtcagagcgcagtccacaagggccacattgaaaaggaccttacgggggctggcaagatggctcagcagttaagagcactgactgctcttccagaggtcctgagttcaaatcccagcaaccacatggtggctcacagccatctgtaacgaaatctaatgccctcttctggagtatctgaggacagctacagtgtacttacataattaaatgaataaatctttaaaaaagaaaaaaagaaaaggaccttacttcatctctgggcttgctgaacagccctgggagatgactcgtggtctctgtttgctctgtagatggactcgggaccttgagagccagcactggccagctctcatggtggttagccgcgtgcagtcacctgagccccctcttctttccagcttcttgtgaagcatccccaccccagcatctcctggtggcccgtggtcgtgctccacagagtctcactagcgttgctttagagcatcgtgttctctccataatccaggacctgcctcacctcagcctactgcacagtcactgcagcatatcaggctcaaagcttaaaaaatattaatattctgtatatattaattaatgctggaaattaatacagtggcagttattctgagaccttttaatatttcttagctaggcagactctcgcttagctcatttaagttaacctgaccacctagccccatccagtcacatgactagctatacctttcagacccgtcggcacatgtgactttcttcttcacagagttcctttccccctcccaagaagtcccaccttcctctctctcttctgcccagtcacaggctttagccttttattggccaattaacttagggagcaaggtttacacaacaaaagctggtatacatgagaatttggtcatcttgggggcagccatatcttggggtacagaccaaccccaacagaaagccactctcagggtcaaggaagatggtccctctaattaaagtgctgcttgacaggattgaggccctgaatttgatctcaagcacaagaaacatattgttgttgtttgtttgtctatttttaaaggctggcaatatggctcagttgtttagtgtatatgtttgcagaggacccaggttaaattcctagcagccacatgacagctcacagatgcccataactccagttccaggagatccaacacccaccatgggtcccaggcacacatgttgtgcatatacattcatgctggcaaagcaaccatacatgttttttaataggccaggtgtaggtacacacactggagacagctagatccctgaggcgcactgaacacccagacgagcttagtaagtgagctctgggttcactgaaagagcttgtctcaaaagataaggtgaagagggattcagaaagatagccactgccgacctctgacctctgaatgcacatgtgcacacgtacaagcacacatgcacagagacacaggcttccgtgacgactaagtgtgcatatagccctgggcacatgccgcatggggttgcgatgctgtggttcactgatgctctgacatgatgctgatctctctgtattggcagtttccgcagtgcacaaggaaaccaagcagttcttcactttgtacaataccctggatgacaaaaaggtttacctggagaaggaggtaagagcctttgtctgcttatttctttcttttcgtattccatttaaaattttactgtggaggggaggcgttgtgcatatgtggaggtcagagcacagctagtgggacttggttctctccttacaccgtgtgagctccaggaacagaactcaggtcttcaggcttagcggcaagcacctttgtacttaagacttcacactggcctgaggaagagcctttatggaaagaagataacttagatgagccactgacagcatggtagctccagaagattcagatggacctagagcctgagacggagtgtctagtagaagtagagagtgactgccttcctgtgccaagcactggggactgtcactgcaaagcagtgggagctctctgcagtgaactaaagctggtgtttacccattctgtagtatcatgtgagaaacaccagcttgaggtgctgggaagatggctcagtacgtaaagtgcttgccttccagacacgagggcctgacttcaatggccagaacccacattaaaaaaacaaaacacaacaccaccaaaacctggcatggtactgtgcttgtaatgccaggactgggtgggcagagacagatagaccactggggaccgctgccctaaccccagcctagcctcctggatgagcttggatcagtgatagaccctgtcttaaagagcaaggtggacagcctcatgaggaatggcagctgaggttgtcttctggcttccacacgcaagtgcacattcaaacgcaaagtccagggatagtaactgcttacagatgagccaacaggtatatggagtacagccaggggacctgcagacagagcccttcccagcatgtctcacaaggtcagatggatgctctagctctgagggcaggggcagtttccatggaaacaggaccatgaagattgtgttttatcagaaactctcaggaccactcagcagctggccaagatggtgactcagtgtgggagtggagcagtggagaataggcactatcttctctgtctccaccctactggcccaccctggactgatagcctcaaaagagagtgatgtttgggaagaccaattgatccctgctggcagtttgtccaaaaagtcctgccactagagtcccctttaaaaagccatctttcctcattctcgttgtcatgcattctagggaaaaatgattttctttaagtagatgggtcgattctctgaggaaaactatgcagggaagaacatgctgttctttcctttgttctgtcgagtgtcactttgacctgctcgacaagatgtgtctccccttcagtggcatcgtcccagcccaaggcaaactctcccgcaaggatcagaatagtgcggggaccttttagctttctacttacatggttccttttcactcccccagattagcctgctgaactctattcacgagaacttctcacagtaagtactggctgccctcctccccggctgccctcctggtctggctgaggagtgactgggaatgtggtgtgcacacaaggtctggcactgggacatgagtcttactttccctatccactaagggtaaacatgccttagtggaaaggtctgcaaattgcagtgctacgggtaaagagcctgacttgctccgtcccagagccctcagaaggaaaatcaagtgtagtgtcatgactgtagtcccagagctgggggactggagacaggcggatccctagggttcagggtccagccaacctattctacttggtagcttccaggccattgagatagcctaggggagacttaaggccccagagagtggggaggtctgagggggagggggctgtcctctgggagatgggagaggaggtatgggatgaggaacagtcagagggcagaccaggagggggataaaagcaggactgtgaaaaaggattaaaggggggggggaaaggtaccttctaccttcctgaggaacaattctttaaggtctattttgtcaattaacattcatcctccacactggggatttagctcagaggtgagtgcttgtgtagactcatgaagccctgggctcagttccccagcactgcataaactgacttcttggtgtatgcatgggattccagcacttgggagggaagataggagaatcaagagttgtttaaggtcactttgactacaaaaattttttcaagtctagcctaggctacatgagattctaccataaaataaattgtataggaagaccatctgtataagtcagatagcaagggaaccaagcaatactagctctggagtgtgttcatggtaagctagccttacccaccttgctggcatcccaaggctcgctcccagaatagcatgcttccttttgctagcacaagcctctgctggcccctgacagctgactagaaacattttaaagccaagttcatgggctctagactttttacatctttttttttttttaaacacagtagggctaagccgttctccattgagcctgaagctgaattcaatctgcaagacccatggctcacacacatgcaaacacacacaggcagacagacagacagacagacacacacacacacacacacacacacacacacacacacacacacacacagtgtttgtaaaacaaaattctaaaggtttgaatttaccaaatgaagactcaggagccagacgccatggtgaaagcctgctagcccagagaggcagagaaagcacccagctgaccttcctcctcaactgatagaccagaaggaaaaaacctgttctccatccaactgcatgtccctcctttctacttcctgtgtgtctctctatccatcctcctgacttcctctcactctctatggtttgttttccctttatttactccctgtcagctgggtgcttgctccacctctccacctatggttgacttttttcagtctcatttacagtaaacagaaagctcttggattaacggtgtgtgataggactgagccacaccataacaagaaatagttctttccagtaaacaatctcggggttctcagtatgatcagatatgctgcaacggacatcacacacacacacacacacacacacacacacacacacacacacacacacactcacacacactctctctcacacacacactcactgggaggttcgggggtggcacctgcctttgtgtcctgttgcccctgtcagactggagggctgaattcctgataaccacagcagagttctgctctgtcagcccactctctgaatagttctccacctgtgagtgccaagctctgagccttctggcttccgtccctctgcgaaactgggtatgggtaggaaggtatagcaggcacaccaggaaatctaccccttctactgcccccagcaaagttccggattctcagctcagatctgggagtactcagaacatgtgctctaatcccaggcaatgtccccctgtcctcggagtcttaaaaaacaaaactaagttaatttcttttttttttttaactaagttaatttcttaagtggtacatgccatagtttgtggaaaatggcattcatattctttttattcacatttgatgttgaggaaatatagtttggttgaaagttacaaggaagaagctgagcgatcctcggaaggcagcactttgaagttgcctgtgtgcgtaccgtagcactgctgaaagagtacacacatgcctgtccagattagaggagcagcgtgttctcacctgcgtagttttcctcagaatccctttccgtctagtcagagatgttccttacgcagcccattgccacaggaacgcagagaacaggattcacattcggttatcaatcagatcagaggtttggaatcctgactgcttggtattcttggtggctccctcaacccactgtgccctgcaaaggtctagttgactgttgtgacacattctaggtacagggctgactccttggtgtcccccacccccttcctaactgaacaacgtgctggacctacctctgctgatttttctttcagagccatggcctcccctgctgcccgggaccagtttttaaggcagatggaacagatcgtcgaaggcattaaacaaagcaggatgaaggtcagcaggcttcctttacagcagtacagagagtgtggtgaggagtcctgggcagaggctcttcatccagagagcatcctgcattgccacaccagccatgagacctggtggggtaggcctccacattgctactggttatagctcccaggcaccgagcactcctctgcgtcagatactgtgctgctcccccatattaagtgagcggtactgcccctgccttacagataaagaactgttcctcccagcagccctcctctcttgtctagccacctctccctgggcatttatctcatgacatgtcacagggtgtggtgcttaggatcttgatgctggggagagaacctggcacttagtggccagccagcctaacctgcttagccagttctagaccagatagagaccgggtctcaaaaagacaaggtgaggaataacagccaagtttatcccctggccttacttacacacacgcacatagacacatgcacatatatacatgcaggctgaacctgctctatacatgagcattttctgccttcatctcctggctggctgaccctacatttagcttcagaaaataactgcacatagcacctggttctgtgagttgcccctcctttcagccctctgcatcacagagtccacatgcctttaccatctccaactccattctgttttcctcaacactgatgctgctgatcactctaatgcgcatttgttcactcttcagacacttggctggttagttggttggttggttgactggtttggtttggtactgatctccagggatgtgtcctgtgagaacaaagactttacttgttcactgctaaccttaggtctctgtaggtgttccattactctttaccaagtgtacagaggatccgagcttagtccctagagccctgagaaaatacttagtgtagtggtgctggtgcatgcttgtagtccctgtgctgaggactggaacatagaaacatccctggagcttgatggccagccagtctgggggtatttggcaagtttcaggccagtgagaacccttgtctctataacaggatgggccaactaggtggcttactgggtagaggcactgtaagacccccgaagctggacctcccgggatgagctggccagcaccccaatgactcgagagaaaaccacacctgatgcaaactgcaagaggttttattatcagctagctgaggacgaactccttccaccgtgcagggcaggggagttcgaccccaagcggtgacagtagggggcttttaacagcttgctgaggaattgggaggagttgggaggagtgttcttctctgcctgggtgtccttggtaaaattacaattatctggatgtaaggctcagaaacaaaaaggctttttgctagctatagagaacaaaaagcttctttctggctgtattcttagagatcagggaaaacaagcttgggggaatgtctaggggctttaccttctagggagaaacactctaagtcggggtctcacagcacatgacagaaggagaaaatcagctcccacaggtcttcctccagcttgtggctaccacagaaaatctcttaaagtcaacattttagtgtctgtgtataagatcagtatcctggaaacactctataacagtttagatagctatagatagcttacactatggcacagttaataaatgaaaggtagtaagctatgctattataaacacaatatatacaacagggctactcacacaattgacatcctgggctagatatccctttgccttatggccgtcctgaaccctttagggtggtgagcagcctctccttgccagtgacaccaacaactctccttctttggagttgtgacactccaaaccccttgcagatactcacaagtaccctctagagacaaagtggtccacagtcaagaatcctccccaaaatgcatgctgttcatctggcgttctgtaaatagcgaactgctgattagattatagagcctgcagatgatttcattcagaaaggaaacaggacaacccgaggaaatatgtttagaagaaaccgatacaaacgttaatcatggctgcctgttgtggccctgtcagaatgcctcttcctccaccaccatttcttcaaatgtttccaacagatggaaaagaagaagcaggagaacaagatgaggagggaccagttgaacgatcagtacttggagctcctggaaaagcagaggctctacttcaagactgtgaaagagttcaaagaggtgagcggatgtggtgtgggccgaaatcaaatgcatgttcagctcacctcaaggtgcccctaagcctggagctggggctgctgagatggctttgccaggaaggtcgtgctgtaaaatcgggagtacttgagtttgatcctcagaactaacaagaggaaaataaaaaataaaaaaacaacgggatggtgcccacttgagtcccagctctggggaggagggggaggctggaggacctctgggcttcttggccaacccacccagcctactacagcatgagcaagatggcttagcgagtaaaggtgctttctaccaagcttgatgactgggtccaatacccagtacccacatggtagaaagggagacccaagccccacaagttcccctctgacctctgtggcaggcatatatgtacacacaaagtagataaatagaaatacaattttaaaaagaagcaaggtagagcatgcctgaagaacagcagctaagcctgacttctgccctccataggcacacatgcatatgtgtgcatgagcatacacacacacacacacacacacacacacacacacacacacacacacgaacgaataaaaagagaatgtcccatgccaatggttttgttctgatttagttttgaagattatgctgtcttccaccttctctggctgctctgccctctgttttgtgatctaacatttggcagccatatgcatgcctacaggcatggcagcaagtctcctcttttcaaatgttctcccagctctgactgcctgtggcgtaaaccaggttggaaaacagacccggtctctgtcctcaaggagcttcactgtggtgaaggagacagatgagaagctaagaacaaatgaacagaagaggaaattaaaaaaaagatttaatagtttcaaacttatgtgtagggagacagagcttgtcagatgttgttgtcagagcaggctccacaggctgagccagtctctgctgtggggagagcaagaacacatcagggagcaaccaaggccccgaggcacggggagagcccagcgactgatgtggagtccatatgtaatacacacgtgtgtgtaagtgcgtgcccatgagtgtctttgcagagaccagaggaggatactggtgtctgctctgtcacccctcagctatattctcttgagacgagatcacactgggtttaggctgacagccagaaagtcccaccaacctttctgcctctgtctcgcagcatcagggttacaggcatatgcagaatcatgccaagctttctatgtgggtgatggggattcaaactcaggtccgcatacttgctcagcaggcacctttacccgctgagccacctcccctgcctcagctgtcttttggctagagacattaagatgctttgggaaaggcctggggctgttggaggtttgctaacagacgccgtgtgagctgtcaggtgaggagctctagagtttgccacgggaatgggattcagaaaggtaactggatctcaggacgctgggcaccattggcagggagtggggccagtgacattcctcaatgataaccctcaacaagcttagtcacggagctcaaatacccactattggagaaaggagtacccttcatagacacttctcattgcgccttcttaagactgagactgcttgtcatcttcgctcctagaacctctcaatgtgtcatctaaaactctgtctcaagtctcaaaaagagcaaaaaaaaaaaaacaaaacaaaccaaccacaacaaaaaagcagttaccaagactggggaaaggctgggccccttccgagacccccacatgagtaccagtgactaaccatctttgcgtctctcttactctgcttttctaggagggccgaaagaatgagctattactatctaagatcaaagccaaggcctcctgaaaactccatctccgtttctggatgtccctgatatttttttaatgacgtgtatagactacaggatcttgacatggttctgccggtgatggcagagagacccaggaaaattcatttcagttctctagacggatgttgtctttctcctacttgtttcatttcgtctctcctggctgcggctgatggactcagagccctacaaagaaccgtgggcagtgtggatgacactcagagccccataggcagtgcccactcactctgaccactcaacttccatttcttcagtgacactgcatttatgaaggtaccggatgtgtgcgggccctgagaataaagagcattatgttc

SEQ ID NO: 500 - DNA, 2357 bp, Mus musculus
ttctctgacctgctgtggtagtgtcagctcctgtgaaggaagtttccgctttgcaccccacccggatcacagttcggttgtagggcccgctctctccggctccacatcagcgcatctggatcatggggttacccaaggggccagagggccagggactcccggaggtggagacgagagaagacgaagaacagaatgtcaagctgactgaaatcctggagctcttggtcgcagctggctatttcagagcaagaattaaaggcttgtctcctttcgacaaggtagtaggaggaatgacgtggtgtatcaccacatgcagctttgatgtggacgtggatttgctctttcaagaaaactctacaatcggtcagaaaattgctctatcggaaaagattgtctccgtcctcccaaggatgaagtgtccccaccagctggagccccaccagatccagggcatggattttatccacatattccctgtcgtgcagtggctggtgaaacgagctatcgaaacaaaggaagagatgggagactacatccgctcctactccatctctcagttccagaagacctacagcctcccggaggatgatgacttcataaagagaaaagacaaggccgtcaagacggtcgttggcctctcggatgcttacaagccccggcgaaagtaccgacggcagcggggagcagaggagctgctggacgaagagtcccgagtccactccacacttctggaatatggcaggagatacggatttagtcgccagagcaaaacagagaaggctgaggacaagaaaacagcacttgctgcagggctgtcagctgcagagaaagtggatgctcacgaggaagatgagcttcaggcagccgaagagcagcgtattcagtcactgatgaccaagatgaccgccatggcaaacgaggagagccgtctcaccgcaagctccgtgggccagatcgtgggtctctgctctgaggagatcaagcagattgtgtctgagtacgcagggaagcagtctgagctgtccgctgaagaaagtccagagaagttaggaacctcccagctgcatcagcggaaagtcatttccttgaataagcagattctgcagaagagcaaacatctggaagagctgcaagcgaatcataccagcctcaaagccaagtacagcgacaggaagaagacactgacagagttgaaggatcatggtgagaaactagacaaagagcaggcagccctggagaaattagaagccaaagccgacccaagcatgctgcagaacctgagagcacttgtagccatgaatgaaagtctgaaaagccaggagcaggagtttaaggcacactgccgggaggagatggctcggctacaacaggaaattgagaccctgaaagctgagagagcaccaggtgagaagatcatctctggtggagagccgcagggtgccctgacctccaccatgactcacaatgaggacctggacagacggtacaacatggaaaaagagaagctgtacaagatccggttactacaggcacgaagaaatcgagaaatagcaattttgcatcgcaagattgacgaagtgcccagtcgagcagagctgatacagtatcagaagcgatttattgaactctaccgtcagatttccgcagtgcacaaggaaaccaagcagttcttcactttgtacaataccctggatgacaaaaaggtttacctggagaaggagattagcctgctgaactctattcacgagaacttctcacaagccatggcctcccctgctgcccgggaccagtttttaaggcagatggaacagatcgtcgaaggcattaaacaaagcaggatgaagatggaaaagaagaagcaggagaacaagatgaggagggaccagttgaacgatcagtacttggagctcctggaaaagcagaggctctacttcaagactgtgaaagagttcaaagaggagggccgaaagaatgagctattactatctaagatcaaagccaaggcctcctgaaaactccatctccgtttctggatgtccctgatatttttttaatgacgtgtatagactacaggatcttgacatggttctgccggtgatggcagagagacccaggaaaattcatttcagttctctagacggatgttgtctttctcctacttgtttcatttcgtctctcctggctgcggctgatggactcagagccctacaaagaaccgtgggcagtgtggatgacactcagagccccataggcagtgcccactcactctgaccactcaacttccatttcttcagtgacactgcatttatgaaggtaccggatgtgtgcgggccctgagaataaagagcattatgttc

SEQ ID NO: 501 - protein, 623 aa, Mus musculus
MGLPKGPEGQGLPEVETREDEEQNVKLTEILLVAAGYFRARIKGLSPFDKVVGGMTWCITTCSFDVDVDLLFQENSTIGQKIALSEKIVSVLPRMKCPHQLEPHQIQGMDFIHIFPVVQWLVKRAIETKEEMGDYIRSYSISQFQKTYSLPEDDDFIKRKDKAVKTVVGLSDAYKPRRKYRRQRGAEELLDEESRVHSTLLEYGRRYGFSRQSKTEKAEDKKTAAGLSAAEKVDAHEEDELQAAEEQRIQSLMTKMTAMANEESRLTASSVGQIVGLCSEEIKQIVSEYAGKQSELSAEESPEKLGTSQLHQRKVISLNKQILQKSKHLEELQANHTSLKAKYSDRKKTLTELKDHGEKLDKEQAALEKLEAKADPSMLQNLRALVAMNESLKSQEQEFKAHCREEMARLQQEIETLKAERAPGEKIISGGEPQGALTSTMTHNEDLDRRYNMEKEKLYKIRLLQARRNREIAILHRKIDEVPSRAELIQYQKRFIELYRQISAVHKETKQFFTLYNTLDDKKVYLEKEISLLNSIHENFSQAMDAARDQFLRQMEQIVEGIKQSRMKMEKKKQENKMRRDQLNDQYLELLEKQRLYFKTVKEFKEEGRKNELLLSKIKAKAS

SEQ ID NO: 502 - DNA, 118619 bp, Homo sapiens
cagccttgcaacttctcttaattaaaactctggttaaaggaataattattgtttcatagtggcctgtgatcctacttttgatcaagtgttttgaaagtttattttcgacaaacttcctaaaatcaaattataaaattaagtccttttgaccttgaaccagctgttggacagcccagagggcccctggaaatgcaaaagagagatattaaacagattaaacagcttatttgattccttaaattacatgagaaactttgtcaaataagaaatggaatttaaccttcttcgagttatatttgtatgtctttaaggaggttcataataaggatagaaagaaccctggcaagtacaggtttctgataactttaaggtttttttttttttttttaataccattggactgggtaagaatttctagaactctaatgagactgatgggtttgtgaaactgctaaccaagatcaaacagaacaaaaatttattacatgagactgaatgaactgacaagaaagaataatggggcttaatggcgttttaaaaagggagtatttctgattcttttaatgtttcattatcccgatttaagggaactttttttctttcttttttttttttttttttttgtgagacggagtctcgctctgtcgcccaggctggagtgcagtggcgctgtctcggctcactgcaagctccgcctcccgggttcacgccattctcctgcctcagcctcccgagtagctgggactacaggcgcccgccaccatacctggctgattttttgtacttctagtagagatggggtttcaccgtgttagccaggatggtctcgatctcctgacctcgcgatccacccgcctcggcctcccaaagtgctgggattacaggcgtcagccaccgcacccagcaagggaactttttttcttttaagctaactataacttatagcaatttgctaatgcatacttttgtaaacaaaaattgaaacatttgcttttgttccctacctgatccctccaaaactcaggaaataattcatgggtatccttatttttgtttatgatgatatggttatttgcataaattcaacaagaatctgttctctttaacatgatacaactgaaaacattgactatattatcaaagctttgactggaatgtcatatttgaaaacatgcatagagagtctggctttaagggcaaagtctgatgtctgcattggtttgacttcctagcatcgagaggttttaaaaagtccagtttaggccgggcgcggtggctcacgcctgtaatcccagcactttgggaggccgaggcgggcggatcacgaggtcaggagatcgagaccatcctggctaacacggtgaaacctcgtctctacaaaaaatgcaaaaaaaaaaaaaaaaattagccaggcgtggtgacgggcgcctgtagtcccagctactaaggaggctgaggcaagagaatggcgtgaacccaggaggcggagcttgcagtgagccaagatcacgccactgccctccagcctggggtacagagcgagacttcatctcaaaaaaaaaaaaaaaaaaaaaagtccagcctaagatttcttgtcaaaattatcatcaagcaaatttaaaaggagcctatatggttattcttgctgtacttatacaaataattaggccaagtttgagactaaacttattttagaaacaaattggtgttactgtgattatttttagtagaagtggggatgacaatagagagaaaaattaggtttcagaagaaaaccatagtacacttgttgttagatcatagccctgttcattgttttcaagtttttgttatttatttaggattggatcttaaattcctctagtttacttcaatatcttgctacaactctccaaacaagaacaaaaactgctaagctggacaatttgacataagtttcagggataaagtctcatgcctgatgtgtagatcacatggagagctcaccagaatgcccaatgccacaacccaaggagggaatcatgggaaccctggtttatagtcagtgggccagaagctgaggtcaaaatctgagtttgtaattggcatgtgaaatggggtcaggctcctgggactgagccctcacctatcctgagctctcaacccaactttacctggctgtctccaagtaagtaggatcagaataacaggacacctagctggtgtttgctgcagagttgcttggttggcatgtggagaaaaccccccacacatctggtgtcagaagtactctgtgattgtgagtagagagtagggaaacatgcttaggtttttcccatatatatatccacacaaatatatgtgtgaatcttagtataattcttttcatcttatttgatttcaggataatgaaagttgtattcttattgctatttattaacaggaagtctctgattaatccagaaaacagtattttttggtctctcttctaaagtaattttcattttctctcatttagttttcacatgaaagcttgatagaactataattccaaggatactgttatgtaaatgcaggctatttagaagtgaaattcctgagtcaattgtttcctttcatttctagacagtgtaaggatagtacttgagttggtgctattaaccccctccccaaaatgtgaatggtagtagggattctttgtgggcagtcctgccactggagacatttgaaactcaaattccatttctatagatcaaaggctaaatcacaccagtggtaaaactaatatgtttacaaaacaaattttgatttaaacaaaccaacaaaattccctttgatggctctcattgcacttaggtaaaatccaatcccctcctggtggtccccaaggtcctgatggggccagaccatccagttggcacctagttagtgctcctgctccaacccctcaggtgcaagctcctccctattcatggccccctctctgttggaaacctttatcccgctccaggtctaaccctctttcatctcaagtcttacatgttgtatccctggagaaactttcattaacttcccactcaaaactgttactcctgttcctctttttcatcccacttttcaactcattattaaaggcacttatttcaacatgcgtcatgtcatctgtgctgtgatgattggttgactgtgcatgctcatcccagagctctgttctctttcttttctgtatccagcatttttcagacagagggttgggcatgcttatggcatctgggggaacaattctttgtacagtttataaggttatgcatgataatgatgcttaacaaataacccccaaacctcattggtcacaaccaacactgatatctcactcgtgggcttggtactcggctgggcttggggctcaggtctgctctggtctctcactggtgtttcttgcttgagggcccaggtggagggaggtatggttgcctgagtatgcggtctcctggtgaatggcttgagcttaggagagtgagggaacacagaatggttcttgacacctcacccagaactggcacaatctcctatctgcttacatttctctggtcaaagaaatttttatgacctaaaatcaatgcaggaagtttgatgtctttaacaactgggtgctaaatgttggtaatgcctctgctgtggtgggaatgtttgggttaccccaaaatctatatgttgaaatcctgactcccacaaggtgatagtattagaagatgggaggtgattagggctctaccataatgaataggattgtgctcttataaaagaggccttacagaggctcctcacccttctaccgtgtaaggtgacaatgagaagctgtacatccataagaaatgggacctcgccagacattatatttggcggtgccttgaccttggacttcccagcctccagaagtgaggaaaataaaatttttgtagtttataagccactctatagtattttgttatagcagcctaaaaagactaagacaatctcccatgctctgtgaaaactccagactgctccttggtcctgaatctctaccctcacccacattgagagcccttctctgtacctggcacagaagaggcacagaatgaatatttggtgaaaaattaactttgccaaactgccgtccaagaactgttgtaaaaccttactgactagggaatgctactggcatttgtttagtgtcttttaagcattaattattttttccatgcaaaaagataccacattttaaccttttagaataaggctgagtttttttttttttttcagacatttagtgacaatttcttttagaaattctctattcaagtcttatgctcatttttctgttaaatgtttcttcctcatttggaagaattcttgtcacaggtaacaaatatttttccagtttgccttttaaatgttgtaataattttttgacaggcagacattgttaacatttatacagcctcatctctcactgtttttgttcatggcctgctgaagcacacattttcactatatcaaatggacagactataatgtacctaaccagtcccttattatgggctatttagatggtttataggttttttttctcatcagtaacattgtgatgaagatctgatataagccctgaaagtggaagtatcatatcaaagaaaatttttaagttcttaatatattttgtcaaattactattgaaatcttacttcctagtccctataactcagttcccccaaaccccaggactcacatcccagacaccccttcatcccaagacccacatcccagatcctcataccccaggccctgctgctgaagtccttactggtcagccttgtgctgaaacaaacaaggagaggactgagagcaggactggaagggtaatgggaaactgtccagaacacctcagatgctccttctgccagcaatgctttcccctgaggcccttctatggtgtccttttgggatttaggtctctctcaaatggcactgcaaagcctaatcctggccccttcatctaaaagtgactctgactctagctattctttattgcattacactggttttttttaattgttgttgttgtagttgtcattgcttgttttttggtttttgttttttttgttgttgttgttgttaattgtagagacaggtttttgccatgtttcccaggctggtcttgaactcctgggctcaagcaatctgcctgcctcagcctcccaaagtgctgggattacaggtgtgagccaccacacccaaactacactgtttttcccccctttaatagcacctatttctacctgatattatcttattaattacatgtttaatttctgtcagtaattatcttgtttggtgtgttgactgcagtatctgcagcatcaggaacagtttctggcacagagaaactcttctcaaattgactgcttattggaatcacctgtgaagctttgacaatcccattacctacccccgaccaaaagaaagaattgtttagttattaaatcactttaccaaaaaatgtaaatattattttctccaggagatagagaatgtagcagatattctcaaacatgtttatttactactgtgtagttggccccttgttgaatcctttttaatgtagctaatagagtgtggttgtacaaactatgaaagttattgaaattctttgataaaactatcatttttgggggaaaacgtattggaagaactcatccaagtgtgtgtgtgtacacgctgtgtttttctaaccttcagtccagaagtagaaggggtttaaatctgcttgcactgcctgtgcctccattatgttactgtagaaatgtgacatgctaaatataggatggtgcattataaaattgtaccgcttgagaatagaccagcatgccattaagaatttttaggaagaactcatttaacctaagagctctttgtttatggattttgaattttatatgccactgtgatctataaagaaacaaatccataatgaagtcactattcactactgtgttgtatataaaacaatatgttccaaggcaaaaaattcaatattcatgcctctccctagcccaattaaatcaggattgctaagggtggaatccaggtgattccaatgtgcagccaagtttgagagctactgacatagaagaaactcagcaatatttgttggatggatggatggatggatggatggttggatgggtgagcaaaagaacatggggaatgagaaatttggggctctggttctagcactccctctaatgtgctgtgtgacctcgctgtgtcactctactttactgaacacccattgttgcactacatgtagaaggaatgagagaagcctgaagacagaataattaaagctttatagaaaacttccggctgggagcggtggctcacgcctggaatcctagcactttggaaggccgaggtgggcggatcacgaggtcaggagatcgagaccatcctggctaacacggtgaaaccccgcctctagtagaaatacaaaaaattagccgggcgtggtggtgggcgcctgtagtcccagctactcgggaggctgaggcaggagaatggtgtgaacccgggaggcggagcttgcagtgagccgagatcgcaccactgcactccagcctgggtgacagagcgagactccgtctcaaaaaaaaaaaaaaagaaaaaaaagaaagaaaacttcctccagaacaaagctaagcctaacaggaagctctttactatgtgtattaggccattctcccattgctataaagaaatacctgagactgggtaatttataaagaagaggtttaattaactcacagttctacaggctttacagaaagcatggcgccggcatctgcttggcttctggggaggctttaggaagattacaatcatggtggaaggtgaaaggagagcaggcatgtcacatggtgaaagcaagagctagagaggataagtgccacacttttaaacagccagatctcgtgatgagtgactcagtgtcaggaagacagcaccaagaggatgttgctaaaccattcacgagaaatccaccccaacgagccaatcacctcccaccaggccccacctccaacactggctattacattttgacatgagatctgggtgggacaaatatccaaactatatcactatggtacctctttacccacgaactggaaagtatttgtgaggctccaaagaggaacatcacacaactctgtactcagtgtacagaagagagacagaatgactgatttctagtcctcagatatcacacttgggagacacaatttgtgagggtgtctggagtgaagggaaagggagagagatggattgatctgagagattcctcacaagcctccttgtctgcattggctgttaaaggtcttcttcaagactgtgaagggtttctgctctcaaatatgggctgcttaaactttctttttcttttttaagagacagtgtcttgctatattgcccaggcttaagtgcagtggctattcatggtcatgatcccactagtgatcagcacagaagttttaacctgctctgtttctgacctgggccagttcaccactccttaggcaaccttgctccctggaggtcactgtattgatgccaaacttagtgcagatctctgattggcatagcttactaaagcccagaactcctgggctcaagcgattttcctgcctcagcctcccgagttgctgggacataagcaggtgccacctagccctgttcaaactttcttgacgatattatggctgttttgctgagatttttttttttaagcatgccccatgcccctcaactctgttactgtcactctacacctgttgtaacataggacagtttctttttttttttttagacagagtttcactcttgttgcccaggctggagtgcagtggcacaatctcagctcaccgcaacctccgccttcccagttcaagtgattctcctgcctcagcctaccaagtagctgggattacaggcatgcgctgccacgcccggctaattttgtatttttagtagagacggcatttctccatgttggtcaggctggtctcgaactcccaatctcaggtgatccacccgcctcggcctctcaaagtgctgggattacagacatgagccactgcgctcgggaaggacagtttcttactgaggaagttagctactcatgcttatttaaaacattgcaaaagcattataacagggaactcagggtgtggcctgagtcctgttattctccaggctgctattatatacagctgtttaggcttgcctgctatgtgagatcttactacctgttcctaggcatcagtacctgtctggtcactcaacagtggccacaaattattatcactctccattccccatcaacctataccatttcagtgaatgacagttttaaaactacaaaaacaacacatttgggaagttatgagagtagaaattgaagtttattggcttcacaaaggataagagcaagatataccacacaggagggttcccatctcaataccttaacttgcatattcagattattcaaattattggggaccagggtttggggatcgtgcacagctttgagtaatatttgctagttatatttaagaacaaaatggcatccttagggcagttccaactatttgtgagctctggctccagacaaacctctgtctgtcaggatgaactccaggaggagtacaaaaggtgcaaaaataaaataaaataaaatagaaaacatcatatatatatacacgtatatatatacacacatatatacacgtatatatatatacacacatatatatatacacgtatatatatatagtttttagacagggtcttgctctgtcacccaagcaggagtgcagtggtgttatcatagctcactgcaacctcaaccttcctggctcaagcaattctcccacctcagcctaccggctagctgggaccactggcaccgggctaattttcttattttttgtagagatggaggtctcactatgttgcccaggttggtctccaactcctaggttcaagtgatactcccgcctcgacccccaaagtgctgggattacaggcatgtgccaccgcgcctgcctactcttttaaagacgctagggatgcaaagaagagacgaaagcaaacacgaaacctttttgatctcaaggagctaaaggtctgagtctgacacttcccatcccacacacatatacagagggaaggatctcttctccagcaaaagttttcacgaaagtcatctctttcctcattgcttaaaagaaacaaaaagccaagaagccgttatggagcgggtgtgggggcctgtgaccttttgtctagttgccatcctccgggaccaacaaggggtacatcaaataagggacgcggcggctcaaatgacatgaacataggagtccgcattctctgagatgtcattcctccaggaagacccaggaaccgtgaatagggcggggtggtgggcaatatctgaagcgaggtttcctgggaacgcgatgccactggccaggacgctggagagggcagcgggcgtgaagaatcccttctcaaggggtccgttcctgggtcgtatatggagaagtctgtccaagcgtgtgtctgtaaggtctagagccgggcgtgcattcagaatcctcaagctcatctgtacttggactctgaccctgaagcgaggcggtttccgaagtctgattcaccgaggggacaggacctatttggggcatccgatggcagcgagaagagaagggagccgaaatgcaaaatattctcaagatgcaggaggaacccctctcaaggagcgccacggagaaaacttcagagtacgggcgcgatgatccagcacaacgccaggacctgcagcccagcccacctctccccgggctgctgtggcgcaggcgcagtggcgccgcgctccggccccagcgcgcatgctctgcccggctgcggcgcttcgggcaggcggcggcggcggcggcggcggcggcagagggagtttccgctttgcactccaccccggtagcagctccgcggcagggacagcttcctccggacgcttggcgggcttcgctctcgccttacgacagcccggtcggatcatggggttgcccagggggccggagggccagggtctcccggaggtaagaacgcctcctccttccctgacacgtcggggttcctgaagagagggccgagccgcggggcggcgggctgagcgggccctgggtgcgttaggggcgccccgcccccttcctcaggcgtatccacctcagggaagcgccgaccctcttcttggaggcggggagcaggtacccctgcatgggcagggggcggcgggcgggtgaggacaaacttaagccgctcccgggtctcttggggcgcaggtggccttcctagcccgacacctgctctgacgcagccccacgcgccgcggggtcctgggctcccacctttctccctgtccgggacgggctcccccaccccgcgccgcagggctagccccgagggccgaggctgctgggcgctggagtcacgagaccgctctccgaggcggttcgggctcgggtggtgaccttgggacgtctaccgccaccccgcagagtcccggcggcccgccccacccgccttgctgtcgggagggaatgccaccctccttgcgtggacccgggccggggcggcgggaggaagtttgggagacttgcgcgcaccagggaggtgtcccgctgggtcagcgcgccggggcgttcggggtgggacgcactccaggggtgctgtgtggcgggggacccggctctgggcggaaaggctgcggcttctccagaagagggcggggttcttttccaaaggtgtttgttaagtactcacttagtgctagggagagggtcatgagtggtttgcggatttccacgtttgctgggaatacagggaaagtgtattcattttcttttggctgcaaataccacttagcatctcataggtagtttgcatctgtcgtccctttcagttgattttactcaaaggctagtctagtttactggattctggagagaaatggaagccacgccgcacctctgcctttttcctaaggttctggagcaggcattgggcagggtgactgcttgcttgacgtggtgagtcgtcccttcacacttacctgccagtgaccaatgttactcctctgcactcctcccaaatcctcagttctttcatatcacaagtatccactaattgagggatcactgtgttctgtgtccagaagctgggaatatatatagtctgaaaggacagatttgtttgtcagtgtgtgctccccgaatgcaagtccattttgttgtcttaagaaaacctgacaagcataatgttgtcagaacccctgtattaggtaaaatcttacatgcacgttgcctgggatgggacccaggatagtgaacaataggatttgtactgtgacatttgaagttttcttttttgccacttctgtattctaggctctcatcaagtttttgcctggccttttgctgtagacttctgtctggtctcccacgttctactttaaatccgtccaacccaatattccacagtactatcagtggaggtctttctggggggaaaataaataaattaattaatgaagagcaacctgctgctgtatgtccttcgtttaaactttcactgactgctaagaggccacactcaccaggtcaagcaataacttatcatcatttagttcagaagctagtaaatataaatatggatagtctgtgttattaggatgtcactagaccagttaattcattaaattcattctttttttttttttgagacagagtctcactctgtcaccgaggctggagtgcaatggcgtgagctcggttcattgcaacctctgcctcccaggttcaagcaattcttatgcctcaggcttcccagtagctgggattgcagatgtgagccactgccctgcccgaattcattctttttaaccctttacaaagatagctagacttggcctgccttccagcttacaacaactatagtggacggaaattgaaagtttattgggctttgtgtaagagctcattgttgtttgtctttgtcagaaatttagcttcaacaactggatgtattaaccagcctggtggatttttattgcttcaagagagggtctttcattcccagcagatcagacagtggcccttttccatttgatttcagtgttaatctgctaagtgaatttggagtcatacattcccatttagtgtcttgtgccaaaattacttcacaagttatattgcaaaagtaaacttctccatgctaggggtgagtggatggaagcctgggccctgcatctgtggtggggtggccagtgggtgtccattagataggtgttgaggcagtgatgatcctatttttttttgtttttttttgtcttcttctcatgttttcataataaatgattgaacaaatgaagtgttcctgttttacaccccagaagttttaagaaagtacttatattatctcattttctttttctgctgacttgaactacaactactctttagcttctcttttcttagagtgttttcacttgtagatgtttctcaaccatcccagattttttgcagaagggagagaaggtgtgaattatttatattacttaagaaaatttttatgtccactaggaactagtgaatgctgatcttcaggatccttaatggactggaccagggtcatttcagagacggatgtagctcagtgctgtcacctcccccacgccactcctactctattgcaggggattatcagtcactttaataattctgtattaactatattttaatatgtatactccctttcctggcagtttatacatcaaaataaacttctttccattgtcagggatgtgatcactgaaacattttattaatacatgactggtttaggttcacttactttatgtaagcattagtagatcattctttatttaataagtgtgtccttggagcttaatgttgtttggattcagaggagtaaacccaagtatataatatatagtcctctccttaatcaatcagtagtccagttgcaaagacaagcatgtatataacactagatatctcactttgaagaggttgatacttagttatatgtacagtatatagttgatacttagttatatgtacagaaatgctgaggagagtggccatttcaggatagacttgtgagggatggtgttgcatgggagctggaatttgaaagtgatttctcagtggttagagaatatagccatggccttgtcttgattgtttttggggtagttaaaggatgaacctgaaaagatagtttggtggccaaagatctgaatgtgaaaccagacatctggagtttatcttacaggcagtgtgtgtggtgcattgttgataagggctgggagggtgagctaaagagggataacatgaaagctgtgatttaggaagggatgagcaaaacaaattaaaggaagaaagatgaagaagcatttgcaagagtcctggaatgaagtatgaatgaaagggaagggaagataaatgtgagatgcatagtaaaggaagacttaacaggcattgttgggtaagggaggactcagagatgattatgagcatgtgaaccaggatatcttattggtgttttatatagagagatggttttttatttttggtagcaaaggaagagaggaaaggtagttcatgatagtaaatagatgaaagagtattagaatatttagatggatttaagtattagataaagattggggtaaaaggaggatataaattaaaaattttaaatcaaaatgctgagatacggccaggcgcgatggctcatgcctgtaatcccagcactttgggaggctgaggcgggtggatcatgaggtcaggagatcgaaactatcctggctaacacggtgaaaccccatctctactaaaaatacaaaaacaaacaaacaaacaaaaaaacgggcgtggtggcatgtgcctgtagtcccagcaactcgggaagctgaggcaggagaatcgcttgaacctaggaggtggaggttctctctgggatccgagtacagtgagccgagattgcgccaccgtgctccagccagggtgacagagcgagactctgtctcaaaaacaaaaacaaaagcaacaaaaaaacaaaaaaaaagcaaaatactgatatacatatattagatgaatttattatttttaaggcaatcctattatgtggcaataatcaccctttaatgtatctgggttggaagcctttcatatatttgttttcgagatcgaaaagggaagtacagtgagggatgcacttttgaattcccttcttcatttctatgcctgttgtcagtaacttctggatgagtataactttttttgtttgtttgttttttagagatagagtcttgctctgttaccaaggctggagtgcaatggcacagtctcacctcactgcaacccccgcctcctgggttcaagtgattctcgtgcctcagcctcccacgtagctggagttacaggtgtgcaccaccatgctcagctaattttttgtatttttagtagaggtggggttttgccatgttggccaggctggtctcaaactcctgacctcaagtgatcggcacccccacttggcctcctaaatcggtgggattagaagcctgagccactgtgcctggccaagtataaagtttttgagacagagtcttgctctgtcgtccaggctggagtacggtggtacgatcttggctcactgcaacttctgtctcctgggttcaagcgattcttgtgcctcagtctcctgagtatctgggattgcaagcatgggccaccaaacctggctaagttttgtatttttagttgagatagcgtttcaccatgttggccaggctggtcttgaactcctgacctcaagtgatccgcccgcctcagcctcccaaagtgctgggattacaggtgtgagcccccacgccggccctaagtcctaagtgtaaagttttttttagaaaacaccataaaaccttgttcctgtttgtaaggagtcataatccatttgagaagactgtcaaagtaaaccatgggttagagaaaaaggaagtattgtgctctaaccttccttttccctggattccttcagcatgtgatgagtagtatatactacttgggcatgtgtctccctcagctatgaagattaacagcccgttgaggaccgcggacccatttgtgactccaacaacactgtccacatacttctgtgtgacacttgctgaattttcagagaatctattgtggtgatgtagccaatgtcatctactccttggcaatgagcttgtggcatcaggggatatacctggtgttcctttattcagcatatcttttaccagccaaagttttaccttttattttaggtggaaacaagagaagatgaagaacaaaatgtcaagttgactgaaattctggagctcttggttgcagctgggtatttcagggcaagaattaaaggcttatcaccctttgacaaggtaaggggaaatctttctaaccattacactatcttttgtcagaatgacatggttaatcatggcaaagaaaggaggaaaagatgatgttttaacttcctccatgtctgtgtttccatttcttcctaattcagattcattatggaagtgttcaaacttcttttcaaagacagaaatgatgtatcagtgaatacgtcagttccttttctgtgcacaaagctttaggaaatgcaaagaagcaaaataaatagttccttctttcaaggaatttacagtttgggtggggattataaaacttatggaaaataaaataatcagagttaataatgagctatcccaagtcagcgtgctcacagacggttgccagatattctgcggatagtaaatgctctgatttaggatgagagagagatcgctatgcaatgaaatcttttaattcagcagaaccttgaatgatgatgcacaaatcatagtaataggtgttgaggacacagagaaaaaacagaggcacagttctcaaagagcccaatttctgtagagtggggatgagagacaagtgaatcaacatgcacagaataaatggcatgatgcagaaagtgccaccgtggactgtgcacagaaaggacgcattcaaatcagacagggcaggctgtggaagacagtgctgagtgctccacggggtcacagtcctggctgtgcctaacagaattactctgggttattttataatacagaacccaggattcactcattgaaattttggttagctaggtctgggcttgggccctggaatctgcatttttattgggcaactcgtaagagtctaaagcagccaggggtaagatttactgtttttgttgttgttgtttgtttgtttgtttgagatggagtctctctgctgcccaggctggagtgcaatggctcaatcttggctcactgcaacctctgcctccgggatgcaagtgattctcctgcctcagcctcccgagtagctgggattacaggtgcctgccaccatgcccgactaatttttgcatttttagtagagaggggtttcactgcgttggccaggctggtctcaaactcctgacctcgtgatccacccgcctcggcctcccaaagtgctgggattacaggcgtgagccaccgcgcccagccttactgttatttttttctaatatcaagctgtgtctgaaaaggattttgtttcaaaatgggtttttagtcttactctcatttgcatctcagagaattcctgagggaaaagtagagccagggattctcaggtagataagaaaaataagatgtatggaaacaaaatgtcagccttgctgcccatgtgtctggtctataaaacacagaattaatgtctgtccttttgactataaagaggatctatgtacagtatgttcatttaataataaaagtcagctcctcagtcatgccagccacatttcaactgctcagcagccacatgtggctagtagctactgtacttgtccttgcagataacggaatatttctgtcactgcagaaagttttctgtaacggtgccattttagattaattgtacttgatggggtaaggaggacacactctctctctctcaagatatataattttgtatgtttactgagtctattagagctatttataatccatctaccttccacttcttccattctccccaaactaaaaagagaaaacaaatattttctttatgtcttgcaggtagtaggaggaatgacttggtgtatcaccacttgcaactttgatgtagatgttgatttgctctttcaagaaaactctacgataggtcaaaaaatgtaagtttttctatggaaaacctaaaggtggggagaagggaactaacttttgagtgtctactgtgtgccagaagttggttggacactttacatagtttattttaacttttattacaagaggtattatccctgccttacaaatgaaactgagactgaaagaagccaaggtcacacagctagatcaaagtttgtagtgactacttagtttatctttcaaagacagctcatatcagtggaagttgattagaaagaggaaaggagatgctttccttccccattgcctctgtgtaaggcagagtctcactttgcctgtcttcgagagaaagcagcatggtctccttgctagagatctcacctgagcataccctgcccagtcttttgtagcacagcagctcaccaggggcttggccatttcattagaccatttgggatacctggttcttctcccagccttccagtgggtctctgtgtggccttggaacagccactccttctgtgggcctcagttcttttatccgtcagaagagagattcctgacctcagatatgtgtgattctgtgacagtctgtttattcatttttctgaagtattaccttctcccaagagaaaacacttccaaaaggaacaaaggggtcttataaataacaggaagcaataatggtgggaaaatggagcaaagggggaaaaaaaagtggggacaaaaggcagagttggggtaagactgccacagtgatgggtcacaaaatgctttgttttcctactgttggccaaagatttgcccctgtgtttctggcagccaagtggaggtggtatctgtgagtaactgagcatcaggaatgttgcaatttactttatatttatacagcattttccctgtaagtttctaattgcctttgtttttttcttgttgacaaaagaagcatatgcctttagctgtagctcagatcagccagcttttttttttttttttgagacagagtctcactcttatcacccatgctggagtgcagtggtgccaacaccactcactgcagcctcgacttccttaagtgatcctcttacctcagcctcctgtgtagctagagccacaggcatacaccaccacgcccagctaatttttaaattttttgtagggatggtgtctcaccatcttgtccaggctggtcttaaaactcctgggctcaggcaatcctctcgccttggcctcctgggattagaggtgtgagccaccgcacctggcctatgcttcttaatcaggctgttcattagcatgaattctttgtcttcttgaggatgcttttcttggaagcttctgtctttgagctgattgcttcctatacctgtggcacccttgatgtgctggtatttcttttcattgcattttttctgtgctagttttaccatttcttggatcccacgtgtgcttttttcctaaattccccttgagttttccagtggtcgttaggccctgttttcatttcgatatccttagggaatatggtagactcccatcagtggcagcattccattatacttttaatagatatgggaacacagtatttttctatgtcttctcaattccttgtctatatttctgaaatctaaaagacactgaaaactgttttttcttcttttaggtttagatacaaagcttatttgggagcaaaacataacctgaattgactgaatttatagctttattgatcccacttatgtgactatttataagttttgctaaataaatttttttttattatagagtgtgactctagattttcctgggttcttacataatatataatatgtatcccttaggtattctaaggaactaaatctaaaaaattcagaattctgaaacacatctgacccaaagggtttggataagggattgaggatgtgttatattccctggtaagtgcttgatgtgtgtctcttaagtgcagagccatgaactgtaactgtgggcaaagctggagacgggtttacgtgactaaggacccaccagagtcagcagtgcatcaggtagctcattctttattatctgtagaagacatgttacagccacagggtactgagtcatctaaaaatcttttctgtttggttttggaatgtgttctgtttggtgttcccccccaccatagagtttctggttaggtgcagtttagactaaaactgccttatgtttgccgtcttccagtatatctagtcaatttaatgggtgggctggacgtatgtccaaggagcacacttgcctattgacggcatggttgtctctcaagctgtcttctttatgtgcccaattgaggccttgttctctgtcatctttctttgctgagagttccataagcttctatcctctacttctatcttcttctgaagccccattaacagagggtcctatggccagaggcccataaatgggattttacatttataactgagttcatttcaacaacaaacattttattgggcatctgtgttccaagcacttgcatgtgtattttattattttaccttcactaccgctttgagtagggattatccctagttttatgataggagtattggacctggaccaagttacttgccaaaagtttcagagttgtggtggaacttgaatttagacccaggtttaattcactgtctttcaagctgtttgcagtggagaagaaagcagtgcactgaacactcttaaaaactaaaggagtcaaactagtcacagctgggcatgttaaaatcttagtctaggaaaccggcctggtgacctctgcaattgttaatttctgtgatttttaggaaatctgaaggatccacctagagccgcaggtagaagctgaaaggggattgttagatttctggaagaagtctttctcactttctttccctacccccagcctgcctgcattttcctccatgtcctcaccttggctgccaagactgtccagacttggcagtaatttctgagaggtgggtttaagagggttgtaaatcctaggatgacccgtgatagccttctctctggacctttatgaactgggtgagtaggctggctccgaagagtggccaggaaatgccatgtctgaaggcagggggttaggctggatggtggtgtgggtcccagcctcttgtttttaagctattatgtatggttctaggcaattggtaactctatgcaaaccaatatatctgtagccacaagagggagctctcctcctgctgaaccaaaatgtaactaaggaaaggctgtattgatcacgtgcccctgcatagttagttgggacctgcattgagcaaaaccagaactgatattcattttcatttgctaagcttggagtttaggcagcagtaccagttgaacactcatctcttcttacaagtttcaaggaaattaaataagctatgagagtctgatggagatcaaaattttaaaaaaagcttaacagagaaccttagatatgttgccaaatgggtttgttagtgcttcactaccaagctatcccatgtgagtcccaagcagacctggacaaccactggcttcccctgtggggcaggcaacatatcttatggcagaaaagatgcatgtgtcccaaagacaggctgcccagaaaggaagggcaccaggagtggctgagagctgcatgaaaattttcttcttcctctcaggacttttgttttgttttgttttaagagacagagttccactcttgcctggtctagggtgctgtggcgtgatcttagctctctgcagcctcaaacgcctaggcttaagtgatcttcctgccttagtcttttgagtagctgggactgtaggaatgcaccattatgcctggctaatttttaaatttttttatgcagacaaggtcttactatgttgcccaggctggtctcaaactcctggcctcaagtgacctccctccttggccttccaaagcactaggattacatgcatgagctaccatgcctggcccctctcaggacttgtggataaatcactcttcaccccttcctctgttagggaggaagggtgagggggaagaggcagcaaatattctcctatatgcttccctcctaggaggaagatactccctctcttctatgaatgtgtgcagtgagggattaatctccccccttccatatttttttctattaacacattggatctgacatttgatcttatgatcagtggggtattactgttgtcctcagcagttttaaccttggtcccaacttgtgaagctattttccagataccagacactgtttcttaatgtgttctctagtgcccattccctggggggctgttttaactttagttcctaggtcacctagttactgttaatactaagactgaggggtgaaacctactaagtgaatcatagataagacagtaataactctcacccagccctgagtcagatgttcatcttgagggtatctgtctccttggaaggattattgaactgcagaaagataaaggtggacaagacttctctgaacaagaaacacttttgggagacccaaaacttgttgaatttgaagcacctagtaagttctaagtgacccttgtttacctggacctttgtctattagaacatagtactgtatttgtttataaggccacagtagctgctgtgactggctaagattttttttaaagggtcttgtgtggcaatgtaacctattcatgtaggctgagccagaagctcctatttctccagatgtccacaaggccatgcctggtgactgcttctcaatgttcccaggctacataccatggctttggggtcaggcacaccactgaatagtatcttttctctccccttgagtctgatccaattaagatagtataagaaacaggaatcacatagctagagatgaaatgccaactgattcgagaaggaggtttcaggctgcaataaaacagacttgcatacaaatccctccaccagtgctgccataaactgtcctaccccagctcaggctgagctgagaaacctccctagcaggagaggatgctttcctcctgacctacagagaagaaaactctgaggcctcaggaagcctggttcctcccttctcagtcccaccttgtggtcttctataggaggaagactgaggcgaggtgttagagaaaggtcggtgtcccttataagaagcagaaaatatctcttctgtatggaaatgagagtgaggatatacagttccttcaactctagaatttattttagagtatcaaaaaattaaaggctactatttattttaaaaatatccttgtaccagagagtagagaactccaaatctcttttggaaatggggctccatgtttcatgttaatattctgggtacctggtgtaaggtctggtaattatttgttgcctgatatttagaatacttttttcaaactgttagaaagagtagatcagtaaaacgaaatgtaaaaagaatacggggcactaataactttttatcttactacataaggaagttaaaaaatagtaacgactacctctaatgttaccatcatttcacaaaatattttacatcaaaaaaagtaggaagaaaaacattatagaataaaggatgaaggcagttttgtgaccacacacctacacaccaccaaattgtgcttatttttctcattttgcagtcatctaggagaaacttgtcatggtctggactagcctggcatggagaagtcccagatccgtctgtgatgctgcccagactttagagatgccataaaggctacttagtatgcctcactctttgcttgttactttttctgaacagagctctgtcagaaaaaattgtctcggtcctgccaaggatgaaatgcccacaccagctggagccccaccagatccaggggatggattttattcacatatttcctgttgttcaggtgagagcctctgtgtggtttcttgtcctcttaacatcagaattcctgtgatgggcctggcttgtcctgtaatgggtccgtctgtcctggatcctgaatgtaatgggtgtggcttagatttggtacagcagaacatggtggtgttcgttgtcgtcatcttcagaagattgccagtcctgcatataccctagtttcatgctgtcacctgataagatctttgaatgttctcatctgacttttcattgcctttttggtaaaaacagaactctgtagcctggtatgctctgttcccttttgacctatccagcttgatttcattccttgcttttctttgttctttttgttctagcactctctggcattcattcagatttccccaggtttattcttccacctgtcacagtgcttttgcgttgctagttccttgggctggaatgctcttccattctctccttacctgtttaattcatatggcttacttcaacccttcagatctcagttccaccaaacctcttcaagaaagccttccctcatccgctaatccacagcatgttcctttatggtatgcactcctacggccacattcctttccttcaccagaatcttacagcagttcataatcatgtgtatccatgtgtgtgtgattgtttatctgcttctctcattagactcttaagctgcatgagagcaagtctgcatggctgtcttgcttattgctttgtttccagtacctaccagaacatcttacaatttgtagatattcagtccgtatggctaaatgcctaagggagagacttctctttgcctccagctgtttcccaaacccctatgattaagtggctcgtgctgtacagctcccaaacagccggccctccatattcgcagctccacatccataaattcaacaaacaatgcatcaaaaatgtttgggggtgggtggggggaaacacaataaaaaataacaatacaacaataaaaagtaatataaatttagcaagctggaaaaagaaagtaataaaaatttaaaaatacagtataacataactatttacatagcatttacgttgtattaggtattataaccttagagatgatttaaaatataggggaggatgtgtttaggttgtatgcaaatactgtgccattttatatcagggacttgagcatctgtggattaatatctagcgggtcctggaacccatccaccacagattccttgggacaactgcattctgtgcagttcttctcttcccctctaggcatcttagaaagaggaggagcaaagggactcaggtgtgttgcccgctgtgtgaacactacttcccatctgactctattagagttctttgaagcgtttattataatcccttacatttgaggaaagtgagaaatgtaatttccttacatttgggaaaaatgagactgagagaaggtaattgatttgcttaagggcggagagtggacaaacaaaggttccagtctaaactctgtctccaagcctgtgctttttccactccaccattcatgcagctgctgagaaggaagctacacagcccttgaagctagaagttctctagttctgtgttaagattttgaaatatagggtcaagagtatggaccctggagacctcctgggttcaagttggtcgctttctagctgtgtgaccttgggtaaataactttccgtctgttaaatagaaataaataatagcacctacctgataggatgagaattaagttagttgtatgtctaaagcacttagttgaaagactgaccattttagtaagtgctctctaagtgttacatagtttgttactgttatgtgttgagtcttcccctctgctagacttcaaagccgaattccatgaaatttgtaaattcgaggccaagactttaccttaaaatttatttgtatgtttgttagcctttctgtctttcttatgcaaggggacactacctgatcatttttatgaaaataggaagttggggccctgtgttgattattattgaaacctccaatatcatcaaactgtgaagttgttacctttcccccaaaacatggatctctagagattagaccgtttttaactaggactttggaggcaaaaaaatctagtcaggttgtgagaagaattggaagtgatcttctgcagtcagttgggtgttttgaaggtctgaatgttctccattgtgagtggaatgctagagggtctgtctggatgggagggcccaggctagtggttacaatttcttaatttcatggacctgtaaaattttaaagcaaaaatggagattggcctagggttgccacctgtagttttccaggtaaggacactttaaaaaataactacaatcttgctttatcatttcataaaataatggccatttaattctcaaactcaaaaaaaagcagtccttgaaattaaatacatttaactatgatgaaactcaccatgtgcctgtagcttttgcctgtttttgtttgttttgttttccccccgggcactcgtgaaagaataatcactggccagcagttgtaagccattgacctacttctcttatgtgattctagaagcccatcatccgtgttcacaccattttagcaaagctgtagtaactttctctggatgcagccaagaaaaaagcagatctaatttctggcccctggtagttctagatcatatctttttctcctgggttggacatgtgactcctgtgaaggtcaatatttttcttgagtgctagggaacctgtggcagagctaggctgtccaagagtttccctctatagcctttcatgctggaaactccaaaacatctgttaggactcaacaagctttcccttcataatgggatcatgctctccaggatccagccaggcggtaacacagggtagatctgggattaatgggagcagctctgaaagggaagcagatgtgaaaagccagaaactgggtctcccaattcaaaagaaagcagggctgaattgagttgagcaatgagccaactgccttagttggcccttagttgtcctggaccacttagttttactgggatggagtacaggtgagggactacaatcgttctcaatactctctgatcttctgtctctgcttctgcattttagtctttgcctgaggtcactgtttgggggtgaagtggtagaaatatatagaagatactgacagcaaggaatattcctcagagttatttgctctattctgagcagctatttcctaaacatgtgctttacttgagctggctgcgctttgtgaacaaacatctgcgggaacaccgtgcagcacagtgttatgtgccatgtgcctgctttcctaggtagctaaccctcaccaagtgttatatgctgttggcgaaacacagctactatcccaaaactgcttttgagatgcagtagctttctctggagagggagtggcaccccttctgtgatgttcttcagtaataaagggagtgaatgaagagccggggaggagaagcaaaggttctttttacactttacacccttaccctcagagcgggtggatcttctgcaggtttttaccctcagggcgggtggatcttctgcaggtggatcttctgcagggtggtgttttaatgataataactggagttttcagttgggagaagtgaagagcagctgtttctgggtatcagcctaacaaagctgggaaacatttcatgaaaccatttgtccagtcttcggtgtagaatagtctcttgagttgtgactcccagctttgcagctggctagctatggatccatgagtaagttatatagtctcccggcacttcaggttcagtaaaactcagccagtaccatccgacattgtgaggattaagagagaatgttatgaatgtcaggataaaccagtgccttcaactgcgtactcagtatgcaccattgtcaaatctgagtattttggacattttttcacttgtcaaatggggagttacactagcattctctgtggttctctcccttttccctggtctgtcgtgtaaggagcacaagaaaaagagatttacatgaagatctgccagtaggaccaggaagttgggagatagctctgtttgttttgtgcttcaggtgtttacaaatcactctactacttgtgatttcatttactcccatgttagctctgtgaggtgaagggaactgatatacttttacagaaaggaaaactgaggctcaaggatgtgaagtaaggctttaaagctcctgcacggctactcagcactaggtcccattggatcttaacatcttggatacccagctggttgcttttcctatagaacagcatgtgttgatagcttcttatcacctagtcagttcaactatgctgatttgagttcatgagttgggccatgtctgaactggccttcacttcagtgggatgttgtccttagcaactcttgtcttttcactttcttccccagtggctggtgaaacgagctatagaaacaaaagaagagatgggtgactatatccgctcctactctgtatcccagttccagaagacttacagtctccctgaggtcagtattgtgattttattttcttgtcccactgagaaacagagtgcacacttaagagactctctagcaaggagcagagtaagctcaggctcccctacattctcagccccacttggcatcattagtgcttctttacatagccactgagtgcaaagctctataattttgtcatcttctctgaattttagtgtttgatctagagcttttattaacttacaagaataatagttgatttttgtattaagttttttgagaggccacttgcccagaacatcctatagtaacaatttaataataataataataatataattaaaaacaataatagctaatagccatcatgtatttactacatgctagtctcagcacatcttatggcttttattctttaatccttactgcaacctgagatgggcgtttttatctctgtttcatagacagagaaactgaggcttagaggttaagtaacttacctgaggtttcagtgcttaagaggatttgaaatgagaactctcgtcttaagcactattccttatgaccccctttttcttactggctgtgtagggatctatgttggagccatctgcagggtttgtagccttttcccatggagaatatattacaatttgttcgaaaattgagacttcgtcaggcaaagtagtgatgagatgagaagtcaatttataagacagatatctgagtggtccacttgagttttaattttcccttgggatttgtttaatcgctctgttttgtcttgtaggatgatgacttcataaagagaaaagaaaaggccatcaagacagttgtggacctctcagtaagtcccctggccgtattcttctgtcagagtcctgcgtagcctcagatagccctttgttaaatcacaaaagcgctgctcctgaggcttccatctacggggatcgcttaggagctagactcagatggctgtgtgagggaagccccgcctgctttactgctcagggccaggacaccagtatgcacagggagaacctgccacactactgttctgtcccctcacttccacttttaagggaggaatagccaaacacagagcccttcctagtttatcccaatggcaggtataaactttgaatagctctgaagagcagatgatgaatggggatgataacttgaggtttctgtcccccacccccttgatggctttgcatagacagagtagcctctgagctgtgtgcgggaagctctgggatggcgtttgtccccattcacagtacatcttaatcacaatgagtctgcacatgtgtcccaacttcgccagcacaagggttagtggaacctttgaccctttataaaacactctgggccagagctgtggaaccttgttagctgtaccctccacccccagccttcctacctgagctgaagggaatgaagcctaggtgcctgtgtgcacagtctctctctcctgaaaataatgtgttgtgttgttttgcatgctttttacttcatctaaattatgtcatacatctagttggttttcatagttgcatagtttcttgtattaatatgccacccaaatgaaatatcagatgtacttcttatacagatggcatgggttacataccttgtgtcattgtaaagattggcattgcctggtgtttgtggctttgtgaactgcctacagagtctttccagaaaaagaattccaaactggcttatcttaaaaataaatgtgtggtctaccaaggtgattactctgaaaagaacaatcatttggtaatgaaagacatggaaatctcctatgaaacaaaaaatcttgatcactttatggttgtaatttgttttttttctcaattccattttggaaatgttagaggtggaaaacctttgggaaggtgacactcaaaagccagatactgttttcagatttggtggcagtattaaacaataacaagaaaaaatgatatgacctcagagtaattttctttcctggttgtgaaataggtgttcagtttagagcatcctcaagtttttaaaaagattgatagatgtaggggaattaaagttgatttttcaccttaatttcacaacacggaagcaaccgcttttaatttttggacatatttcttccatgtttttattgtgcatttttaaactgaattggaatcatactttaaagataattttgtggttttttcacttaccaatgtaggggcttttgtatgctgttaaaagattcctgctggcttggcacagtggctcacgcctgtaatcccagcacactggaaggctgagacgggtggatcacgaggtcaggagttcaagaccagcctggccaacatggtgaaaccccatctctacaaaaaatacaaaatttagctggatgtggtggtacacccctgtaatcctagctacttgggaggctgaggcaggagaattgcttgaacccagaaggcagaggtagcagtgagccaagatcgtgccattgcactccagactgggcgacagagcaagactccatctcaaaacaaaaacaaaaacaaaaacacaacaaagattcctgctaactacatttctcatgacaaatagtaaccagttagttggatatgataattgctttcccctgttttaaatgttacttcatctctggaatgatatgaaaacaaggtgataatcatgttacctctgaggcaggaaattgctaggccagcagcaggagagaaggggaaattgtctttttcctataatctctgtactatttgaattttattctaagtctgtgcattacctattcaaaacagtaagtacacattaaggtgttttttgtttttttttttggtaacaaaagccacattcaaacattaatttttttttttttttttgagacggagtctcgctgtctcccaggctgaagtgcagtggcgctgtctcggctcactgcaacctctgcctcccgggttcacgccattctcctgcctcagcctcccgagtagctgggactacaggcgcccgccaccagacctggctcactttttgtttttttagtagagatggggtttcaccgtgttagccaggatggtctcgatctcctgacctcgaggtccgcccacctcggcctcccaaagtgctgggattacaggcgtgagccacagtgcccggcccaaacattaaaaatttttaatgcttaatcgaatatctttatgtgtaaatctcactctgagccctgggtagagaatgagaaaatggtacagttttcggccatagagcaaaagccagcatagctgtcaatcatcctggtaatgaaactgagcctggcatctctatgcctatggattagttaaagcccctagaggcacattattttttcttctcatttttaatggaggtttttttttttaatccacttctgcttggtaatgtggttgcagagaattaaggaatatgagataatgacagatatttacatagtgcccaaacattgttctgggtgttcatctctaactcatctagtcctcacaacaatcccatgaagtagtagtttgttgttgttgttgctttttaataaatcaggaaactgaaacacaggtaggttatatatcagttgcccagtgtcacaatggtgatggtagaggcaggattcaaacccagtcttgtaactgtgctgctgtgagcctctagataaaatggtgttcgcagctgatgagaaaatagtatcagaataaaggaaaacgtgtccggcctggtggttcatgcccgtaatcctagcactttgggaggccgaggtgggcagatcgcttgagcccaggagttcgagaccagcctggccaatatggtgaaaccccatctctacaaaaaatactataattagctaggcatggtggcatgtacctgtagtctcagctcctcaggaggctaaggtgggaggatcacctgagcctggggaggttgaggctgcagtgagctgtgattatgccactatactccaccctgggtggcagagtgagaccctgtctcaaaacaataaataaaaaggggaatggaaaaaaattgtgagtccctggttataatttgtattgtttagtttatttccttttttatgagtgaacttaatcctcagttgattggcaatacattttcagcaggaatgataaagaatcttcatggatggctaaaggttgcctttgggtttttcttttcctcatctgcttaaacacccctcacttccaggagctgtctgcgtaggtttcttagcgagctctgtcaccattaactttcctccctcccttctaccacttctgcaagcccttctttagctgacttgaaatgagagtcccaaaaggtctcagaaactctagggctgtggtgcatatccctgacctattcttgtgagtcagtacaaaaaattaaacagctcaaaactttaattattgtcatgctcctcaaggaaaatccctcctttaataaaggaaaggaaatccttaattttaagttgtgaatggaaaattaaggaataaaataaggtcagacatgtagatgcctagtttttagacccagcgttttataaaataggtgtggagctgctgtgtatttattaagtgcttaccaggtgcttggcatctcaataggcatttaacaagcattagctcctttatccctcgttaacactccaggagttatatgttattatttccattttacaagtcaggaaattgaagcttagaaaggttgataaattccctgtgtagctgcagagctaggaagagggagtcagattttgacattacacctgactctaacacagcaggtgtcggcactcctcctctcttctggcttttcacctgctctctgctttcccacatattcctagcaccagttttgcagtactattactgacttacttcagggccctgggatattgcttctctgggtcccagagactcaaatgcctacagagtggttgggtcctctcctaccacctcttcagttccttacgagaacattggctgatttctcatctgaagacctgttgcccagccaaagaatggatgccaggtgggagctgtcctgttgttatctttttgatcagcatgatgcctttgtgtctcaaccaacaggcttttacttattcttgtttagacataacataaaagtatttaaatattgaatctttagcttattgtctttagccatccttagaagactgtttgaattttttgcattcatctttggttatgtggcccattcatttttttggtgcatgattttttgttttcaaagttttttttttcttttgtactaatgctgttgtaataagaatgaaaaattaggaaatggagaaaaacaaaaactaaatcacccatgataccacgagccagggataaccactgatactgcaagcaggaaataaagagttgtgaatatcagtatggagaatcagagattgcaaaaaaaaaatggcattgtactatatattctgttttgttgcttgctcatttgttgcttgctcattttgctcagtagtatattgaggatatctttccatgccaataaagatacctccatagcatttttagtggctgtagattattaattatgtggaactagttcaactatagtttgtatctctgttttttttttttcttcacttggccattatgtaggacatcctcatagctaaatttattcttttatttctaattatttacttaggatttattccatgaagtggaattggtcaagattatacctaaggcttttaatacttcttgccagattgccaggcagaaaggccgctgtgaactttatcatccgagcttatgatgggcgtgttctgtttttgtcttggctttatttttcttccttcaggagattattcccagtacctgctttcttctttgaagtgcattactttcttctccctatctcctttgcacagaatagctggctgctttgtagaaggcctgcccaacaggaggtggtattttcaaaggacataaggagtggaaactaccaccttccactttcacatcataatcataatcagctcctctgtctcatgtactgtgctgtgacacagcttcctcctctgagatgtcagccctccatagccatgaagtgtctgtcctgtgaagtgaggtcttttactccctcttaaccttgaataacaggtgcccacacagttttatccagacccaaaagatacattcatttactatttgtcagcatttttttggtagtttagacttttgtatgagaatagaggggacagagaaaagacttcttagagcttccagactagttggaaagaagtgcactgtggaacttaccggatcatctaagagactgccatttaaagttaccagtccagtgtgttcttccatagggaatgctgtgaggaagtccttttcattcagcttgtaaaatataaatgtagtgaactaagtaaagcaatgttaataatagtacacatccatatgcatgtaaatatgtatatatcttagcccttactatatgtcaggtactattaaatataccgattagtttattttcgtaacagctctgcttatacctaatatgcagatggaaaaccacagaggttaaagtaacttgcctcaagtcagagaggtatagtaagcaatggagcaagcattaaaactctagcttgtttgactccatgtattcattcagtaatattaattgaacacttactatatgccagaccatgttcaaggagctgaggcaacagtagtgacattccagctagtgaggagtttgaggactgatcaagaagaacgacctgactgcaaggtggcagtagcatatataagctttctttgggtgatgctttgacaggtttgcttgcagggtagaggagtcccttataccatgagaccatccagaagcttgcatgcaagggccacatccagagtaggaggagaggaaaggaactctccaagatcatagaggaggctcatgtgtcttggtgatgttgctcagcatcacacaggggggagtctgtggtcagagacctatgaagagccccagtggcttgaggtctacctagccatagggtttatcctatccgtggttggaaaatgccaacagttttgaagggtttgcaaagtaggcaggctctaaatgacaaaaagtctgattatttaggctatgtataaaacattttgatatgtaaaaatttgagtttgtgctggtcaacttttgagccaataggtgtcagtcttctgtgaagaagtaaacaacccaggagccatctttagctcatttatataaccctcagtgatcttattcttacccaccaagtcatactgtttagtgcagactcaaggagacctgaggtggggcttgtgccatacttcaaagagcagaagatgtatacttacatagcagagctcatgtaaaagaaaatggaagaacaggggtgaggggtgtcactggaggaaattctacagaaatgattgccatccatccatctttcatcatttctttcagtcaatacccaggcacttcatttttgttattttattaatgtgagaatttttaagaagcacttatttgtcccatttatagtaactttttcttatgagatctttcaggacattgcacttggtggtgaaaacatctatggggtccctttaggtgaaaggcagaattactgacgggacacataggctaagtaagatggatctgttggagttgggtttgggctgcaaagatgaactgttaaggtcaatggaaagtatcgcttcctgttgagttgggcatgggctggcccacaggagcttttgagtgtagaatgccagattggcggtggctgtttcactgcctgctccattatttcaataaaaaagttgtctatggtaattgtgagggaagcgatcagggatttgctgcagacactgccatggtactgtgctgttctacctcccttccctgcattgaggaatgtgaacttagagtaattactctgacaggtgaacctgacttgtaacccagacatgcaaagtagagctctgactctcacagtgtaagagttctctgctttacaaaagggtcaccttaatatttaaccctgtgtgtgtgccttttagcatctgcaaaaaaataaaataaaataaatacatatatcatatatatatatatctgatatatatatatgtatcagaacctagataaagggtgatgaaagtacaggtatgagacattttgcagagtgcttaagtgtctcagttctggagtcatcctgtttttatcgcttactgcctttttcaccatcagcaagttttttaacctctttgtgcctaagttcgtctatagaaagataacaaggataactacactcagatgtggggatcaaatggacagcacagatacagcagaatgtgcctggcacatacctactattcaataagtgataactattacaattgctaccactattaatgacagaaggataaattgattttatattcctttttaagagcacatcatggaaagcatggtagattttttattaatctcagactacattttttaaggaattatgttaccaagccagtatctttacaggattaaaataatacaaaggaagagaccctgggagcatccttcaagatctgttagtacaacttcattttatagatacagaaactgaggcccattgaggggaactgcctttctcaaggtcatgcagctgattagtggcagagatagggctagacatcagcattcttgaccctgttgctttaaagggtgacttagcaatagctctttatagttggcctgtaaacccctgatatttaggttgcattacttagcttcagattgtagaatgagtcttgtgagagggctagctgaaatggctggtgggtggctagagtggcagcctggggcaaggtagtgtcagggacaagccttgaaatgagaaaccaggttacctagggctaggccgcgtagtgtcccagggatcttggacaaattattcagtgtctgcttcctcaatagtaaagtaaggttgatggtatgtgccctgtctctacttcacagtgtggtttataaagtgtaaaagaaaggtgagatatatatgaagatttatactttaacatgtaaggaataattcacaaaagccaacattgtcattgtttggcggaataaaaggtccttttagctgttggtgtcagtatgctcttgttttggagtcaatcctttttttttttttttttttaatagaagaatccaatttcttgccttgggttactgactctttcaattgtaactaagtacaatagcagttaagctcaagctgtaatagtagagctcagtggaagctaaaccaggcacagtaactgacaccatgtaggttgattatattttgcatctccctgcaagtctgttttatgttatttatagcttcctattcgtgtagacaccagcagtaaactggggaatatttgtggcaggaatttctaagaacaacctttagcatcatctcaggccctgatccatttccttttccacaaaattgtttgagattatatcgtatgtgttacagaaagaatgtttttctgtatgctcgaaactgtatactaaagtaaaataataaagttaaccagaattatccatggggaacaattccaattaaaataaaatgccagtatctggtaaaacctggtagtaatgctttttgtggtgatatccaggtaatgattagatgcagtaaacccgggtagtagggaagaagagagatgtggggacaagcagcccgaataccttgctggcatagcagctgcctacctgcacccggagacctgagcagatattactagggtattatttgacagccagcttagcagtcaagaaggacattgatttggggtagcatggcagaccacttcattggggctgaagacctgcatttattgatcacttactacatgccacgtatttcgtttaggatatatatgtgtgcatgtgtataattttaaaatataccccacggtagaggcagagctgttggcagtgagccgagatcgcgccactgcattccagcctgagcgacagagcgagactctgtctcaaaaaaaaaaaaaaaaaaaaaagagaatataccccatggctggaggcatccagcagccaattcaggaggagagccttctcacactcagtaacttggctgtctcatccacttaggaagtgtacaagccccgtcggaaatacaaacgccaccagggagcagaggagctacttgatgaagaatctcgaatccatgctacacttttggaatatggcaggtaatgagtgggacccagtctaggtgtctcttttaaaagaaaagctaatttaagttgcttcatttggattaacttgactagcttctacccgattgagtttctgccttcagccatgagatttccaacatcagggacttttctctggtaatgaattacctgtttctgtgggcatcctttgcaattcctctctggaaatgtgcacctggctctgccttcctttgggagttggggtgttccaggcatttacagaggctgaggtactctgtcctgcatgcccctgtttgttaaaatcttcaggtaaatgaaaacagtttcagtgatttcactttaagtgttagaataataatttcaatttcctgtgaatattgtcctaactaggaaaatgaagaacttagaagtagttttgtcacttcttaaaaacatctcgtttaaaaaaaaaaaatcttattttatatccttagtttttactttaaaaaaaagtgcaaggacatgcttctccccattgaattttttgcttgtcactgggtattaaccttttatgtcacgcattctcttctcagggtaactgattccttgatgtgagtaagtctccttgtgcttcctttgtgttgggagaggctcctgtgtgctgctctgcctcacagcccaacccttgtagggtggctggaactaactgcattgccactggcgtttccctaagtgagcatctgatggctttgcctgccctctagggtaccagagagaaccagcaggaaattaggtttaattattctagtttccaaatggaattgcatgcaattgcttatgttttttttttttgttttgttttgttttttcttcctaagaataaaaactagtctgtttctaaggaaattgaagtagttctggccctaggctgcgtgtgatggctgcccccacagttcactagttgctgctgtgaattgaatgcctcctccaagtcaggcatcaccaggactagctatgtagtgaaaatgccaagtaacttgttagcagttattaatgatgattaattattaagaatttaaagacaacaacaacagccaagtgagaactcttctaagcatggggccctgtgctagtggacgggttgtgtgctcaggaagccagccctgggaatcatgacagagtctgtctagccatgcccagctgtaagtgagcaggtgaggctgcacagctctgggagagccagagctggagagacaatctctgtgggtgtcacgtgtcccagaatgaagaagttcttggcagaatgtagtggattttgtgagtttgtattatttatgcatccatttttccatcatcatggaaaataggattttcctgagggtgaaaaggagttagaaattcagtaaattgcccacctcgctgagaccatgttgacagaattctagatcagtattcttgttctgaaattctcaggttcaaatgggatcttttgtatatatgttgtagatagtagctagtatcaccatctgaaggctgggaaagttcagaacctccctgtctgtcatcaggagtgattgatgcagtttgaggtgagaatctggcttggcctctttaggaaaggaagcaagacagattttgcttgactcttctcaaactctgagagtgagaaagagcagtgtcttgataccaatcctggttcctgttggtatggtcatgctgacttctgctaatttctacggctagggtgggcatttcctgaaggttttaggtttgggggttttttttgggtgggagagagatgttattttgtttttttagcttttttggcaaggagagggtaagtttgtggcaggtggagtagtgggtacttaggacattctgatagtatatttagctcattctcctctttgagactaataatgacaacattcagaaaggttaaaaaatgactttcttaaggtcataaactataaagaggctcagattggcacttcaactaagataccttgaacttcaaaagcatgtcattatcattgtctgcaaatactgtttgagccttcagtgagagtatatttttaggttctgagttttaggaagactgggcatgtctattctttggtctgaaactaaataagaagagaatggttattaaaactgacagagcaaatcagataaaatgtacagccccaacaagtgtgtgttctattccacctccctgggaaggcttctcccttcctttctggcagtctgtttcctctaggttctgttcagcattctccactgcatggagatctttcccattaaatgaggattatatgactatatatatatatatatatatatatatatatatatatatatatatataattttgagcagtttgttcaatgtagaaaacagtaaatgttaaccattggctgctgtcatcattctccttattataatcatcattattagcagcaacagttcagttttcaaatgccctcagatatgaccttttccccttacagttctccttgtccttgtgtgtttatgtatgagtgaagaggggaagcttccccttggccctctgaaggttcactgaaaatgaactgacaaaaggcagattaacaggagaaaatggcatacataatttattgtgtggggggaaaaccacagaagtgtgactacccagtaacccagtgatgtccagatgcctatatgtccttcttcacaggggaaggcagatagggaaatacgccaattggaggggtagtaaatgatgtttaggggaaatgaatcagaccatggttaataaatgactttctggaaattgaataggatgggaaacagaccatggtttgggttctaggcgtggtatttaattttcagtctcttgctctgtggtagataatgagatttcagggagtggatggaagacacttgtgttttctttaacgggtccagtctttatatagataagagaaaaaaccctgttctaacatgtgaccttcaagtgcctttaattcaagttattcagcatattagggtgccatatttgggggcaacagcccgtggactccttcacttattacccttcacactagccctccctctagcatgtgtatgggaagtctggccttttctcccctgcccctgtcaaacaaggctggccccctgctggccctgggactcactttgctccatcttccctttccctttaacattgcggcattcctgacttcctcacgcacccccccccccactacactatggcatcacagctttaggagtccagatctctcttccagtgtttctattttctaccttatcttacctcttgtcagggggaaagtattttgacttctagagcaagaaggtctgaaatcagtatttcttccttggggttgaaggtcactcatcagcgttacacccacagtgccctttggcttttaggtccgcattccatctccttcccccattttgactctcagttgcttaaataaaggtgaattatgaaccttgtcaactatgctgaaggccttaaggactgtttatctgttaaaaacatagtttgggtatatttttctaagtgttaatggtgttaggaaaacaagacttatagttttgattttggatgtaaacaaaattgcacacctataatatttcagttttgttatgggttcagtcaattttgagaggctaacttaagcacctaaccgtgctatgaaactgctactctggggaaatgcattttatgtgccatatatttgacttgcaagaggaggtttggagcacagccaccagaatgctggagttagcctattcctcagtattcaaagcctaattttgagttcttgaagtcattctaggcaactcaaagttaggccttgaatactaaggaacaggctaactccagcattctgtagttagtaaataaaacacggcatacctctcccaacctgtttgtgtctcctatgatgataaggcctatgacatgctcataaaagatatttagtaagttcttgtcaaatgaataaagaacaaagttcacagtccttggtatttagggctttttatgtccctattttgttttatattccaaatagataaccatcttagtttggcctgaggtaattgttcttgaaagttagtttgttttctagaattgtggtgtccagtatggtagccactatccatatgtggctattgagcaattgaaatgcgactagtgtggctcaggaacagaattttgattttaattaagttaaatttaaattttaagatttgtgcttgatttagttaatggaaaatgtttatctttggaataacttggtcatatgaacctactaacctagtaattaaaaaattgtatgtgtgtccttctttatatttcttttgtactgtgctgttctaaatgtacatccttgatttaaagactgggtcctatgactaaggtaagaagaagtgaactggatgatgggaggagctctttggtgctaacagtgtaggtagcaagaatcagagctaaagaagaggaatgcaggagcaaatggaagcatgcggcactgcggatcagagctgtcacttgggggaaacgggcagggctgacaggaaaagaggaaagcgaggcagtagttaataggcagttgaggacagagctttgtcatggaaatctcactactttgtgacatggatgaggcctttagaaaaatcatgtggactcttcattcatgcagcaaccattaattgagcacctactatgtgccaggcactgaactgccaggcaatggggatattgaagtgaatgaagctgtacatgaatatttatagtagcactgtaaatatgttgcataatatattgcacaattatgaatttagcaattcataattgctaaaaagtagaaacaacccagatgtctgtcagctgatgaaacaaaatgtggcttactcatataatgggatattattcagccataaaatggaattaagtagtgattcatgcttcaacctggatgaactttgaaaatattctcatgagtcaaagaagccagacacaaaggccacattttgagtgatttcatttctatgaaatctccagaattagcaaatccatagagacagaaggtagatcagtggtagccaagggctgggaagagggaagaattgtgattaactgctaatagtaacagagtttctttttgaggtgatggagcttttcttgatttcgataatagcgatggttgcacaacatagtgaatacactaaaatccagtgagcaatacactttgaaatggtgaattttatattatatgaattatgtcagtttttaaaatatttttttaaagtgaatgaagcaaatttcttcctctccagaggctcaacagaaaggcttagcggattactcatgagggataattatgttcaccatacaatgagtgcgttggctgtcacagaagctcacatctggagggcttactaaaagagtcttcccagagcctctgtctttaaggaggagtagattcgtcctaggaatcaagtcactcagatttggttgttcacttccttatttggaaaatccgtgaagtccctgggccttagataaagggctttatgtcttctgccctaaaagtctccacagactaaaggcataaaaaaggaaagatgaatactcaagatgcaaggacactataggagtgggaaacttgggcaagaccttgtattgttcagggttccctggttgaaaaaacagtaccctcccactagtttcagcagaagggattggttacagggctggatgagaactaggctgagccagggtcagctctcaagcttcacattagaactggagctccaggatactgtttctgcctccaaaatcaggaagctagctagcagcctgtaggattgggaagctggtgctatagcggcttgacaaggaaggaaaccacgctgcttctgtcaaattaggaagctctgaaaaaccaagaagccactgtgatagctgctagccccagaacctggctgtttctactgtgatccacaccaacacaatggatcctttatgcttccctctttcctcctttaactgttccatattgaaaactctagcaaatgcatctgattggtggaacgttaacagtattcagaaccctaggtgcaagggagtatggaaaatagtctcttttccagcctcagcagtactagaagatgcaatagatattaagccagtccacagaatctgccataaggtcctttacagaattcgtgtggatagccaaaatttaaccttggtctgctacactttggacctataggtttatttctaaagggtggacatactgcccagcagtgactttttggtttccccagttatatgacaatctgttgcaaggtcagatgatacttttggcttcttgatttttgcattttttcacttatgtttagtttgtttgttcagtgaatattggaaaaaccagatataaaggtagaatctttgccctcaggagaatgatacagataagtaacagttgcatgtattcaccatctgggaagtgagaggagcatgaacagatgcagggatggataggccaggctgagcacatgtgcatgggggatgcttcacaggggaggagctttagagctgaggagtggagggtgagtagggaagcaggggcgagaggggaacagcttagtttgtgcagagctctctgttcaggtagtaagtgtaataggaacacagaaggtgctgctggtggtgaggtgaaacacttgttaggctgagccatggaagagaggctttataaggctcctgaggaggttctgttttcttctgagggaagaggcctgccattgataaatgtgcatcaggccaatgcagaagttggacaaggaatgggcaggaagagtgtggggagtgaagctggaggaccaagaccaggtgagcacacaacccagaagtgaggcacagagtagccttaaacttgttctttattttcatttatttatttttgagacagagtcttgctctgtcacccaggctggagtccagtgctatgatctcggctcactgcaacctctgcctcctgggttcaagtgattctggtgcttcagcctcccaagtagctgggactacaggcgtgtgccactatgcccagctgctttttgtgtttttagtagagacagggtttcaccatgttggccaggctagtctcaaattcctgacgtcaggtgataggcccgcctcagcctcccaaagtgctgggattacagcactttgcaggcgtgagccagcgcgcctggctcaatttgttcttaaatgtttgcattaactttattttcttacaaatcacttaaaggtgtatgaggctgggtggtttgcattttgctttttgttgagggttgaatggattttgcattgttatacttgctttttaaaaaaacatagattaattagagccagaaaataaactacttgaaactgaattgtgtttttgtgttttttttaatttaaggttgtgtgaagtgagtacacattattggcatcatgcttggattatgtttgggaataaaaagtgtgctagactctaagttatggaagtagccattaaagcgcatatttggcttaaggaaacacatttacatttgtttatatagatatttttaaggcttttagcttaaaccgtggctctgaaatgcagtggctgattcaaaaagtcataattgcacttaaggaaaatgttgcattccatactgtctgagagttccaatttacattatagtatttgcatagcaagtagggtggctggccctttattaaaaagacagtggaatatgtttgtaatttaggcacttgtaacgttttctcaagtcaccaaatggcataaattctcttgatgtttttcatgtaaaaagtcaaccaaaatgcatttcactgaatgtattgtaattttttaagtagtaattaaactccttttttgtggcctgcaggagatatggatttagccgccagagcaaaatggagaaggtaagaaaaacattgatagtaagagagaatacttgagagatggaagtgactcccttcacctctgactaacactcacaagccgggcagcagcttcttgggaaacccagggatgtgtgagctgcctttggcccctgcatctccgtcctggcttttctagctagccacctctacagattggggagcaaagcagcagtctcctcctggggctggaaatgaggggtgattgaaagttgtggcctagggtcagtcacttggggtctagtggctctgcagtatgaaggtgaagtccactgccagggctcccagagcactcctcatctgaggtgagactctaaatagatgtgaacaggatgttaggtagagcacagctgtgaattacaggcctgccctctgctgaaacagccagtcatggaagagccaggtaaatcaggatggcttttctaacttcacaaaggatgcccaaagatttctgttaatttatgtgtttattaatgatgcttcattgtcagcagcaggacaggtacataaatgttatggtgctaaactctttctgtgttccaggctgtatgttaagggctctgtatgttttcacttactgccttgaacaactctatgaggaggatgtttatttctgctttttaggtcagaaagctaacgctcagagaggctcagtgatttttccaaggtcaaatagctctaaagtgaacttaataagaatctgaacctagaggtctgacatcaaacctgtgctcatagccactgccttctaaataataaagtgtcagctatagtggtcagtggcctcttaaaaagttcagttattgtcaggagatcgagaccgtcctggctaacacggtgaaaccccgtctctactaaaaatacaaaaaaacattctccgggagtggtggtgggcgcctgtagtcccagctactcgggaggctgaggcaggagaatggcgtgaacccgggaggcggagcttgcagtgagccaagatcgcgccactgcactccagcctgggtgacagtatgagactccgtctcaaaaaaaaaaaaaaaaaagattggttattaacctcttttcattctccacctgatccccagatttcttgaacaggacacactccccctgctgttcccctgccacccactccattgtacccactccccaggctccccctctgcttcctgtgttgactgttgtctcagtcgctgcaggcaccagcagtgactaggagcactgttctaaagccagactagctggtttaggattccagctcctctattcgctgagtgactctggataatttactgattctttgtacattagttgacagcatctgtaaaatgggggcagtcattgtacctatctcacagcattattgtgaagattgaaatgtaaaggacttagaatgatccaacacatagtaaacatttaataaacattattattaatatcagtattagttattggtacttagtcatgtactgattatgatgtcttcttttttagttttctcattattttttccccatttgtgtttttttagtcaactgaataatgatttcctacagagcagggtgttttctggatttgagtatatcatgttttatctggtatataataagggtttgatgtgtatatttaatttgatatgtaatttaagtctgaaaagattgtctttatatatgactgggcaatttggttatgattggaaaaatcatgagatgtccctgaaatagtattcaaattgtgcttgtcctgtcatttttatgtcagacggcacatttgaattagcagtctcatcccctgtagatgtgtccaagcagttaggagctcggagtgttcccatgggcagtgatagactcgttatagaaaagcatcctagagttgggatggtccaagaagggcatttgagaccaaacctctcttttgaccctggaagtccttaacatgcagggatcagaggtaagcctgaggtcacccagctggtggatggcagggatagaattaaaacctatagcccatgattgaggaggcagcagttaatccagggtgccttgagtttgacctggttcatttagagcctggggctgagtccagagcatgctgcttgatcattagataaggcagttttcatccttcacaccagtggtattcaaactgttttgattactctgagcagtaaacgtataatttttcatcatgattcagtacacacacactaatacccctaaaacaaaagtttcagtaagcagtacctaacccctcactacaaagcactctggcatgttctgttgtgttaatttatacagatgctagttgtacctgccaaattacttttatgtcccactaattggtcttaacaggcagtttgaagaaacactcctttagtagtgatctgctcttgaaagtgttaaagtagggggaagccccagtcaaagtgcaagggtaagtcaggcaaatgtgtgtggcctgaatttaatcagtgagcagctgggacatggaaacaggcatttgccagttcctgaagcttaacctgcccaccctatactctagtggaggttcagccgtttggagtatccactctctcagggtgctgctgctctgcaggtctgtgtttttttcacagactcatgcctcttgtcagtattgtcctttctctactgagtctccatctcccgtgctcagctgttttcacatcttcccttgcaggctgaggacaagaaaacggcacttccagcagggctgtcagctacagaaaaagctgatgcccacgaggaagatgagcttcgagcagctgaagaggtgtgtggtccatgtaggccctctgaggtttctgtgtaagtcattttgggagaaatcgtactcttatccctagcgttcccaaatggccaccacctcccacagccagctgctgtgagcaggtctttcacaccttccagtttcattttatcacctgcctttgaggctcacataagacgagatcaaggaagacacccttggatatcaccgcaaagatccatgtaggcatattgcttctgtcttacatgttcagaaccactcactgctgctcccttccattcctctttcagcagcgtattcagtcgctgatgaccaagatgaccgctatggcaaatgaggaggtgagtgggagtcggggaggtgtggggatggggacttggcaccaccctgctctgctggggtcttctcccagagagcccaccttctccggagctgcctctcaccagcacacagtacctcctcttccccagggagttccttttgttaatctgtttttaatgcctagtgctgccacccatgggaacctctaggagggaggcttgaaggacccttgtgaaagcagaatattcctgctgggaggttcacagggcctctgcggaagagctagagctgacccgtgagttatgcctcatgctgaggcagctcttgtcttctgctttcttcctacactatctaggtaggaagcgggattttgagattatagttggtctttccagagctcaaagcctgtccagaaggtatagccaatgtgaaaggatcattctttttgaggcctgggaagacctgtggtagtaaagagatattttagagttctgagattctttgtcctttcccatgctcttctctattccctgtgtcctaggcctgccaaatcccctgcaggctctgtttggtgactctcaggaggtgagaccttggggtggtacatagaagggaaggaccattttccaggggtgcccagggtccgaggaggatttagcaccatccgctcagtgactcaggaggtagctgcgtgtttgtcctgaggcttcttttctccctttctgttggtaatatgtggcaaagccaaattatttcccctgggaatattatgttttaccataatagagtgttcagacataatagagtgttcagattttccagtgctatggaagacaaggcttggccttgagaacattccctccatatacttgcagagccgtctcaccgcaagctccgtgggccagattgtgggactctgctctgctgagatcaagcagattgtgtccgagtatgcagagaaggtaggtgggggcccagctggagtctgtgccccagataatgctccatggctttgttctcccacttccttaccccactaccccagcagtgccccgtgttctcttgtaactcaccagccacgttagtcagaaacacactgggctttaccatgcacaaccggctatcagcacttgcccgttagttaaattaattttgtcctgcagtgcccacttttctgtaaatataaagagaaaacctgtctcacagagcagttatcacatttgataaattcatgcctgagggtatgggatgagcattttttcttttctatcaggcctcttataacttgggctcagtttgatgattgggctagggaatgaagctttgccacttaggagataaaccccataactcagccaaacccgaggcagaattttttgttctactttattaaaagagtatagaatgaaggaaagcctgaaatcatatttcagagtttgctttttttttttttttccatcctaagaaaaggcaggaagaccttgaatatttcagggagacggtgattaatcattttgcacataactgattctggtgtggctgagatgtggtatcagtaaaatcagatttacaggacattgttgcacatccctcctgccccagccctgtccccctaaaatgttgatgtctgttgaagcatccagctttgctttccttttctcagaatcttttactacaaattagctctgccctgactctctgtgacatattcttctgaagtgattgcacaggtgatacagttagggaaaaattgtccccagtaatctggaggcgttatcagctataacacccccaagacttttggaaaacagttttaaatgcctagtgctgccatccgtgggaacctctgggagggagacttgaaggacccttgtgcaagcgaatatgagtgagtaaaacagcttggaatgtctcagggtgagattcctttgttttccccactcccccaagtaagtgtttcttaacatgggctttctagtccaatctcatagaatccagagtgtcctgtctttccattaccacctaggaaagatgacactgctcaaagtgtcatctgaaatttgaccagaaaaggatgtttgttatcctaaaagtacaaatgaagatgtaattatggaaacagtattaactcactgtctgagaagaaagtgtcttcgtttcctgtcagcacacacatctgaatggcaagagtgtgagtttatacccgcccttatgttgccacatagcattgctgaacccagtttttcagaaaaaaaaaaaaatgacaactggatagagcacccactgctgtttctacagggagcacgtaggagctctgatgattgtaagaggaaaaagcaggcaggcagagccccctgtggttggcagtgcatctctctttccacacttttccctgcctaggactcctgaagctcacctgacttccccagttattctgcattttgcacgtctccttctggatctctctgtgtctttatctcctaataagctttttcttcctcactcttgaccagtgatctctatccaactctgatggatacattctggtttatctgtcttggaccattctctacctccattccattcttctagaaaagagtgaaattaggagtaatttggacaggaagccgtgccaagattttttctaaggacatatatgctgttgattcttgatcaacacaggtttggactgtgtgggtccacttacatgtggattttttcccaaccagatgtgtatggaaactacagtattcatgggatgcaaaaccagtgtatatggagggccaacttttcatatatgtgggttccgtacagccgactgcagagtatgcacagattttggcataagcaggtggtttttgaaccaatcccccacatatactaagagatgactgtagttaaacttccaatggagaagcggaggtgtcaaacattcattacttaattgtgttgttttcattgggtaggtagtatagcattaaagctgatggtttttcaaaattaaattgcctttaatcctattcccatattgcagttatttcacatttgcatattattttacagtgcttgttcccagatcttcatagttgtgtatagttgtaatcatcatatatgtctaaaagaggtaggacagtgagtgagtgcagtgattaaaaacacaccatttgaagccatatcttggttcatttctgccttttccatttcccagctgtgtgacctcggccatatatttaatctctctttgccctagtatctgctttataaaatgagaataatattacttttctgacaggtgttgggaagattaaatgaaatgtgaccaaaatgcctcaaacggtgcctggcactcttcagctgttgatagctttattttcattactgtagtcttcattctttttggttttgtcagatcacatcctaaatattttctagccttcccgtttatttatttttatttttctaagtgtgtgtttgtgtgtatgggtggctgtgtgtgtttcctgagataggatctcactctgttgcccaggcaaagagtgcagtagtacaatctcagctcactttagccttggtctcccaggctcaggtgatcctgccatctcagcctcccaagtagctgggactgcaggcgcataccaccatgcctggctaagttttgtattttttgtagagatggggttttgtcatgttgcctaggctggtgttgaactcctgggctcaagccatcctcccacctcagcctcccaaagtgctgggattgcaggtctcagccactgtggctggccgttcccatttattttaataactacataatttatgtgttaatacagcgcagttcattaaacttttttttgttagacacaattttaagttgtttctgtttgccattgtggataatattgtgaaatgtgatcagatagtttctgctgagaggttttctaggtgttggatgattggttatcactccctctgtgtgttacaactacgtaaaatactaacagttgtgaagggacttcccagcatatgcccccaatatttccagctttgatttttttgtttgtctaatttgttactgtagcaactataaaatggcagctctgtagaccactgagaggatcgaagatggttctgtgtaagtacaggttacagagaactcatccagtaccatgtaactaataagttccaggtttgaatacaggactgtttactgtgttttcttctctgaattgtctgttatagactatactcgagtaacgttttccttgtgaatttgaataaagtctatacttcagatttaaatatattgtcactgtgatgcaagtatttctcaggcactttattttacttttgtattgtttttcattatatacaaggaatttgtacccaagttggtcagtcttttttttttattcttgtttccaaatgagaggttcattgtttttccatggatctggtaaaatagttaatgcatgtcagctggtcttttattaattatgtttaattctttaacctatgtagaatttattcttctttagcctaaagtggggacctgtcctagttttcctattcatatccacttatcctactactgtttgtcagataatttctttctactcatttggagatacttgattctatttttatgtcttatagctaaactgagtatggcctctttcttgtattattggtttatacttctattttatgcagttctgtggtaaagtcatgcatggtgtttttgttatttgcttgatttgtttttgttttgtcagtgctctccagtcaaagacctagtttgttcaattaggaacatatctgtggttgaacaagttgggtatattgctgcttgtagtgagggagaacacataccaatgggaatcatggggcctttcagtaagaatgtgtcagaaaggacttagtataggatttggacttatgtaaggtgacttgaaggagggttcaaggaagtggggctttgctttgggttcgatgctgtaaggaagggtgagtctgtcaatgagtatcttaataaatcttatctctaagacatggggaaaatgaatcaaggttaaagctatgtatgtgtaatagctagtataggggatatttggtcatttttgtgattcggacaatgtttatgttttcgtccatgttcggacatactcatagtcatagggtggccttgtctggtattggtgttctttgaaattgtttatgttttgcaacaaggcctggttatgagtgcaagtcagcctcccaccaacatcaatgccttgctaatagtaccaggctagctttcagacgtcaggggctgcttttctcattctcacgttgtttgtgtggttatctgctattgtgtggcagtactgccacaaatgtagtcacttaaaataacacacatttattgtctcactgtttctgtggggcagcagttgggcacagcttagcagcaccctctgtgactcttacaaggctgcagtctcatctgaggctctactggggaaggattcgcttccaagcttacatggttgttggcagcattcagttccttgcaacctgctcactgaggtcaccagtttttgctggccgttagctggaggctacccgcagttccttgtcacatgagcctctcctacattgccacttatttcatcaaagctagcaagggagggcatctccctgcagggcaggcattatagacttacataacgtaattacatatatgtaatcaaaagactgccttttctctgtggtgtattctgttggttagaagcaaggcacagcttccgtccacacccaaaagaaaggggttacacaaaggcaggtgtgaacatcagcaggtgggaatcatggggccattgtagagttgtctaccatggtttgcttattggtcttttaatcatactgccacagattgggctgaaactggacactggcaatgctgccaccttcagggtctcagtaatataccttggaaatagagatgggattgaggaatgcccaggagggaagctgttggtagtatctgagaaaaactcacttaggctgagatcaggattttttttttctttatgaagagagggaaaaggataatttgcggggaggatcaagtgtaaaaatgattttgtgaccagggaataaattgaatagcctgccagatgtgagtgtttggaaacttcacaggcactgggatataaaaacaaggtaaaaaacatgtgcagtattctcttttactggtaaagttcacaagtttcttataagagtgtaacataacatgtatctcaaagttcctgagacatgtaactcaatatggttcttgtagagcagcagaaagaggaatgtgaagaagcttccagatacataattcatgagtgtccgtagactctaggctgagtagctccatctgccattgtttccaaagggtaacacccttccctgaatgtgctacaagaagtaccagtgtgcttttggtgttcatgtctaatattctcactgcatcatagcatttatttttacagggaagaagaatctattactctgatttacagaaaactgaaatgcctgactgtccaaaatatatttccgccctgcaaccccctaagcttgataggagccagaagaaagaaaaggaagctgggccagggaagttgcaaggtccctgggagggcaggaagggactttccctaatgctgcatactaactaaccatacaccgttttgaccgctttaatacttagtctgccaactaaatcattcattggttgacttctccctaagacaggatattggaacattttgtagctctaaaggatctgaatattttatagctctagaggcacagatttgtcttggtgaatctgaatctaccctgagtgcctctccatgcagattctttgtgtaccattatctcatttagttcttattttttaattctaaaaaattatctcatttaattcgtataggctgccttcctgcttataatcctctgccttcctccatcattatacttatatgcagttgaaactatctgtttatgtggctgtggaccacctttactcttgtctgtaatctgagagtctcgctaagggcccaccagtgttggtgctctataaatgagtacgtgatattatatccattttgcaggcaaagaaacgagattatgtgacttgtccagtgccatacagctaataagttccaggtttgagtgcaggactgttttgactttgcaatctttctccttggctaggtggagcttccttagggagaagcagggacagcctcctttaccatccttagtgtctgccttccaggcttggctgtggctgtgcctccttagactgtcccactattcaactgcctaccttgggctattggtagctagggcataccgggaactaaccacggaaacaagagaaagtgaaaatggtgcagctcagcccaggcactcacacaccataaacctaagctgctgaaagccgtggaagtttgtatttggagtatctaagtgactcttcatgtttctggagaataccacattaatgtggtctcatgcagttctttaaagggtaatatctggctaggcatggtggctcacgcctgtaatcccagcactttggaaggctgaggcaggcagatcacttgaggtcaggagtttgagaccagcctggccaacatggtgaaaccctgtctctactaaaatacaaaaattagctgggtgtggtggcacatgcttgtaatcccagctacttgggaggctgaggtgggattggtagcttgaacctgggaggcggaggttgcagtgagctgagatcgcgccactgcactccagcctgggcgacagagagagactttgtttcagaaaaaaaaggcagtgggaggtaatatcctagcccgaagaatgtcaacatcttgatctcatttccatagcaaggtgtattttagatcatcaagggacttatttgtggaaggaatttttccttaatgggttttggaaattttcctgtccagcaattaagaaattctggcaccattgcctctgaccttttgattctgagaatcattctctggcagttagaagcctttgctctatcttgaagtcatatctttccagagcacctggggaatctcgccagataattagagcttgggtatggtcaaggatgtacttatgaaaaaacacaaaggaaagtgtctcttctagaaaaagcagacagccacatttgattagagcagatcttgtccccatctatcatgatgatttttattccactttatgatgcaatcagcagagaagactgcctcttcagttctgtcactcactaagttggaccctttgccttttaagccttttgggtgcaagtaataggaattctacccagcatgttgctataagcaaaagggagcctttatcagctctcagaactggaagtatttagtgggggactcaaatggccctgccatatccctttacccttgcttcactttgtctctgtcttggcttcatcaccttggaggcctgactgtagacagtttctgtcttactgcccccttcctccatcagtgtataaaatcctaaggaaggactgtcctctgtctgtcatggcttaggtcacagatttctccccaggcccattgttgccaggagttgggtgtgactggcagcccctctgaactagaaagagtaggagacagggattacttttctaccaacagatatggggcacacatggtggctagcacccccataaggccttcgtttccactaggccctcaggaaatttattcaacaaagttggagggaattgacccaaaagaatcaattgttaatatatcgtttgtcctcttagtagttgccttcacgttgttatttctccaccctgggtttgtaactcttacactttttccaaacgtatgaagtcttctgaaaatatatttttaaattaatacaatctttttatattttaagtctttgtttttttttttctgccagagaactgatggaattgacctcataatcactgtcatgtgaaagagtgattagatatatttcttctttcagcaaacacctgttgagtagatctgcatccaggcagtgtcaggtgtagggggcagggattgcgttacgcgtgagtcagggttgcggccctgaggggcttccagtaaggagtcagtcaacctgtgaaaacataaattacagaataatacaatttgtatgcctataaagtggctgccgggtgctactaggtttgtgttatcatttgaagtgacagtatctgcccaaagaaaagttgttgatatttttgttgatattaaaatatttttgcctgataataaccaggcagaatggatgacttttaaaattataccatggggttagaaatggaaaagggaagggcttaggactgagtgaagataccacaccccagggacattgcctgggccagaaagtaacaggaagcttagcagcccggggaccctgactgctttgttagaaaatcagcctgatctgccacctgtgtgatttctaataagcttagatgtgagtgtttccaatcctatcatcctgcccaactcaaaaaatgttaccacttgctagcagcatcggtttgtggagttggggagaagtgtagtatgagtcaggaaaggggtgggggtgttcctctcttggaaacctcctattgtggccacagatagaaaaacccaggagggtttgggggtctaaaatcaggaggggtgggggtctaggtagatttttaaaccccttcattctagatactatttcctcacataacataataggtgttgcataaatcatattcctaacctctgaagttttagagggccaatatttcattttttatctttgtattcctgttgcttcattcataataaatactcagtagaagataatggatcacttgaagactttgtggagactcacctgatagccattagcaatgattctgggccaggcacagaggctcacgcctgtaatccaagcattttgggagcctgaggcgagaggatcgcttgaggccaggagtttgagatcagcctgggcaacatggtgagacccctatctctacaaaatatttttttaaaattacttgggtatagtgacatgtacctccagtcccagctccttgggaggcagaggcaggaggattgcttgagctcaggagtttgaggttgcagtgagctatgatcatgccactgcattccagcctgggcaacagagtgagaccctcttaaaaaaaaaaaaattctacttcttaaaagaggctcttcagtgatgttgtagagatcagctctttatctcctttgtagcacttccctcaagcactgtttcgtttgtttctttgcttgtctcccaggactagaatgtttgctttccaggagggctaggattatagtatactctcagtgcccaacacaattgggttttcacagatatttgctgaaggaaagaagaaaggaagagagggagaggaaggaacaacagcagctttcaaaacccttttcctctgtgacacaatttaggcattgaggagaatgcagaggatgcaacacctttacttacgaattagctggttttgtctggctagattatgaagggccagaggtacagtctttgtcttttcccacttccccagtgcataccaccgtgcccccacacaataagatctgagtaaagattagctgaaataagccaaggaaggtggggagagagatttaaaattttaatcagagttaagagagtaaggaaccctgtaaatctggagagaacaatgctaaatatgtttctgtttaaaaacggctctaagatttcctgaattcggatcgactcttacgtaattagtatacaatacctaactgcaaggataatggtatcaactaatgaattgtcagcctggtaaaatgatctcaagccacacagcacaacttatacatttcagagtccgtatcaatttgcataaagacttggactttagccttgccagatttgagcatcacttaaagcatcacttgcaaagataattggaacatcacttaagaaaaatgaaaaaactgttgaatttcagaaaagtgagttgtaccaattcatgatttggtgaggatgccatctgacctgacagtagtgtatggggattaaagaggaggttttggattttgttcacacctcctaaatgttaagtgcattctgagcaggcacaccgcattactcacagtgggacccaaagcaaagccttagactcaacaaggttacataactatgggtttttgaaattcatggaatttcattagtgggttttaaaaatattgaaaagagcattcatgtattgagtttcatttttggaagcagaatatagatcagggaaagtggatgattccctcctatctgcagtggtcacacatcatcaggagtgctttagaagttcacttacaaactaggataacatccaaggtggtgaaaggtgtcagcatcttgttatagaaaggacaggtggaagagctgtagacacttagttgaactgttatctgaaagagtgattagatttaatctgttgctttagggaggaatgggcatgcttgtatgtatatggtgtgtgcattgggagggggtgtatttgaataagtctttacagatgcagttctgctgtctgttttcactggcttttgtttatggtagtttgacttcttgtctgcttttgatttttgactgtgagccccatattccttagaagtttatctgtaggaactatttgaggcctaggattgaagctctgttctttcagggaagatctgcttttgcttctgccaagcacctggggatacttcagcccaagtgcattttatacctagtccttacttatgggttttttgccccaaagtagtgtgtgaattaggattgcagaactgcatgaggtccaatctgttgttacaaaatctcattgtggattttttccctcttacagctgtatcaagatttatgtggtaaaaagttgttactgaattgtaaaaatcaaagcttgtgatcatcaggttttggcaaatactctcaggaaaaaaagccaacttcagtgggtacatatacattcctggattcccactttcagttactttttggccttccgaaatttaacattcttgctagttcttagatttaaaaacatttttaaataaatatttcacatagtctgtttacttgtctttatttatttatttgaggcagagtcccactctgccgcccaggctggagtgtagtggtgtgacctcggctcactgcaacctccacctcctgggtttaagcaattctcatgcctcagcctcccaagtagctgggattacaggcgtatgccactatgcctggctaatttttgtatttttagtagagatagggtttcaccatgttggctaggctggtcttgaactcctgacctcaagtgatccactcaccttggcctctggaggtgctgggattacaggcgcgagccactgcgcccagcctacttgtccttaattggtcagtcagggtaccaaaaattgaagtccatctatttagtgtagagaactcctggtaccttgtaagataggaattctttattattgtcagcttagtgaccatattttggtggggtagggagatgatataggagagaaccctgtattagaaggttgatgtgtaaataaccttttgggtttctttcaattataaaagtatatagttttagctaaagtaatcattttttgcttctcttgggaatttaccattttgaactagactaatattattcggtgacatttaaatctgtttcctctaaaaatagaagttgtgaatatctgtcagttattagaaaacactaaatttacactagaagtcatcttaatccacaatgtggttttgaaagcacgttcttaatctgaaaatgttgaacaaattagattggcactttagccctcactgcaatgtaaacacaaatggaatatttgtagatggttgatgttctttgacagatgttgcattttggcagcagaaatctgttaagatgctctacggtttaaattttttctgtcaaggatttagtataaagccccttttcctcttctccttctgtctgactttgtctcatcattcaaaatccaccttggtcatctagttttctttctcatcgtatctctcagtgaatgaaccattagatgagacctgctggtttacggacctgttcctgtcttcatcagtctgagttctcttggctttgagaaacaaaaaatttagattgcttaataaaaagtgtgtttgaaaaacagagcggtcagctttctgtttactaggttaggaactctcatttcagctcagtaataaactgttttatctgactaaaaataacttcccattaaacaaagcagcttcccatagcactgtctctaaactcagaggcaaacagaggaacttacaagtttataagtactgtgcgccagtaaatgtacatttacaggactccacacaggactaagaattattacctaccaataaaagagagcagtttgaaagctcatgtttccttggaacatatactactataacagatatggtagaggtacctatagagatttcaagatatttttctgtgcattgcgagcattttctctctgtatggttgtctgaatcacgggtctagtaaaagagcagaatgagaaagaacttttccctctcggtgttacataaacgatggctggccagttggtgagcccaccccattgactgtcccagcccatgggtgggttaccaagtgaaccaggctccttagattaaagtagcagttctcaacattttataatactttcaggacccagttaaagactcttaaaaataactgaggactcaatagcttgtgtattttaattcatttacagtagcttacgtattcattgacagtaacatgtattaattcatacccaatagcttatgtatttacttacaaattataatgagcacattaatattaacatcagatcagtgatatcacatgtcatgtaacatctggaagatgtcactgtataatcacgagaatgagagtgaaaaggcaaataacatattattatgaaaaggtatttggcctctgagaccttctgacagggttttgagggagcatgtggctcaaaattgagacttagatagctatcaacaggaataatctttccacatatcaagatggctgctggttttcctgcaagaagaattcttgtaagtgaagtctgaaggtcataattttaaaacaaagctgtatgtgtgccacatacactaatacgagagcatggaagctgggtgggggaatgcagtttttattttcttaggactttggccataaaagcagtttatgagcaagaaagcttgctaacagtcagagacatcacccaatccatgccaaagctgcagaacagaattgaatgagtttactcagcccccacacactggaggaagtctggaaggtgagtgatacgtggatccactggagcctgcctgcccacgtctcagtctcgaagcctgacaggcatctggaggaggtcaggatactgaagcataatcctcacaccaaacatagagacatactgtatgggaaattagttctgtttcaggtatcagaaaagcatgaatagaaggcttatgtaattcggctagtaaagcacaatgctctgagaatatgcttatgacactttggaagtcaaagtcaaggaatctaagctggatattaaaactcaaagctaaaattaactataaaaaagctattaaatacataacatacaaaagtggccaaattaatagcatagttcaggtcaatccaatcaaagtagaggagatgtagttaattgtaattctgtttttgtaagtgatttagagtggggctggtctttcctcttccaccacccttttttaatactctcaaataattttcagaaatagtttgtccttctccatactacaagttgtgaatatcttggtgcgtccaaaattaattttaaaaagttaattccaattcccagaaatcctaaaagctaaaataatgttgacattttacacagtcccaggtttcaaggctaaatgtgttgtaataataaatgcttagtttttctgtttcctttatggcctaccagcccatgagacagaaagtgatgtttcttaccattttatgcagctgtatcctgctggttgttttgtaactccaaaattgttaagtagcagaagaactcatcatccattaataatacctgctgaattattcagagaaatccttaaccagaataaatggttatggccatccaatttctcctcattctcactttcccatttctttttcctgtgggtaaatatcttagactttcaagcctaggacactgttaaaacattcagggaaagttgaatatccaaatggtttttgttgcatgtgagtttagaatcaatgattagcttggaattggggtacttactataagaaaggagatgttttattgttggtgtttgactgtttaataaaactataatcatccaagaagtattataattgcacttattgcaaaaaggtctaccttttaatttctttttcctggggcttctcacaggagtcttgaggcggtgtttgtattcagtatctacactaagctgcttacttctttgtgtggtttttcaggaatggccatttgccctcctggaaaatgttatcacattcacctcatcatcttgttcagagatctctctcacactcactcctggtcctgaggatccttctccaccccctcctcccttatagagttgcagaacttttcctacctgacctctctcagcacctttaatccctttccaatcaatcccctgttaactccagaacatcagaaataggaaatgattaaattggagtgggccaagtgatggaaaatgtgttgggagactcttcattataagtgctgctgaatggctagacttttttaaccatttgcttataatacttcgatcacagtgaatcaattcattattcttgataactccagaatggtcttatgaagatattactatggccatgttattcccctatttaagactttttgatgatacctgttgcctatatgatattgacataaccacagttatgtccctgtacttttttacacatgctgttccctcagcccagaatgcaggttctgttgatagggattttggtcattgtgtcagaatctcttctgtacgccaggttttgaacaggcctctgtaaatgccctggcttgatgtgactggctgcccagtactgctttgcccacattgaacagggcttgattacatgaaccaaggtcaactaactaaatcctttggatttgccatcccttttttccacagcagtctgagctatcagctgaagaaagtccagaaaaattaggaacctcccagctacatcgccggaaagtcatttccttgaacaaacagattgcgcaaaagaccaaacatcttgaagaggtcagtgttttcttttcgtaagtttattcaagatcttcatggtagattggttaaaggagattccagaacgggggttggcatactgtggtgcttgggccagtccagttgccacttgtttttgtaaattaagttttattacaacataacacatccatttgtttacacattttctgtggctgctttcaggctacagtggcagagttgagtagttgcagaagaccataagacctacaaagcctaaaatatttactatccagccctttgcagaaaaaatttgctaacttctgtcataggaaaagatcacagggcaagaataaatagcattagttaacaaatatctaccgagcactactgtgtgctaggcactgaactagctattgggatgaatgaagaacaagttatgatccttgctgtcaaggatcttaacttctaatgagaagttaccacactcatcgtcatttaattacaggtgtgttaaatgcttgaaggagaagtctaggaagctgggagagtgactaatagggagacctgacctagcctcaggtcacagagttctgagactggaaagatgagtgggtatttccaggcaggaagtctgtatgggctatatggacttacagaacaacatgaacaaagaccagaggaggaagggtcttagccagtctgttttgtggccagggagtcatgaatgaagacagttggttggcagtgtctgatcaacaggaccatccaagccatgttaaggacaacagaagccattgacgtgtttaaataggggagtggcatgatcagaattgcatattgtaaagaccattctgtttgctgcaggagcatgaattaactggacttgggtgagaaggaattcagggacaacaggtaggaggctgatgcaatagtctagacgtggactgctactattgatggcagggaaatggaggaaacttgatcatttttaaaagagctgtaggagatggtgttctgtaatacctggtgatatgagactgttttggaaagaccttcatatatttgccctgaaaagtagacctaagaggaagctgggaagtttgactcagcaacagtcattggacaataaaaaagttatatgcttcagttgcattagcaatagattagattagaagaatacacgtagaagaagattaagagaatgaatatgggccaggtgtggtggctcacgcctgtaatcccagcactttgggaggctgaggaggggcagatcacttgaggtcgggagttcaagagcagcctaaccaacttggagactccctgtctctactaaaaatacaaaattagctgggcatggtggcgcctgcttgtaatcccagctactcaggaggctgaggcaggagaatcgcttgaaaccaggaggcggaggttgcggtgagccgagatcatgctgttgcactctagcctgggcaacaagagcgaaactccatctcaaaaaaaaaaaaaatgggtaccagttggcattttgagcttgttagtttttagttagtcccacatatttaaaaggtattaacctatcaaatggtcctgcccaatcatttctttatttgaatttgttctattagaatttgttctaccatagctgaacaaataataggttggtttgctaaatgctctggatcaaagaaggatgaaaagatagcctatgatttggtttctgttcagttatttgtttagacattttaatgagttgtcaactcagacagtatcatccctactcctgacccctgctggtgataagaatggttcaaaaagaactcatcacagaatcaggagcaggagacaaggatgagtcttccttattatgttgtctttatctctgagggaagatagttttgagattattgtggactccaggagccagagtatcccagcaggaacggacatttgcttctaccttctgtctaaacctggggagaagcaatactaagcctcaacacaaatggcagtcttgactcattcttggtccagctgacagggcaatcctccctgactcttgagtctgttttgcagttggttcagaacacttttacccagagtctgttatttttcaagcatactgcttaacatagcaggctgtcatttttcaagcatactgcttaacatagcaggctgtcattaaaagacaacaatcattattgcaatgtttaatgtaattagagatgatgaccagcacatggagtaatccctgaccatgtagctaggccaactggatgaggaaaatgaggtagggaagggagagacttgctcagagtctgtgttccatgtttctgtgtgtgtgcagatatactaaacacattttccttttgtttctgtcagttttcaaatgtttcaagtgctttttttaaattgtagggataagctgaatataaattaaatagtatagaagtatataaagataagaataaatagagcaagctactatttgtgtctgctgtgtttcctggcaaacctgtttttaggcctttgcaaaaatgtatgccccttcacctggggagagtgacttgtatggttacaaaattgagtttttatttcacttattgtatcacagacgtctctctgtcagtaatagtaattgctaataagtgctttgttactgcttagtaattactatgtgctttataaaattaactcattcagttcacacagcatccttatgaatgggaggtactgttattttcctcactttacaaataaggatactgagacacagaaattaagcaggctgtctatagtcacatagcttgttagtggttgaaccaaaatttaagcaaataaatctacctcattctttttagtgactggatagtgtgacatagtatatatgtaacacaatttatttaacttgttccctaacttctcaaaaaatgcgtttttgattttgctagaaactattgagttgttcatcaattattttatcaatttatacttctacctgtagtatgtgagggattccaaactctttacatcccacagcctcttttacaaggtcatacaggcagaaggcatctgagatgcatccttttttaggcttttacagacacgtatgccctcacctggggagagtgagttgtatggttacaaaattgagtttttatttcacgtattctatcacagacatctatctgtcagtaatagtaatggctaataagtgctttgttattgcttactaattactaagcactttgcaaaattgactcagttcgcacaacatccttatgaaggggaggtactattattatcctcattatacaaataaggaaatattagtccattctcaccctgctgataaagacatacctgagactgggtaatttataaaggaaagaggtttaattgactcacagttttgcatgggtagggaggcctcagggtaaatttagaatcatggcggaaggggaagcaaacatgtccttcttcacatgatgactggaaggagaagtacaagcaggggaaatgccagatgcctataaaaccatcagttctcctgagaactcactatcacgagaacaccatggggtaaaccacccccatcatccaattacctccacctgatccctcccacgacacgtggggattatgggaaccacaattcaagatgagatttgggtggggactcagccaaatcatatcatggtccaatgagggaatatgcaaaggaatagaatggagtacaggtggtaggtagctaagaggaaacctgagagtgatgaaagaaagagaaatccagagaggtggtgttaaccagcagctgaatttttagagtaagtgtaggggttaatgatgaagaagaaaatagaggtaagagaatcctggaggactccagcaagataaaaactaagctaagctactgggacacttcctatttaagaaaagatgatcagatgaagaatttaattgttagttaaattaattaaagaaaagaaaagagatgagccttttcttcttagaaagctcttacttccctgccaagatccatctggggtaagtctttgttggtgaaggtttcctgaaccccctggtgagggagctaactctctttccttgggcctggctctgccccatctcttctcatattttaatcccacagttacaatgtcatgttcttttctttctcccatacacctcatttgagcagagcattgggtaaatgtcagatgagtaggtgggtgcaggggtgagaggctacacaagaaggtgggtgaagcaggtgggaagatcccggggacctttcctagagccttgtcttagtccatttaggctgctctatcaaaataccttagacgtggtaatttgttgcttacagttctgaaggttgggaagtccaagatcgaggcaccaacagatctggtgtctgatgtccatagatgatgccttgttgctgcttcctcacatggtggaaggaggcaagggagcccactcaagcctcttttattttcatttttttgagacagggtctcactccatcatctacgctagagtccagtggcatgatcataactcactgcagcctcagcctcctgggatgaagcaatccttccacctcagccttccacatagtcgggaccacaggaacaccaccatgccgggctaattttttttttttttttttggagacagcagagtctcactttgttgcccagactgagcctcttttataagggcactcatctcattcacaaggctggagccctcatgacttaatcacttcccaaagaccccacctcttgaaactgtcatattgggtattaggttctaagatacaaatttggggcagacactaacattcagaccatagcaaacatcaacagttaaaacactgggatttaaagagaaaactaaactttttcccagagtacccttatctcccagttacacaaacagactaataaaagttgtcattgcacagatggctctctttgaaaaggggggcaccagaacccacctgcttctctctcctttatcacattgctctcagcttgagttggcttcttgataggccttgttggaattataactatttatcagtcatgaagactagtagctagattggagtaatgatttctgaaggtgacataactcttaataagctgcttacaggcccaaggatggggcatgttactttgaaataaccattgagatataggttaaaatttctcattgttaacttgaacccagttaataacaagtttgaaggtggttttctgccttgtatccttcttaaaagtgaaaatacacaatccttttgagcatttaaaggaatgttttcaaatttctaaaagttgatagacacaaggatatactgttttagcaagagaaagggaattgactttttcaagatgtgagtttacagttatgtaagttggaacagtaaaagtaatttattttcattctcttggtgttgaagtcctgaatcctatcttctatgtgtcatcatttgccaaccagtcttatgctgggatctcaagtgctgaaatgctgtttgtattctgcaaacaggcaagtgggttaactgcattgattgtagccccactgaaaagtcagagggacttgaatttggatctgggcctcatcagttatcagctatgggactttagtcaaataaacttgactgctctgagtctttatttcctcatctgtaaaataagaaaagtgtcttttttcactgaatataaagattcagtgatataatttatgcaaaattcctagtacatcagctgacatgtacttggtgctaattaaatatgaggtttttttcttcatttgttgttggcaacccttttaaaattttcacatttgctcagtttaaatctttctgagctttcattttctcatctgtgaaattcacatctgtgttgtcataaggatcaaatgagagcatatgtcttttatctttcatttacagctgcgagcaagtcacaccagcctacaagccagatataatgaagccaagaaaacgctgacagaggtgagcagatagattctccttcttctgtgggcccttgtcaagaattgtttttgacctgaaccactaatggaatgatgtgtttcatcggtctgtgtgtgggagacacgatcctgttctcagaggctgcagtcattttgaggacataggacagttacatggtagtgcgtgacccatgtcatcagtttgcccacactgcacattctagtcccttagtggtcttggtgggaggggtctctgtgggctgcgagggtcaggaaaggcttcctgggaaggtgagcctgataggctgggtggggcacagagaagaactcacagtgtcactcagtaaatagctcctgcccctcaaacagcagcttgtatagtaactctaagatcctgaattccttgagagtgagatgtcttttgaaagatgagagaacctcagagtgatataattgttcagaatttccagttatctcctaggcagagtgggggaagggctgcaggaggagaaggagggctgggagtgcatttgaaccctgcgattcaatctgtagtccaggttgcaagtgtgctacttcacatcagcattgtcgctgctcacttcccacttgtgattgctgaacagacacctctgctgccacctctgtcatgagcagtgtgtagatatttctgttccttggtttccacagagaactatcctcatccagacttgaaaagctgtcttccttgtgattttggtgcttggactatagccgtactatggaaggacctcgctgcaaggtccctacctcgtacttcctggacgatttggaagctaggatcttcaaagacgtctccgaaaccaccccagtatccctacttttctagaattcacatgacatttaccaatttaaaattcttactctgtagcgatatgtagcacttaatttgccaccttgatgtaaacctgacaaagcttttcaattctggtctggactaacctcttcagttattgtcagaatatttcaaaagggcaggcacatgaatgtcaattagaataatttttttctcattgttcataaagacgcctgccttgcctttggacagattagcttcctttacattgctctgtgactgcgttccttacggattagatggcaagctctgcgggttgggagccctctgtgatattttaatgccgcagagcccctggcatgaagtttgccaattcgtggatctgtctttgtataataatctgaaagagattaaaggcaaaatatcttgatatcagctttctaagacatttatatgccttaggatataaactatcagtgacttataaaggagctttttatactaaatactaaatcaagtatttgttgagcccttttcatgttatagaaaggtggagggtgtgatttaagtcagtaataagactatcctcaaatgaaaacagcagccaacattgctctgggcatatcattcctgcagtcgtcgttcctttttgcagatgggaaagctaaggcagagaggccatgcagccgggtgtcaggattcaaatacaggcagcctggcatcagagccctctctgggagcttactatctaataggaaaatcagactaattcccatctagaaaaatgggaagctgtataaaacctagtactgaacaacttctgaagaagcttgatttggtcagcctgtgcgtaattaatgtttttcacctctgggcctggttctccttacctatcaaggttaggagtaagcagaatgagcgctctgaaccctttcattccaggcttcccagatttgacctcttcagcaaaacctgcccttccaggataacctagtggcactgaaaagcagagaggacttgtgtctttccagtaaatctgggaaaagtagagctgggcatggagggttgcagacagcagtggtgcctgacacctgtgggggaggctgcatgactgcttcagaaaggccaggagattggctgctttgtaacttcagcagtcacaactctaatttcgtgtgtgtgaggctgattgtttttatgcagtattcttttatgtctaagtacattaattgtatctagttttgcttgctctgtaactattaagatcagaattgacttgttgaattgatacatcttttttaaggttatgtctgtcttcagctctttgatgatccttggttatatgttcatctttaattttaaaatttcgggttaccacctctgtggatccatgcattttatgcagcccacttcctgtgtttattctggaagggatctacctactgtttgctgagatcagccggtagtaactgatgttctgggtcggggaactccccatttctgctgggtatcaccaactatgtgggaccccgccctgcctctgagacttaagcaccagctcttgtgtttaagagagtcaggtttcattgcctagcctatgtggctattcctaatgcagatccccaacactgcacaccagtccttcctacgtctgctaactccacacagcttcttcctgaggccattcctgtctgttaaccatcctttttggcctgtgaggttaaactcttgtgttctaatgtaatagtctggatgtttgggggtcttagggcaagaaggggtggctgcaagttgtgcttagtctactattttcaactagaactcttggaacttttttaaaactttttttttttaatttttgaataagtaacacattcacatcgtacaaaattcaaaaagtacaaagggtgtaggtttggagaaacggtgttttcttcactgaacagtagatactagagatcattgtaaaagagctactttattcttttttaaaatattggcttagtattctgttgtatgatgtaattacctactttacacattaaaatccaagtttaagtttcttctttaaaaagtgtcattatctgcctcacaaaaagaaggtgaagttgttcacctctgctaccaaggctccagcaaccatgtcttcattctctcttgcagctgaagacttacagtgagaaactggacaaagagcaagcagccctcgagaagatagaatccaaagctgatccaaggtaagaggtttcagcatgcgcttatttttgctttgatgaaagtgactttgctgatacttgttggcttaatttgtttaaacacagaacaaagcagccaaaggctattggtctggcccctgcaggtcagatcattttactgttcatccagaaagtggtgactctgccatgctgagatgtgcctgggctgccctgggttagtcacctttttcccaataccccttgtgtacagaagcagcatagttttttgtttttctatttttcaaaatggtcataccttcatagtacagaaaagggcatatggtgaaaaatcttcctcccactcctgtccccagccacccaattctcttccctagagttcactattgttacaagtttttaaacagctcgtgcctccttggtagaaaaggtgcagtcttttctgtcaagacacagctgctgctgtagttgtttgttctttcatgtagaattaattgtcattagagcattagaggagagaaagcacttaacatttgacctttttagcttcagactatttgggtggtaaagtctcctgggagctgcttatttgaatgagactatgaaatcaaaaagttgcaggcacagaatgagcagtacttgtttgatgaacatttttagcaaaaagtacccacaggtaacttgactctataattagaaacctttgtttcatgaaatggagcaaagcactgtcagatagttgatatttttattgtcaaattagtgcttttaatgaccttaagcaacttgtttccttttcagaatggattttaaaaatagttttcaatactgtatatgccccgaatacagttgaataattggtatcattaaatatacctggtactattgaaactcattgatgtttctatagttgacattttaattgtggaatctgtaatgttttcttggatccggcattgatggtcttgggtttataaatgaataataatgtcagttaaatggaagtcattatcatttgtgcagaatctgtgagacactcttagagctgagaaaggaaattaaaaggagagtccttttttagctgcggacctgcttttagctgcgattcataaaatcataatggcctgccatatgtcatttttttgtcttttctcttcagtatcctacagaacctgagagcacttgtagccatgaatgaaaatctgaaaagtcaagaacaggaatttaaagcacattgtcgagtaagtgttgtttggtgtcagcaaataaaccaggacgcttattgaatctcttggtttacctccgttgtcctgttgtggcatcctatccagtgcagtttaaaaagcagattcggccaggcgcagtggctcatgcctgtaatcccagcactttgggaagccaaggcaggcggatcacgaggtcaggagatcgagaccatcctggctaacactgtgaaaccccgtctctactaaaaatacaaaaaaattagctgggcgtggtggctggcgcctgtagtcccagctactcgggaggctgaggcaggagaatggcgtgaacctgggaggcagagcttgcagtgagccaagatcacgccactgcactccagcctgggtgacagagcgagactccatctcaaaaaaaaaaaaaaaaaagcagattcatccagcagttatttgtcagttgtataagctgaatagagcaccatggttagtaactttgtgccaaaccccaaaacaaacaatgtcacctaactttggtatttgaaagaaaagtcttatgaagtttttgcaaaaatatattttgttgacagacggcctttgtgaaaagagtaacatcatacaaaaccagggctgtcctgaaaacctgggatgtctatgtcctatgtgtaagtcctggctgtcatcttctggaaacttgtagtctagtcgtgggggtgatgcgtgttctggcaactctagtgtgagataggaaatgaggcctggcaagttctgtgtgagctccaggggaggaaaaggcacttcagcacaggagccaccaaaaagctagatcttacttaagggccaaggaggacagcaagtggaggaggtacttgatgaggcagagctccaggctggaagatggacagctgaataaggttgaggcctgctggagagaggaaacagacaagactaactggaactaggctctagatcacttgttcatttcaatgcccagtgattactgtatacctcaccagcccttcagaaagaaggacctcttttgatggaggaatagctgcctgtagcctcctgaaaagaactttcccaggctgataattggagatcagggcagctacctcattagcttttcgtcccagaataaactcatgaaatgtgaaaataagacttgtggaccaaatagttgaataattgcgtctaattactccttgtctgaattttgtaaacgttcatgtcacttttaaaggaggagatgacacgactacagcaagaaattgaaaacctgaaagctgagagagcaccacgtggagatgaaaaggtaaaggctctgaattagtccttgagactctcaggtgctattacgggaaaaagatagttctagaggaccaaagagcagaccgctgttgctaacttatcctgtaaatagacattcctcaactgttttccttctgtgaccttcttagatttgtatccatctcttctctctttcctctgggagtagaaggcagcagagggtgtggaaggcagcaacccagacacgaattaccagattacacaattctggcctccctctgtttagggagatgtttctgggaaaagtctgagctctatttcctgctcacccgttccttaaattttctgccagtttactcatttcacctttctcctttcctgctcagggataatgccccactcccaaaaggcagcaacaaacatgaagaaggagagagcagtgttggatttaacagaagaaccctaggcttgcaggagcagtctgggtttagggaacacacctggacagctggttctctgaacagaggacttgatcttccaaggagctagcatgaattttcactgaaccttaaattgtaagaaacagggaacttgaggcttagggaggacaagagtgtccagccaccccacgccagaccgcatgccctgctgcctggcccagaactctgcactggacagtgcccatggctgtacaggacactgccatgcccagcggggagacgaagatcttgcagggccgttatcactctcctgagtggttgcattatttcacccgagccatacaactcttcacatctgtgaggggactggcatgggtgaataggagagcctaggaggcagtggtatcccaggctcatcgtcgcacagtccacctctcctgttgtttctaaaactttaaacctttaaagctcaaatcatcagtttgagttttgagcctctgcacaaattagactcttaagatctcatttctcttttcagcacatcttgttagcgagattcttacattcaaaaagagctatacggtttactgtgttagtgtgtaactgacagacacctaagaacaatttaaaatctgctgctcatctaagggcagttccctttctgctctcttcagacatgctcgggggacatcaacacatttctcagctgcacccttatgcccctgcctggccccttcctacatctagatccttggcttctgtcttattcccgaatgctcaggagaggtgtttattatgttttcattgtttcagaccctctccagtggagagccgcctggtaccttgacctctgcaatgactcatgacgtaagtacctgcctgctcaggactggcattgtctcctgagggcaggcggccagctttccactctcctgtgatggcttctcatgcctactttaatgtgctctatggccaactccacatctaggcgttccagggcattgtcctgtttgatacagctaggcctcagatggaggcagggtctcaccaggaatggccctgaaggtcacctttctgatgggttttcttccagttctgtgtacaagcatgttgttttcatgctggcttctcagctgggaaggggagaggcctgcgttggccgcatatgctggtcaccactcgggctctgagggatggggtggtacagaggggaaaaccttctctctctgttgtactatataccagactcagcagactgtttctataaaggtgcacatagtaactctttttggctttgtgagccagctctgctgtagtgaccatagttgatctgtaaatgaatggacatggctgtgttccaataaaactttatttacaaaaatgggccacaaggcatatttggcccaaaggttgtaggatttagctcacaggctgtagtttgccacccacttctgagttaaaccagtgctctccgcattccaaaaccctccagaagaaagagataggaaaggaagtggaggaaaggaaaagcaggaaaactgtaagcatctgccttctttaagggttcctcttccctttgtaccctcgtaatctcccaggagaatgagcttcagcactcttccagtgaagtctgttggattttgcctgcagctgagccccttgggtgcgttgggtaggggggtgtgtttatattccctatgctgaggaaggaggcactcctttgaccccttttgtaactttctctgaggcgacaaaccatccagccatgtctcttaccatgtctcatccagccatgtctcattgctgggttcaatgagggactagtttctattttctatatcaatgctgtccaaaagaactttttgcagtgatagaaatgttctgttccgcactgtctgctgtggctagtggctatcacattggataacacagctctaagtagaaacatagaaaactagcatcatctccaaacacaggcatagtacaacacattctttaactaatgatttgtctctacatcatcataggtttttgcaggggaagggcatatacatttggaggttacttcacttaagaatactggatttgccctgggtcccagaaggaagagttgttataacatgatatgagagggtatcaagggtctcatatgagacaggacccagacagtaaacttgggcatttaagaagagaaatttaaggccttaggatgggggagatatgataaaaacatattcaactttcaaagactccattaaagagtgaaagttttctattcccagataattacagccttttccaatttttaggaagacctagacagacggtataatatggagaaagagaaactttacaagatacgtttactacaggtgagtaaaagaaggacaaaaatatgcataaatgcttctaactaggtataaatgtcctatgacataactagaaagtctcaatatctaagaactagagaaaataagtaatgaggctgctgttccccagtcttctttctatctggagtgtaactcagtgatttaagatgttggtattaacatctcacattgttggtatattactttcacaaccactcctttgagttaatcctaaccccaggtggagagtggatattacatcccattttctttatgaagaaattggcttgtttgtttggataaccggcagtttgtgagagtgacatcaaatatgggggagataggtttcaaaattagctctaaaatttaattcatgcagagtcaaaattacatttaaaatcccctacattgctgggatctggctcatggaagctcaaaagccaaaaattccttgtgtcacactttggttcaagccaaccttctgttccctgggagggaaaggccgggctcgggtaggagtggccaaaaggctgcagaggccagtgagagcccctttcccctctctctggcacctacttactttgctgagctgagagggttaaattagagtgagtcaaatttgtccttgttacagactactaatctttaaagaggcacagaactaaataaaatcgggacagtacagctgcatatttggaaactttttgactgagtgctttatatgtattcagcattggatcaggtcccagaactaataaataggatgacccatctcctggacatgctggctatttgagaaccaagacatgtctatatatacatcaaagttcaagggagattatgtgcaaattgctttctaagggcagcttcagactggctaggggaaagcttcagtaaagccagtggcttgctgagggcaagggcctgagttaggcagtggctgtagaatgcatggaaatgaactgatgggacagattgcagggctgtagctgatggaacttagtatcatctgagataaaaagaggagtcaaggatgatgctggaatttctgacacaagggtgaataatatttgtgttattcatagaggagaagcataaaagagaattaatggactagggttaagggcgagaggagtataataaataggagtgttaatgagatctgtttggggcttttcaaagttgggatactcaaccacattgaaatgtccaaggagtgctttgttgtcagctctgactcccagaatagtatggcctggagatttgggtgtctgcagtgttgatgaggactggggctgtggaatgtggaagaggccctgagactacaccctggtgagcacatgtgaggataggcagagcaaaacaagggatctcccagtgaagatgcgcctgagcagccagaagggaaaacaagtgcatgaggcttgtgggagccgagcagagagctcagctgagaggaggggaagtgccactagaaatcaagaaggctaggagctgagaattgtccattagatgtgtccctgagaaggtgtgcagtgactttggcaaaagcagttcagtggggcactggggagagcctagttgcagtgggttgaagagggactggcatggacagaggctcccatgtgcgtggctctcagtacatttctcttccctgtaaaagggaagagagaggctggtagctgaaaggtgatggcgattaaagaagggctttttaaggagtgaggacatgaatgtatttaaatgctgatgagaagggtcagtagccagtgaaaagttacagatgcagtaaaagactgaagagttgtatcttaagactcctgaaagaaaaccaggagtcagagcctgagcacccatggggagcgtagccttggcctaagggagaaatacatccttccctctccctggagctgcagagacccagttttggattaggtcaccagagctgaatgtgggtttcccaccaggaggctcctatttccccagtgaattagagattcacatctgctgctgcaggcgaagcaggcaggagagtgggaggatatggtggacaaagggatgcaggcacagaagaaaggcagcactcagagcccgcttggtctggagtctacacgtgttcagtgggagccatgcacaagtgagcggcttgctctccctgcagctgcccctgcaccatgccacaccacacagcagtgccatgcctcccagacccggtcagtagggcagtttcctgagtctgtggaagggagaaaatgctagaaagtatttgaggagtaggttgcaggagctttttaaccaggatgaggaatttgggatgtatgtggaggcggcaaggtggcatagcttcccatcatctgaagcattccttttgttgcctgtccctgcctggcagggtggagctggctattctagactccttgggggcctggtgggtagctgcaggctctgtccatagaagcccttcccattcagtatcttccctcctggtccactcatttggtgccttctgtgattcagttcacagtcacaccacctcccactcctaggaaagcgggaaagtcaatccaaatctgagatggggacctttaagcccatggcaggagtttgtgcctgcattgtagggcgcatggttgggctcaggtcggggtgcaggcaatattttggctccctagagaacatgtaaggccttttaccaaatagtactgtctctgtctcccttttgcatttaggctcgaagaaatcgagaaatagcaattttgcaccgcaagattgatgaagtccctagccgtgccgagctaatacagtatcagaagagatttattgaactctaccgccagagtaggtgcattgaccacagacaagctcttgaggctgggaagggacaggcgaggggtctgttccactttagcatgggggagcatgcaccagagcacagtccacaaaggccaccaccggaaagctccgtttcatcagcaggcccacttggcagtcccgggagcagcactgtggtgctctcactgccctctccgtggacagatagttgaaccagttgagctcttagactaaagcttcaaagcagccctcatcctggtcagccacacagccttcccctgagctcccacaccactttccaacttcacacggaacatcgtgaccctggtgtctagagatcagtcctcattcattgttcttctctacagactttgttgctgatgtggtccttaacccttaacagcatcatattcacccagtaacccaggaccatgaccccctcagcctgaataagagatcatgtctcatgaggctcagaatggccctcaaggctgccattgcctttttcttcctaacattcctgccacatctgctcttgcatcatatctcagctaaatgaccattagctgcagtgcctccaagtcccctagccacacatctgattctgtcacttctctctctgctaacaaatcttcaggaactcctcaggccttactgaatagagcctctttctttaccatgcctgggttcctccccagtctgagtggcctgcctggaggcccctttcctgatctgaaccctcactctggccttgccagtccacacactgcctctgaacaaaccatgagctttgacgtcttagccttgactcctcctgttcctggtgcctggatcctttttcttctgtcaggctaaattcttcaatacccaattcagatcctgtaaacctattctaggcaccccaccccaggcaagaagtgaccacctcttctccaggctcctactcttgtatgtccccatgatacctgaaactcaacaggtacaaaattgaattcggccctcctactccgtattcctcttaggcaaactggacccctctttcttctctgactcaagctgctcgccaattctgtgtcttagtaattttcaagtctatttcttctggactgcgctgtagccaccttcctttgctgcccagagtctaattagatctctttcaacatatatttgatcattttactctaaaagctgtaatacttaggctccctgcaacttcttgggtaatctttagaatcctaaatacacaatactaagtcctgcatcgtcttggcccacttcacccagcttcacccctcttgcacatctgcatcttggcctgtgagctggtacctgagtccatagtgccattatcctacaattcccacttggtatttcaaaatccacctaagattttgccttgaggacttggcctctccagcatccttcctggtagagcactggctctattggaggagatcagatcacacttccttcatgtgcccggccccactaggctgggatttcatccagtcctcacactggactcaaatgatcagaggcagggatcagcagtgacagttttcagcagaaagtagtttctgctttaagttaaatctttccctttacttttctattcctgcttgtttcaaagcttttagcaataataatacctgcatctatttatttcacagaacaaatttcacacaggttaaaatcatctgataaagacatgtttacactaaggacattttcaagcagttacatcaaaatacctgtatcaatgtgttattatcaaatatctacaacccccacccagttctttggctggatgaggtaagggtggctggttcatttatgggagtaattctcaactttgggtactcactgtcaccacctgggtcccaccttcaacattctcctttcattggtcctgagacttgttaaaagcttcccaggcaattcagtttgcacgctgtggggtttctgcagagtgagctcccaggcctgacaaagttgtcctggcagtgcattcatggaggagaggggcaggtagggtgttctgatacctgttcttattcgtgtgctgatttctttacttttacagtttcagcagtgcacaaagaaaccaagcagttcttcactttatataataccctggatgataaaaaggtttatttggaaaaagaggtaagaacatttataaaaagaaaatggctaagcagctaacagtgcagttgactccaggaagtcaaatgaacttgatgtttgggacaggtatgttcagcattagcagaaagagtgcctattttatatgctaagtgctggcatacccagtcagaaagtgcaagattccttgggaacccagactgtctgctgtgaagtgagactggtagacagccattctagagtgctgtgggggaaatgccattgttaaaaggaacacaatggaagctctggagttggtgagactagtttgagatttaaaggaagggaggaaccagctgaatgaaatgggggtggtgggcttgttatagtttacagggagaaaatacctgtttaatcatcagtggccgacaaaggcgtgaactaaaaggtttgtaaaattcaaagcaggggtgaaagggtcactgtcactcccttcgtcttttttttttttttttcttgtcttttttttcttttattattatactttaagttttagggtacatgtgcacatttgcaggttagttacatatgtatacatgtgccatgctggtgcgctgcacccactaactcgtcatctagcattaggtatatctctttttaacatttaaaaactcaggttaaattaatggctcagggctttcccaagttgatgacaaacggttggagcacagtatgcagatatgtcttaatttaaaaaagagaacagtcctggtcttcaccatggcagcatagtgtcctgaagagaacacgggctttggcgtcagtcagatttgggtttatttgggttttaatgtggcctcttttttctcacctgtaaaatggggatgacacctaattgcattgatgatgattataatgcggacagaatgagaaaatgtaaagttccttacacatggtggattctcagtacatacttgttcctaccctccccctcaccttgaggttgatagaatgtgttttcattttgtcaccttgtagtctacactaattaccactttaataaggataatattacaaatgtatcttttacctgaacccaaattgaggcatctgtaattactgtcacctttactgcctgctgtcagacaaaccaggtagatctctgtcatcctagagggtgctccttgggaagctgttttatttttttctgtatccggggcttacacagtggtaggcgtataacagacatttgataaatgtttgaatagatgaatgcatttcatgggatttgcatcagacctggggaatagctctgtcccacatcctggccttggggccctcctacctggcaaaggaaagatttgccaaccctgacttagggataggccagccccttcccaaagaccttaaaccccattgaccttccttcatcagcagtgtttaaagttgttccactgtttaaaaactaggaatattgcgaggcagactggggagctgggctttctaattccaagccatgttaccagttagaatgttacatttgaataaatttggtattttattttaaatggatttatgcctgtgatagtttaaaaccttcctgtggagtactaaggacaagaaatattctacattgctgactgtgaacctaaagttcacatatggtaattacttagttctgaggccccaaattgagtagttttatggccagaaagatgacccaggtttccttactcctgcctcagagcccttcccaggactgtatcattggggcagataagaggatttgctgcggggctaaggcagtgtccacggggccttgaacagtgcatccccttggaggcactcagccacccagcagcttagcttgctgcattggcgagaagattctgtgggaaggaatagggtgtaaacgactctcactttccacactgtctgactcccgtaagctgttatccttgaaaataaagtgcagtgtttggcaagatagaaagggctgtggtggcagtttgcctagagagccctagtgttagcttagtgtcctctcagctgggatccagttcccttcaaagcaccttctccctacattcctgtgggaatgccctgtaggaagagggaattttctgtgagaagaaggtggattccctgaggaaatctgtgagacagaacatgtggctaatttttttttcatatgttactttaatcttcataaacaaggcatgtgttccttgcagaagcagtatgtggagacagccaagcttgcagcagttgcagtagtgtggaaatctttttgcctgtcttataatttcgtttgtttttttacttccccagattagtctgctgaactcaattcatgagaacttctcacagtaagtactgtcagtcctccttcccactaataccctgccggcctgcgctttgaattcagcccacctcacattgctataatgtgcttgacaaaggtacatgcaagacttaacactgggtatgtgattcttactcttttagcccttctgctaagtatcttgtttacactctccttgagtacctgcaaaactataatgatagtagagtgaaggaagagctgacgaaaaaagttaactttcaaatactttgactgtacccacctactaaaatctctctgtatgttatcaaattaatatttgttaatgaacacatagagatgctttaaaatttacataatggaatttatataattttttagattttttaaatctcatggtagattttttttggttaatgtgtacattgttctctaaaaactagatgtcaaggcccacctgttcccaaatcaagccctcaagcatgtccatttgcccacccaccatccagcagccccaggacttgctccttggagagcatgcttcccttctctctggcacaaatctctgctgtcctctggcaggcccttctctctggcacaaatctctgctgtcctctggcagatgacaggggacacattgtgactgacatcttattgagttacaggttctagattttaagcttcttttcttaaaaaaaaaaacaaaaaaccacagcttcccctggttttaggaaatctcagaatatgtctcccagtttcaagtatctgccaatcctcaaattttgtaaaccaaatgaaattcattacttatgcagtacatgccgtatttcaaataaataatgtttttgttaattttagtcacattttactgcaagaaaatacatattagttatgaaagttacagggaaagtatgacaaaaaagattaacatgcaattataagaccaggctaatttccatgccttctcagaggtttagcatccttaattgcctgggatcccaggggcccccgtggctccactgtgcgttacaaagacctgattgcctctcctaagagtcataatctggatacagagctgactgcttggcatttccccctgcctcagagtcctgtgtgccggtcataactctactggtttttctttcagggccatggcctcccctgctgcccgggaccagtttttacgtcagatggaacagattgtggaaggaattaagcaaagtagaatgaaggtcagatggcttcttttctgtaatgcagcccaggttttatagtggtgacagggaaggtcctgggaagaaaaggcctcttctggtagttggggagtgtgccctcaatcctgaaaagacacatttctacagaggtattcccactatgcgtcttactctgtaatgggcagggcctgtctcatgagctgcctacacccaggggttccaaagttgctgttagcagtagctcccaggtattgaacacctattgtgtaccaagcattgtgctgacattcctaaaagacctctgaagtgaacagtatcacacccattttacagatgaggagaccacctttcaccagcaggcttccgctcttgactagattcacttcctcggtggatctgtggtacctgacattccgccacaagagattcattccttaggaatcttaggatctcgagagcattttggttttcaggaaccctctaaaaaagagaaatcattgctgaactgagttctgccaaattgagaggaaattgagtctcagaagtctgaagagaacagagaggccccactcagtcagggtgcagcatgggattttcctacagagacagctgcagtttcctaccaccattctcagatgaatcctaaacagtacctccaaatatctcttgcttatggtcctgttttaaaaatgtatcacaccagagtggttctccgacatggcagtaaaatcttccggggacgttgggtttctcctcttacgatcttggggcagagggctccagtgagtgatgccagaatgtaaacacatgagaaagaaagaattgtccataggtcctgtcatcataaaaaaccctgttacagaagacaaacattcaagttgcctgtaatctcatctcacaagagatgagctaagggcagaagtgctccatatccctttccctgtagaaaaatatcattaatctctctgtgaatgacttcaataaaacgatgtcaaaggaggagaaaaaaagtatcactagtaacaagcacgatttctcaagactattcagccgtaaaaatgagaacgacataagtcagtgtttgcctatatatgcacactcacccaagccaggataggctgtcttgcagagggagaatgcagtcccctctcagtgacctggggtatgagtaggtggagggcagagaacctggctgaccaaaagcctctgacaacccaggtgtcagtgtgttagacgcttccaccttgccattgctctgcaggaagctgctctggttcatagtcaagaacaacaggaattcatggggttttttcctttgacttctgcttcgtgtttacagagagcagtgtaaacaggaagtggaggccaaaggaaaaaactccatgaattcctgttgttgactatgagccaaagcaggggaagaaatgggcctcaccccttcactctcttcactctccccgaggaggcttcatgctcttggcccctcagtgctgaccagtgtggaaaggcgctgctgtatctgtctctcccctccatggtgggtgccaaatgggtcaatggcacccagggcagagtgggctctctttctctggtctgcatccctggtggctgatgtagcacctaacccatggttaggccctcaaggactatttgctgaatgagtgaattctttcaacagagtcaaagagcagttctcagagagggctccagatacgctttgaatgttgaatgttgatagacactgtgaatggaacagcagtcacttggatggatgtgttttattgtgtttgtttaaaaaaaaaaaaaagctttccctgtaacagtgccttaatgggtcctgctctcatagatgtggcaggggagtctgtcctctcaagcacaggtttctcagaaccagcaggttcagagtgttacatagtagaccagcgctgggtaacaatgaccgaataggtgtttatgccccgtctgagggtttctgagtaaagaagaggtcacatatcagtcagcattttgacctcactcagaggagttaaggtctctggatctctggaatactgtgagcaagtgcttggcacaagcacttcacagacctagggtgtgaagaggtgataaggagggaataacaatggtacgtctgagtaaggggacactgagaagagtgtgaaaatgaagcttaaatcaaagagtcaactcctgcttctcatagtgagttggcattctaggatgtgaaatgttgagaagaaaaatggtctttattgagcagctactatagaccaggtgatggatcattcacttaccatttcatgtcccaagcttcttgtaacaaaactggttatctaggtgatattcttattttagctaaaggacgtagcattcaaaaaagttaaattagctgtccaaggatacacagtgagtggcagaactaggatttgaacccagcctttctggcctcaagctcatactatttctaggttgccacactaactcccacagtggatcctggataaattcataattcaagcgcattgctacctcactaggacataatcagtcacggtgaagtgttttgctaaagtgcagagcagagaggaaaggcctgagatagagctgctggctgtcctaataagagagagggacctagctgtgaggtcctagccagtgcagcagaaaagatgtctgctgctttgagagttggagcccacgaaggaacagtagtgggaactgcggtgggctggtgtgtcactgtgacaggatcatgagtgggtgtcagagacccatgcaggcagcattaggggttccatcgacagggatcaggacttgctgctgagccagggctccaagtgtggtaggacaccccagaggggactggccactctgggagacctaggcacaagggagggcaccaaactggagacctagcatgggtgtgcaccaggcatccgtatgcagacctgtggaaagagcagggcacagggtcttgggactcaggaactgaatgcaaggtcaggatttgactaggcaaatcagtccccatatgtggtgggtctttctctgaacagcattgggataggccttggggacaccaagttgcatttgtcctgtgtagtcaacagaagcctatagtgtggagggaactactgaataaaatgcagtcaattttacctatagcttgtgtttaccaaatccctcccaaagtgtaacacagaaatcatggtcaggcatcagcaaagccacagcaaagcatctctcagaatttgattcaacaagcttttgagcaccggccatgagtcaggcacccggtctgtaccgtaactcttactgccctcatttcctggctgattctctgggtttaccttccagacatacagcacatagcattgccagccctgctctagtgtcctcagagagcctctctgagcttccaggctgaggaggccatgcacccaccctcctctccgtcacctccccccgtgtcattttcctcacaggaccgatcagtgttgcgaatattttgtgtgtctgtttgtcagggtgcttgcttaatgtgaatctctagaatgtatgctctgtgagagcagtgactttgccatgttcaccactacacgtagctactcagtaggttctaagtcaatgtttgttgaatgaataagcttttggataccttagaaaagtctctttaaatcaaagcctagcatctatttatgagatcaaaatcctgaaaatatcctaaattgtctaccagcaggaagatgggtaagttagcaatcagcaggaatattgtattgtttttaaaatgataatttgtagaaaatttataatgacatggaaatacttacattaaatcaaaagaggatacacggttttattatatgagcacagtttttaaatcagggtttctcagcctcagcacagttaacatttcgggctagataattctttgctgtgggggtgtcctgtgcaatgtaggatgtttagcagcattgctggcctctacccagtgattccagtagcacccacttctcgcagttgtgacaatcaaaactgtctccagacactgccgggtgggggatggggggcaaaatagctcctagttgagaatcaccaacctgtccattgtgaaattgtagtgagaaaaaaaaatggaaacagttaatactcagtgatagaaaaattgctgaataaattgtagagcctccatgtaatatgcaaataaattaaccaacctcaaaaattatatattgaagcttcctctactgtaaggaaatccatgaaactgttaacaactgttgccttttggatgttgccagtagcccttgggcagaacatgtcttttcgtcaccatttcccacaatgtttcaacagatggaaaagaaaaagcaagagaacaaaatgagaagagaccagttgaacgaccagtacttggagctgttagaaaagcagaggctatactttaagactgtgaaagagttcaaggaggtaagaggaaggctgggtagcacattaaggctaacgtgagatatatgttcacctcaaaagtagccactaaaaaacagcagttttttggttttcctctggtctgtgaagggaaataacaagacagagtgtgatctggcagtgaagtgtggcgtctaggtagctgaagattgcgtttttctgtggcccatcttgaggtctaattaattgttttaagacatcacatcactttagttttcctaacacttagtaagcacattaactcacaaaatgactccatcagtccgtatcaagggccacttggaaacagcatttgttgtggattcagatatagaatcttctttcctgccaatcttagggtggggagggacctcaagaagctgtgtgggaagagagaactttgaagtgtcacaggcttggattcgaatcctacatttaccacttaccagctgtattttttggcaatgacctaatccctcccagcctcagtttcctcattggtgaattccgttgcgtcaggtgagaaatttgaaacatccagcaccaggcctggcacctcctaacacccaacactcaactgaatttcggttttccctgtttttccttcctgcatttgggcagttactcttcattgttccagaaagaaaagtgcctgcccttaagagattttccaaaaagacttcatttggtcccttgctagggtctcagcagctttattttaaggaattccttctccctaacctaaatccatgtggtttcagtgagtttagagactgctgaaaatacagcagagttaaaggtagattgtatcctggtgtttggtctgcagaataaaaaatgtagtctttccatgctcataattttgttcttaatttaagacttttcttccttcctcatctttcccttgtcttctacgtatttccttatctgtgatttaacttctagaagccacatcccataggcatttcaaaatctcatcttttccagtgttccagctcctactatacccctgggcagatgccaggttgtaacgcagacctcctcctccttaaggagcatacgctgtggtgggagagacggatggcaagctaagaacaagtcataacaaataagtagtaacaattccagactttgccatgtgaggagactggtttaggtagtgtggtctaggagggccctctagggtgagcaggacctagccatcggaagaaagagttcttcagccacagcagtgcaggaatggggagcggagggtctgcggctcagtctgggactcctttgaggctagcacaggctgcagctgaggtcccagaagggccagtgagtgaactggcagggaacaattaggaatttgctgccctactcagagctcctcgttccctttaatcaaaactaacaaaaggagaagaactgcatctcaaatgctgcttggagacacccttttgacagtgtagaaacaaaaagcaagttgaggaggataagtataagctgtcaaagcaattgaaaatgaaatggaaaagctcattcttgccctgcaggctctcagatgagagcttaggatgacctccaaggcaccagttccttcagaggtgttaagtggcttgggtctgggttcccacctgtgctggcagtcattgtcacaccagacacagagggtggttccttcagatccagctaagacacctagaccagattcttgccaggcctctttccttcagtccaaagcaagtcagaagagggggaggggatgaaatatgtttttgcatatttcttttttttattatactttaagttttagggtacatgtgcacaacgtgcaggttagttacatatatgtacatgtgccatgttggtgtgctgcacccattaactcgtcatttaacattaggtatatcttctaatgctatccctcccacctccccccaccccacaacaggccctggtgtgtgatgttccccttcctgtgtccatgtgttttcattgttcaattcccaactatgagtgaaaacatgtggtgtttagttttttgtccttgcaatagtttgctgagaatgatggtttccagcttcatccatgtccctacaaaggacatgaactcatccttttttatggctgcatagtattccgtggtgtatatgtgccacattttcttaatccagtctatcattgttggacatttggcttggttccaagtatttgctattgggaatagtgctgcaataaacatacgtgtgcatgtgtctttattgcagcatgatttataatcctttgggtatgtacccagtaatgggatggctgggtcaaatggtatttctagttctagatgcctgaggaatcgccacactgacttccacaatggttgaactagtttacagtcccaccaacagtgtaaaagtgttcctatttctccacatactctccagcacctgttatttcctgactttttaatgattgccattctaactggtgtgagatggtatctcattgtggttttgatttgcatttctctgatggccagtgatgatgagcactttttcatgtgtcttttggctgcataaatgtcttcttttgagaagtgtctgttcatgtcctttgccccctttttgatggggttgttttttttcttgtgaatttgttttgagttcattgtagattctggatattagccctttgtcagatgagtagattgcaaaaattttctcccattctttaggttgcctgttcactcctatggtagtttattttgctgtgcagaagctctttagtttaatgagatcccacttgtcaattttggcttttgttgccattgctgttggtgtgttagacatgaagtccttgcccatgcctatgtcctgaatggtattgcctaggttttcttctagggtttttatggttttaggtctcacatttaagtctttaatccgtcttgaattaatttttgtataaggtgttaacgaagggatccagtttcagctttctacataatggctagccagttttcccagcaccatttattaaatagggaatcctttccccatttcttgtttttgtcaggtttgtcaaagatcagatggttgtagatgtgcggcattatttctgagggctctgttctgttccattggtctatatctctgttttggtaccagtaccatgctgttttggttactgtagccttgtagtatagtttgaagtcaggtagcatgatgcctccagctttgttcttttggcttaggattgacttggcattgggggctgttttttggttccatatgaactttaaagtagttttttccaattctgtgaagaaagtcattggtagcttgatggggatggcattgaatctataaattaccttgggcagtatggccattttcacgatattgattcttcctacccataagaatggaatgttcttccatttgtttgtatcctattttatttcatcgagcagtggtttgtagttcttgaagaggtccttcatgtcccttgtaatttggattcctagatattttattctctttgaagcagttgtgagtgggagttcactcatgatttggctctctgtctgttattggtgtataagaatgcttgtgatttttgcacactgattttgtatcctgagactttgctgaatctatcagcttaaggagattttgggctgagacagtggggttttctagatatacaatcatgtcatctccaaacaggggacaatttgacttcttcttttcctaattgaataccctttatttccttctcctgcttgattgccctgaccagaacttccaacactatgttgaataggagtggtgagagagggaatccctgtcttgtgccagttttcaaagggaatgcttccagtttttgcccattcagtatgatattgactgtgggtttgtcatagatagctcttattattttgagatatatcccatcaatacctagtttattgagagtttttagcatgaagtgttgttgagttttgtcaaaggccttttctgcatctattgagataatcatgtggtttttgtctttggttctgtttatatgctggattatgtttattgatttgcatatgttgtaccagccttgcatcccagggatgaagcccacttgatcatggtggataagctttttgatgtgctgctggattcggtttgccagtattttattgaggatttttgcatcaatgttcatcagggatattggtctaaaattctcttttttggttgtgtctctgcccggctttggtatcaggatgatgctggcctcataaaatgagttagggaggattctctatttttctattgattggaatagtttcagaaggaatggtaccagctcctccttgtacctctggtagaatttggctgtgaatccatctggtcctggactttttttggttggtaagctattaattattgcctcaatttcagagcctgttattggtatattcagaaattcaacttcttcctcgtttagtcttgggagggtgtatgtgtccaggaatttatccatttcttctagattttctagtttatttgcgtagaggtgtttatagtattctttgatggtagtttgtatttctgtggtattggtggtgatatcccctttattattttttattgcgtctatttgattcttctctcttttcttctttattagtcttgctagcagtctatcaattttgttgatcttttcaaaaaaccagctcctggattcattgattttttgaagggttttttatgtctctatttccttcagttctgctctgatcttagttatttcttgccttctgctagcttttgaatgtgtttgctcttgcttctctagttcttttcattgtgatgttagggtgtcaattttagatctttcctgctttctcttgtgggcatttagtgctataaatttccctctacacactgctttgaatgtgtcccagagattctggtatgttgtgtctttgttctcgttggtttcaaagaacatctttatctctaccttcatgtcgttatgtaccctgtagtcattcaggagcaggttgttcagtttccatgtagttgagtggttttgagtgaggttcttaatcctgagttctagtttgattgcactgtggtctgagagacagtttgttataatttctgttgttttacatttgctgaggagtgctttacttccatctatgtggtcaattttggaataggtgtggtgtggtgctgagaagaatgtatattctgttgatttggggtggagagttctgtagatgtctattaggtctgcttggtgcagagctgagttcaattcctggatatccttgttatctttctgtcttgttgatctaatgttgacagtggggtgttaaagtctcccattattattgtgtggtagtctaagtctctttgtaggtctctaaggacttgctttatgaatctgggtgctcctgtattgggtgcatatatattcaggatagttagctcttcttgttgaattgatccctttaccattatgtaatagccttctttgtgtcttttgatctttgtcggtttaaagtctgttttatcagagactaggattgcaacccctgcctttttttgttttccatttgcttggtagatcttcctccatccctttattttgagcctatgtgtgtctctgcatatgagatgggtttcctaaatacagcacactgatgggtcttgactctttatccagtttgccagtctgtgtcttttaattgaagcatttagcccatttacatttaaggttaatattgttatgtgtgaatttgatcctgtcattatgatggtagctggttattttgctcattagttgatgcagtttcttcctagcctcaatggtctttacaatttggcatgtttttgcagtggctggtaccagttgtttctttccatgtttagtgcttccttcaggagctcttttagggcaggcctggtggtgacaaaatctctcagcatttgtttttctgtattttatttctccttcacttatgaagcttagtttggctggatatgaaattctgggttgaaaattcttttctttaggaatgttgaatattggcccccactctcttctggcttgtagagtttctgccaggagatcagctgttagtctgatgggcttccctttgtgggtaacctgagctttctctctggctgcccttaacattttttccatttcaactttggtgaatctgacaattatgtgtcttggagttgctcttctagaggagtatctttgtggcattctctgtatttcctaaatttgaatgttggcctgccttgctagattgaggaagttctcctggatattatcctgcagagtgttttccaacttggttccattctccccatcactttcaggtacaccaatcagatgtagatttggtcttttcacatagtcccatatttcttggagactttggtcatttctttttattcttttttctccaaacccctcttctcgcttgatttcattcatttgatcttccatcactgataccctttcttccagttgatcaaatcggctactgaggcttgtgcattcatcatgtagttctcatgccatggttttcagctccatcacgtcctttaaggacttctctgcattggttattctagttagccatttgtctaattttttttcaaggtttttaacttctttgccatgggttcgaacttcctcctttagctcagagtagtttgatcgtctgaagcgttcttctctcaactcatcaaagtcattctctgtccagctttgttccattgctggtgaggagctgcgttcctttggaggaggagaggcactctgatttttacagtttccagtttttctgctctggtttttccccatctttgtggttttatctacctttggtctttgatgatggtgatgtacagatggggttttggtgtggatgtcctttctgtttgttagttttccttctaacagacaggaccctcagctgcaggtctgttggagtttgctggaggtccactccagaccttgtttaccttggtatcagcagcagaggctgcagaacagcggatattggtgaacagcaaatgttgttgcctgatcattcctctggaagttttgtctcagaggagtacccagctgtgtgatgtgtcaatgtgcccctactggggtgtgcctcccagtttggctactcgggggtcagggacccacatgaggaagcagtctgcccattctcagatctccagctgcgtgctgggagaaacactattctcttctaagctgtcagacagggacttttaagtctgcagaggattctgctgccttttgtttggctatgccctgcccccagaggtggactctatagagggaggcaggcaggcaggcaggcaggcaggcctccttgtgctgcggtgagctccacccagtttgagcttctcggctgctttgtttacctactcaagcctcagaaatggcgggtgcccctcccccagcctcactgccgccttgcagtttgatctcagactgctgtggtagcaatgagtgaagctccatgggcgtaggatcctctgaggcaggcgcgggatataatctgctggtgtgccatttgctaagaccgttggaaaagcacagtattagggtgggagtgacccaattttccaggtgccatctgtcacccctttctttgactaggaaagggaattccctgaccccttgtgcttcctgggtgaggcgatgcctcgccctgcctcggctaacgctgagtgcactgcacgcgctgtcttgcacccactttctgacactccccagtgaggtgaacccggtacctcagttggaaatgcagacatcacccgtcttctgcctcgcttacactgggagctgtagactggagctgttcctattcggccatcttggttccaccccctgaaaatcctgcatatttcatttaaatatatttcacctcacatttagcatgtccttttattttttggtgttaaaattgtcttagaaaataattgtgatggtgggtagtccttttttttttttgaacatattacttggcaaaaatttaaaactggcacccacatgtcagtgttccagcatctttctcccacaagctcttttgaggtaatttggggccaccacaggtgttgaggaggaggtgacgatagggacttgcttgctactccacagcctctaccccatatcttcagccagactagttctgctgcttttctgttttatatattacagtttaatttggactttcatccagggtggagccttctccagcaccctctattttgccttctcaccatcccctcactggccctctacttctgcgttctgaattctcactgcatcctgggcccaagcacttgtagtgtgcaataattattcttcatggaaaacacaacattgttgtctaccatatggttttttgccaccttagcggttgcctttgttgggtttgatttaccccacgttaaatgggcaacagttatgcaccgtgggcgccatcaggtcatgatactaagatttaaattcaatagcactgatgaattcaaaccctacatttttgtgaagctggctttcggtacataaccttgagtgaacttagctctctgtctggcacctagtgggcatggatagagttttcagcaggaaagagactgaggtgatgagacattttcccttttcttctagaaacaaacacccaaagcacctcttttgtatttgctttgaagagacggagaatatgattctgtaggctcacatactaggtgacattgcaggctgtctctaccgaaaagtacaagcatcgcctagggttctgtgacacacacagttccccacggtagagttctgatgctgtttttgcctcatttaaacggtgaggtgggtgacagtttaaacttatttactgtttcatatttttgttatggaaatcttaaaaaatatacaagtagagagtgtagtataacaatataatagtgtagctctctgttcttgttccatctcttcccctccatttgttttaagctggagtcttttttccccccaagtacatctcaagccatttttaaaaggaacccagcatcaccttatttctgtccccccactgccctgcccatgaactgcccctctctccccaaaaaggtgctcaaaagtgtcagagcaccttgcttctgacagcctcaaagtattcagccttaccaccaagacaagcacccacctgtttccttgctccctgagtgaaggacacatctgaatcctgtagatgagccagcactagtcttagcaaaaccaaggtcgttgtggtcatgctgccatcacactgccaaaagatcagggcctccagagagctgggagcacctgaccctggcccagggagctggaaaaattgaccgtgggggttttgagtgcagaaggttcaagggtaaaagtttttctcccacaataaatgcacctccaggaaaacacagcccctggaggcctgaccactgccaagcctgtgagctctacctctccgggccctttctgctaccacttttatctcccaatttaaaagcaggactccttgtgaccctgcccagagaatggggtcagagttattggaggtttgctagcagatggaggtatcatgagctactaaggccagtggaacaagggcaggaggcgcagttagaagcttttgaagatgatcccagagggaacatgaaatgatgcagaggtgacttgtgccactggatgtcagattctacaggcagaggatgggacagtgacctccttcagtgataacctgtagcacgtgccattgatttcatacagttcagttttaaggaagggcaggttatctttttttttttttttttttgagacagagccttgctctgtcacccaggctggagtgcagtggcacaatctcggctcactgcaagctccgcctcctgggttcatgccattgtcctgcctcagcctcctgagtagctgggactacaggcgcctgccaccacgcctggctaataatttatatttttagtagagacggggtttagtagtagccaggatggtctcgctctcctgacctcgtgatccgcctgcctcggcctcccaaagtgctgggattacaggcatgagccactgcgcccggccccattatctcttgatgaatatctcttatcctattttctgagtttcttaaagacaagaatattcttaactttcactgttagaactctatgtgttttgcctgctatgtaaactagggctcccttttatctctttttaggctgctgtctccaaagcctttccccactccctcaccatagtaggccaagactggcagataagtgtgctttctgcttctatccccttgaagtttcacagacttcatgaagtcttttggaatgacagtgcctatcctctcatcctattttcagtctgacagcccagaaatggagcatcattatagttatattggtgttgatgtcagtaggtcatcaggaagcttcaccatcctggcggcagcatgccaagagactgggttggccaggagatgtctcccatagggatatgggaagggctttgagaccatcttggcctcacatgggtgctaatgtagtcaccactctctctatactctctgctttccctccaggagggccgcaagaacgagatgctgctgtccaaggtgaaagcgaaggcctcctgaacatccccagccgtggctgtatgtcattgattttacttttaagcaccgtatatcacctacaagatcatgaaatggttctgaaagcgacagtagagagatgcagttgtgatgatttcaacaacctggatgttttctttctcctctttgcttccattcatctctgttggctgctgttgatggagtcagacagtaaacacgtggcttggataacacccatcatcctatgaagaatatagggagtacttgttctctgttgattcaacttttatgtctccagtaacattgcgcttatgaaggtacctgtatttgtatggactctgaataaagaagaattcatttgtttagcaagtattagttcagcaaccactgagaaataagcactgaggaagattcagagacgtgtaaaacacagttcctactgcacaagtacccagcaggtggcccagggaggcagatacagcacacttgaccgcagaactgggctatccaagatgtttttcagtaaacagaaggcatttagctgaaatgatcagcccatgtagtgttggtcacttgggcctttcacctgccatggtaccttttgttcccagctcctccaggtgccagccagcaggcttggtggtgacagcaactggaacgaaagttcagtgttgttttaatttttatacgttactcaagttgatttctcagaaaattgaaaacagaccttgtgctgaggacacgtcaataaaaattataccttcccctgccccaatgttcatgtgagtcacagcatgcagaggggctgtgcatccccctcattgaaggcacatttgatgaggctacgctgcagatgggtcatggtctgagccaggagagagatagacactgttccctgcactcaaggcaagtagggtgtcaggaggaagagcagtagggtttgcagagatccagggaaacttcctggaggaggcagcatttgagccctatctaaagggagaatcggatgttgataggaagactgttttaaatgaaaatacactatgattaaaaacccaagagagtgcagaggagtacaaggcatgcatgttgggaaaggagggaataagctagtctctgcaggaggcttcagagacccgtctgggaagtagggctgagactaggctttggagggccttgaagggcagctgagggttgattttaatccttggaaatgaccagtgcagatcaaacatggagctcctgctgccctggtcctcaggagtctggtaactcagtcatgttctgtaggtttgtgctccattttgcataaatcttgcaaacataccaggtggcaggtttgcacagtaacacaaaagcttaaacatgtcaagcaagtggggcattcagcagccacagaaatgtgttcatttttagtccctaatggatgtgattaagcagggctgatgtgtacagatttaaaaacacacacacgtgctggattaaaaacagccactggtttcagtgccagggccagcaaggcctacctgagccaggcggaagcagcagcttgcaaatagaaactgccacctgcgagcgcttcttgggtcatgtgcagctccacctcagctggtccctgagccgtggtcatgtgggggttttgaagggctaagttgaagcaagtaattgcaaaagaacaggtggcactctgagggcaggggaaggagacagaagtttgactgcgtttgaaattatttcagtcagggaaacatctgcgttgtcttgttaagcagcttgtaggcccacccctggctaactgaactttgtgagcagttggggcagttatttggatatttgtccaaaggtggtagggaggcagatgacattctggggttactggagtccacctctgtgctgatggggaaagtatggcatgatgaatccaaagcaaccagtaattctttttgaaagtgcaggcatttattttgagctgtatttcataggagtttcatttggtttggttttggtatagagaggtgtccatagatctctattccctttttttttttatcgacaaggcctactacggataaatcagtttttgttgcctgaatacactttgaattagactacagaagccagtttgagctcaaatttcacacttgctgcagacaactctcagtgtggacagtgcctttctgagtaattaggatgttatatgactttttggtgaagccgtatagggtaaggagatgccccaaggcccctgatcatttcagaagccacctggagcaccagaaggggtcatcttcccagggctatggctctgtgtgcttagacatagtatggaattgtgctctaagcccacaggcttctccagagttaaaaggaagcaagaacatccttaagttactttttcaaaatatgcgcttcaggaggaaccaggtttccccaggagagagaggctccctgctcaatcagcacagggagttgctagcgggcaggctgcccagtgctgtggaatctccgccagcctctgggttgggggctccctcccacttcttgcttcttatggagtacatgggactgctctgctttaagccgcgatcagagctgttgtgagcaggacaagattgcgtgatcacgaggtgcgtggggagatgctaggacatttgttgatgtctttgacctgtgctccgtctctgttggatgactgggttagctaacaccactagagggaggtacagaatgttaaacagtcgtcagagtcacactgagggttgttttaacagagggcaaattcccagtttgtcaagcatatctctgttagagtccgaagttcatggttttaatggttctagctcgtagcccttaatattttcaggatagctgggtcctgccagtgtccgctgagtccatcagcacaaccagaaggtccagggtccaggcatgggaagcattctctgacaataccgagccctcgggacctcctgaaaccttgagcagaggctggagaagaccttcagacagtccttttactacctcacaaagtgccatgcccgggacctcagacctcagggttgtgacgttgttgatgttgtcaggccccagtacgtctctagtgaccgaagcagacctgcctgaaagggcactccggacagtgagccctggctctaacctgtgccctcatatttctgctgcctcatatggtcttgtttgcccactctgtaggtgactgatcaccctaaaagggaggtaggtatctagcagtagcacagttactttgagcctgaccacttgttctgaagtgcagatgttgaaacatgcattgaggaagaacactttaaggaagcactttatgatttactcatggctggtgttggcctcaaagtaaaagaacatcttaatgcagaacagtacaataaagagccccataggatggatgccatcatctgtccccatggttgggattgccaaggaaagtgccttgttctgtgcatcttcagaatcccccaggccctctcttgatccttttcatgaagtccagagcattccttctattacaggctgaagatgcattgtaaaaggtaatgctataatagtattccctcttctcaataaatgtgcaaaactggagaatctggtgctgatctgcagcatacttgacaacacagggaataccgtggatgttccacgccagccttacatccgtccccattgcctgcccatgtccagtggccctgcgcaacaaaagtaagggcttgtcttaccacactctccccagcatctagctcaaggtagatgactgactgggaaattccggttggataaaatggcttttccacattgcaactttgcatctctattaggaaaatttagattgaacctttcctctacttgatgcttagtttgagaacagttttcacaactttagagggtctctctcagagtatgttatactgtaaccttgaagtttgagatgaaacaaggtgtcagaggttttgaatctttcaaaggaattgccttttacagattttttttttattccctaagaagggaaaaagagagggaagaactacactaatgttagagataaggtatgttttggctcaaaatgtgtcatgaacctaaaggtaacttgatgggcagaaatgtctcagccatgtgaaccaagaagtgggaccacagtgcaaggctgtgggtggcagcactagatatggtggtggcaggagtgtgacatgtaggcactccatgggggacagctggacggtgtctatcaaaagtgcaaatgcgtaagctctttgaactagcaatgctactcctaagaattgtacctgtgtacaaggtacttgtgtacaagagtttttgttgaaacattgtaatagcaaaaagttggagagtgccaccaatacaggggaatggttaaatacattatggccagcttaaacaatggaatagtttgtagaaatttaaaacaatggatcctgtgtgtgtgtactaccatagaatgggccccaagatgcatgattaagtgaggaaaaaagcccatggtatcctaatgtttggaatggagaaagtgtgtagatgtatgtgtgtgcatatgttttcacacagacgtatacacgtgtatatcatatgtccacctgcatatgcctaggatgtctctgggaggatatctagcagcccggcagcctgaattgcctctgggaagaggggtgggaatgacttttcaatgtacaccttttgtaccttttgaattttgtaccatgtacatgtattatctattaaaaaatagttcttaatttttaatttggtatacttttcttaatagaaccaaaatggaagaaaattctgattctctaaatctgctttcttaaagataaagcctttgattcaaaagtagtgagactctttcttgggtcttgaggcaatgggccatgcaaagggaggtgtccttttctggtggaatagaatgcggcagtgaagcagaggctggctcttctcacactctgggagcatgttgggctggcagagggagggatggggatggggaaatggatggtgatgtgactaatcactgggacagacgggctgctgcagggttccgtccatcttacaaaaatcacagtgcaaccctggtcctctgacttttggggtacaaaagataggcatacctctgagtcatgattcaaggggggctgttaacatcctccagaagccgtgcccatcttgtgtagaaacctgctgtgggtgagccttccccacccctgccttcttttaaaaaccaacacaactctgattttgtccagctccgaggtggccgtgtgtcagccccaagagaggaacatgacagcttttccagtcaggggaatctcactttttttggccaactgctggtttgcggatggatgtctaacccagttatggccagttttggggagactgctgaacttctggcaaagactttcctgatgatcagtgagagatgcactaggagagcttcaccctttcttcctgtgataagttatggaggggggacagggtttgagcaacttcagccatcttgagaccatgaaaagagacatcacaacacactgaggttggcagagggaaaaggtggaaagagccttggctctctgaaggcatgatgagcctctcaaccacactgaggcccacctgcttccatattcttgttccatgagaaaaatgaacctctgttagcttgtgcattcaaccaacaaatacttgagtttcttctatgtgtcaggccctgagaatatagcagtaaaaaaagcagacaagagaacctgctttcctggagctactctccagtgggaaaaaacacacaaacaagagaaatacgtaaatattgtcatgtggtatttcaacatgctgattaaagcacggaaggtatcaggagtgtctggtttggtggcggctgcaattttatattgagaagtgaaggaaggcctcactcactgactagtgagggagtgagtatatagatacctgtgtaaagaacagtccaggcacaggggatagcaagtgtaaaggccctaaggtaggagcatacccagcaggtgagtttgaggaacatgaaggagacctgtgtggggagccactggagggtttttgagaaggaaagcaatgtgatctgggttcatttttgtttgtttgtttgtttgtttgtttgttttgagatggtgtttcgctcttgttgcccaggctggagtgcagtggcacgatcttggctcactgcaacctccacctcccgggctcaagtgattctcctgcctcagcctcccgagtaactgggattacaggcatgtgccaccacacctggctaattttatatttttagtagagatggggtttctccacagtggtcaggctggtctcaaactcctgagctcagctgatccacccgcctcagcctcccaaagtgctgggattataggcgtgagccaccatacccggccaatctggcttcattttaataggcatccctacactggtgcagtggctcatgcctgtcgtcccagcactttgggaggctgaggaggggagatcgcttgagcccaggagttcaagaccagcctgggcaatatggcgaaaccccgtctttactataaatacaaaaaattagccaggcatggtggagcacacctgtagtcccagctactcgggaggcagaggtgggaggatgggttgagcctgggaagtcgaggctgcagggagccatgttcacgccaccacactccagcctgggtgacagagtgagactgtctcaaaaaataaaaataaataaaaaataaggatccctctggaggctgtgttgactatagggagggcagaagcagggagcccagttaagagacccctgaaatagtccagatttaaatataactgaaaggaaagttttataagacaatacttagccttttaatactacactctgattttttttcctgttttgaaaatgctgagcattgaagtgctgctttccatcatcccatcatagcagatgccttttcatggcaggtggaatgtacttccccttgactctgggcttttgcttgtcctatgggttagctgacttgacacaagttttgaaagtatgcttgcatggttgggtttaccttcttgcccttctctcttgagaagaacgtaccctgttggcccaaggacaggatgaaggacaaacagagcaggcctagacgcaacctaaagcttgaagccaagcctagatgagccctgcctagatcagtgaaatcccagccaactcaggcatataagcaagaaataaagacttgctatatgtcacagagacttcgtagtaattgcacatgactattgagaatgtcgctgattgagtcaactaccaaattggtttcatgatagggtgtgacctggagttgaaaagatacctctcaacaccactcaggtgacaggccagaagagcagcctctggggatgggacctacatgtggaatagacactcacagagcacagccatcatgataagaatccacagtccctcagacaagaccaggcatggtagctcatgcctgtaattccagcagtttgggaagctaaagtgggaggattgcttgaggccaggggttcaagggaccagcctgggcaacacaggaagatcctgtctctatacaaaaaataaactttctacatatggctagccagttttcccagcaccatttattaaatagggaatcctttccccaatgcttgtttttctcaggtttgtcaaagatcagatggttgtagatatgcggtgttatttctgagggctctgttctattccattgatctatatctctgttttggtaccagtaccatgctgttttggttactgtagccttgtagtatagtttgaagtcaggtagtgtgatgcctccagctttgttcttttggattaggattgacttggcgatgtgggctcttttttggttccatatgaaatttaaagtagttttttccaattctgtgaagaaagtcattgctaccttgatggggatggcattgaatctataaattaccttgggcagtatggccattttcatgatactgattcttcctacccatgagcatggaatgttcttccatttgtttgtatcctcttttatttcattgagcagtggtttgtagttctccttgtagaggtccttcatgtcccttgtaagtggattcctaggtattttattctctttgaagcaattgtgaatgggagttcactcatgatttggctctctgtctgttattctgtataagaatgcttgtgatttttgcacattgattttgtatcctgagactttgctgaagttgcttatcagcttaaggagattttgggctgagacaatggggttttctagatatacaatcatgtcgtctgcaaacggggacaatttgacttcctcttttcctaattgaataccctttatttccttctcctgactaattgccctggccagaacttccaacactatgttgaataggagtggtgagagagggcatccctgtcttgtgccagttttcaaagggaatgcttccagtttttgcccattcagtgatattggctgtgggtttgtcacagatagctcttattattttgagatacgtcccatcaacacctaatttattgagagtttttagcatgaagggttgttgaattttgtcaaaggccttttctgcatctattgagataatcatgtggtttttgcctttggttctgtttatatgctggattacatttattgatttgcgtatattgaaccagccttgcatcccagggatgaagcccacttgatcatggtggataagctttttgatgtgctgctggattcgttttgccagtattttattgaggattttcacatcaatgttcatcaaggatattggtctaaaattctcttttttggttgtgtctctgccaggctttggtatcaggatgatgctggcctcataaaatgagttagggaggattccctctttttctattgattggaatagtttcagaaggaatggtagccatatgtagaaagctgaaactggatcccttccttacaccttatacaaaaatcaattcaagatggattaaagacttaaacgttagacctaaaaccataaaaaccctagaaaaaaacctaggcattaccattcaggacataggcatgggcaaggacttcatatctaaaacaccaaaagcaatggcaacaaaagacaaaattgacaaatgggatctcattaaactaaagagcttctgcacagcaaaagaaactaccatcagagtgaacaggcaacccacaaaatgggagaagattttcacaacctactcgtctgacaaagggctaatatccagaatctacaatgaactcaaacaaatttacaagaaaaaaacaaacgaccccatcacaaagtgggtgaaggacatgaacagacacttctcaaaagaagacatttatgcagccaaaaaacacatgaaaaaatgctcaccatcactggccatcagagaaatgcaaatccaaaccacaacgagatatcatctcacaccagttaaaatggcaatcattaaaaagtcaggaaacaacaggtgctggagaggatgtggagaaataggaacacttttacacagttggtgggactgtaaactagttcaaccattgtggaagtcagtgtggcaattcctcagggatctagaactacaaataccatttgacccagccatcccattactaggtatatacccaaaggactataaatcatgctgctataaagacacatgcacacgtatgtttattgtggcattattcccaatagcaaagacttggaaccaacccgaatgtccaacaatgatagactggattaagaaaatgtggcacatatacaccatggaatactatgcagccataaaaaatgatgagttcatgtcctttgtagggacatggatgaaactggaaaccatcattctcagtaaactatcacaagaacaaaaaaccaaacactgcatattctcactcatatatgggaattgaacaatgagaacacatggacacaggaaggggaacatcacactctgggaactgttgtggggtggggggagcggggagggatagcactgggagatatacctaatgctagatgacgagttagtgggtgcagcgcaccagcatgtcacatgtatacatatgtaactaacctgcacattttgcacatgtaccctaaaacttaaaagtataaaaataaaaagaaaaattaaaaaaaatgtttaaaaattaaaaaataaattccctcagacatgcctaaagaaacatggagggcacctgttgtttcctgactttttaatgattgccattctaactggtgtgagatgatatacaccatggaatactatgcagccataaaaaatgatgagttcatatcctttgtagggacatggatgaaattggaaaccatcattctcagtaaactatcgcaagaacaaaaaaccaaacaccgcatattctcactcataggtgggaattgaacaatgagatcacatggacacaggaaggggaatatcacactctggggactgtggtggggtcgggggaggggggagggatagcattgggagatatacctaatgctagatgacacattagtgggtgcagcgcaccagcatggcacatgtatacatatgtaactaacctgcacaatgtgcacatgtaccctaaaacttagagtataataaaaaaaaaaaaaaaaaaaacatggagggcatattcaaagggagaaaagtagcatactttatacattatacatgaccaaattaataaaactcttccattagccacatccatcctacagacctggaactttgtgaaattaaattgtgataccttagaaaataaatccacacaggaaagagatgaattcctctaacagcctcccaactccatcttagtcatgttctataggcaaaggagacagagataggacagagacattacacttaccaaggatgttcctagaatgttaactggaaatcagatgtgtttttgtcaatagaattccattctgaatactctgaattaaaaggaatcataagtgcatccttgcataaagtcaatcatcaactgatccgtttcaggaattcaacattttgtaattattgtgagcagttgaagaaggctttactaactgaagaaaagtttgaagcctaaaatgtccagcagaagttgccaccaacttagcaagcaaatagttttcttttaaggaaatctaaacatacatgtgattccgtctgcctgagatgcttccacaatgagagcacgttaagtcaaacccctgccaaataaacattaaaagcacactatccaatagcaagagtaaaccaaaaaattctataggtgcctacccaacgatacccagactctccttgaaaccttcttcctggaatccaactagaatcatgcaagaggattcactatatcaggtgtagtctgcaaaggttcatgcagatctcatgctgcaaaatgcaagccaaagttgaaacatggagtctagtcaggtttctattaggttcctttcatctttctcatgtttggaaacaggcagacttgagtccaaatacctgcctgctatgtactcactatgtgaccatgggcagcctactcaccctcttagaatatagttaagtgaggactatatttaccttacagagtgaatgcaggagtaagtgatcatttgtatataaaacccagtacaacagctgtgcatgatgggggctcaataaacactacttttaaaaatgtattcctgaatgtgcattttatgaagggagaggtggggagattattaataccccctattatctttcagtcaatgagggaaaatcctcagtagacccaagattgagctctgacccttaaaagacaacaatgatggatgactgaatatataatttgactcgtaactacataccttacctgttccacctcctacaggttgtcagtcacctgcttattactttcttccctgccttaattcacgagatttgaggtggcttgtaggaaacatgcagaataacagtaaactataaactgaacataaaacactaggatagggaaatctaaaattggaattatagactggctggaaacattatacacaaataagcaggctactgggttttatataaattccagagttaagccaacaatttggttctgtgcttcttcttcctcaaaatgaaaacataaacacagtcaattaataatcctcattatcatgaaaagaaaacatgtcttcacaaagaatgcaataggataattaactgcatccttatatgaaatgcactgatgagttttataagaactattccaattgatagaaaaaagagggaatcctccctaactcattttatgaggccagcatcatcctgataccaaagcctggcagagacacaacaaaaaaagagaattttagaccaatatccctgatgaacatcgatgcaaaaatcctcaataaaatgctggcaaaccaaatccagcagcacttcaataagcttatccaccatgatcaagtgggcttcatccctgggatgcaaggctggttcaacatatgcaaatcaatataatccagcatgtaaacagaaccaaagacaaaaaccacatgattatctcaatagatgcagaaaaggcctttgacaaaattcaacaacacttcatgctaaaaactctcagtaaattaggtattgatgggacgtatctcaaaataatgagagttatttatgacaaattcacagccaatatcatactaaatgggcaaaaactggaagcattccctttgaaaactggcacaagacagggatgccctctctcaccactccaacatagtgttggaagttctggccagggcaatcaggcaggagaaagaaataaagggtattcaattaggaaaagaggaagtcaaattgtccctgtttgcagatgacatgattgtatatctagaaaaccccatcatctctgcccaaaatctccttaagctggtaagcgacttcagcaaagtctcaggatacaaaatcaatgtgcaaaaatcacaagcattcttatacaccaataacagacaaacagagagccaaatcatgagtgaactcccattcacagttgcttcaaagagaataaaatgcctaggaatccaacttacaagggacatgaaggacctcttcaaggagaactacaaaccactgctcaatgaaataaaagaggatacaaacaaatggaacaacattccatgctcatgggtaggaagaatcagtatcgtgaaaatggccatactgcccaaggtagtttatagattcaatgccatccccatcaagctaccaatgactttctccacagaattgcataaagctactttaaagctcatatggaaccaaaaaagagcccacattgccaagacagtcctaagctaaaagaacaaagctggaggcatcatgctacctgacttcaaactatactacaaggctacagtatccaaaacagcatggtactggtaccaaaacagagatatagaccaatggaaccgaacagagccctcagaaataataccacacatctacaacaatctgatctttgacaaacctgacaaaaacaagaaatggggaaaggagtccctatttaataaatgatgctgggaaaactggctagccatatgtagaaagctgaaactggatcccttccttataccttatacaaaaattaattcagggccaggctcagtggttcacgcctctaatcccagcactttgggaggctgaggcaagcggatcacaaggtcaggagattgagaccatcctggctaacacggtgaaacgctgcctctactaaaaatacaaaaaattagccagacgtggtggcgggcacctgtagtcccagctgcttgggaggctgaggcaggagaatggcttgaacccggaaggcgtagcttgcagtgagccaagatcgcaccattgcactccagcatgggcaacagagtgagactccatctcaaaaataaataaataaataaatatattaattcaagatggattaaagacttaaatgttagacctaaaaccataaaatcccttgaagaaaacctaggtaataccattcaggacacaggcatgggcaaggacttcatgtctcaaacaccaaaagcaatggcaacaaaagccaaaattgacaaatgggatctcattaaactgaagagcttctgcacagcaaaagaaactaccatcagagtgaacaggcaacctaaagaatgggagaaaatttttgcactctactcatctgacaaagggctaatatccagaatctacaatgaactcaaacaaatttacaagaaaaaagcaaccccatcaaaaagtgggcaaaggatatgaacagacacttctcaaaagaagacatttatgcagccaaaaaacacatgaaaaaatgctcaccatcactggccatcagagaaatgcaaatcaaaaccacaatgagataccatctcacaccagttagaatggcaatcattaaaaagtcaggaaacaacaggtgctggagaggatatggagaaataggaacacttttacactgttggtgggactgtaaactagttcaaccattgtggaagacagtgtggcgactcctcaaggatctagaactacaaataccatttgacccagccatcccattactgggtatatacccaaaggattataaatcatggctgctataaagacacatgcacacgtatgtttattgcggcactattcacaatagcaaagacttggaaccaagccaaatgtccaacaatgatagactggattaagaaaat

SEQ ID NO: 503 - DNA, 5711 bp, Homo sapiens
ctgcgagcaagtcacaccagcctacaagccagatataatgaagccaagaaaacgctgacagagctgaagacttacagtgagaaactggacaaagagcaagcagccctcgagaagatagaatccaaagctgatccaagtatcctacagaacctgagagcacttgtagccatgaatgaaaatctgaaaagtcaagaacaggaatttaaagcacattgtcgagaggagatgacacgactacagcaagaaattgaaaacctgaaagctgagagagcaccacgtggagatgaaaagaccctctccagtggagagccgcctggtaccttgacctctgcaatgactcatgacgaagacctagacagacggtataatatggagaaagagaaactttacaagatacgtttactacaggctcgaagaaatcgagaaatagcaattttgcaccgcaagattgatgaagtccctagccgtgccgagctaatacagtatcagaagagatttattgaactctaccgccagatttcagcagtgcacaaagaaaccaagcagttcttcactttatataataccctggatgataaaaaggtttatttggaaaaagagattagtctgctgaactcaattcatgagaacttctcacaggccatggcctcccctgctgcccgggaccagtttttacgtcagatggaacagattgtggaaggaattaagcaaagtagaatgaagatggaaaagaaaaagcaagagaacaaaatgagaagagaccagttgaacgaccagtacttggagctgttagaaaagcagaggctatactttaagactgtgaaagagttcaaggaggagggccgcaagaacgagatgctgctgtccaaggtgaaagcgaaggcctcctgaacatccccagccgtggctgtatgtcattgattttacttttaagcaccgtatatcacctacaagatcatgaaatggttctgaaagcgacagtagagagatgcagttgtgatgatttcaacaacctggatgttttctttctcctctttgcttccattcatctctgttggctgctgttgatggagtcagacagtaaacacgtggcttggataacacccatcatcctatgaagaatatagggagtacttgttctctgttgattcaacttttatgtctccagtaacattgcgcttatgaaggtacctgtatttgtatggactctgaataaagaagaattcatttgtttagcaagtattagttcagcaaccactgagaaataagcactgaggaagattcagagacgtgtaaaacacagttcctactgcacaagtacccagcaggtggcccagggaggcagatacagcacacttgaccgcagaactgggctatccaagatgtttttcagtaaacagaaggcatttagctgaaatgatcagcccatgtagtgttggtcacttgggcctttcacctgccatggtaccttttgttcccagctcctccaggtgccagccagcaggcttggtggtgacagcaactggaacgaaagttcagtgttgttttaatttttatacgttactcaagttgatttctcagaaaattgaaaacagaccttgtgctgaggacacgtcaataaaaattataccttcccctgccccaatgttcatgtgagtcacagcatgcagaggggctgtgcatccccctcattgaaggcacatttgatgaggctacgctgcagatgggtcatggtctgagccaggagagagatagacactgttccctgcactcaaggcaagtagggtgtcaggaggaagagcagtagggtttgcagagatccagggaaacttcctggaggaggcagcatttgagccctatctaaagggagaatcggatgttgataggaagactgttttaaatgaaaatacactatgattaaaaacccaagagagtgcagaggagtacaaggcatgcatgttgggaaaggagggaataagctagtctctgcaggaggcttcagagacccgtctgggaagtagggctgagactaggctttggagggccttgaagggcagctgagggttgattttaatccttggaaatgaccagtgcagatcaaacatggagctcctgctgccctggtcctcaggagtctggtaactcagtcatgttctgtaggtttgtgctccattttgcataaatcttgcaaacataccaggtggcaggtttgcacagtaacacaaaagcttaaacatgtcaagcaagtggggcattcagcagccacagaaatgtgttcatttttagtccctaatggatgtgattaagcagggctgatgtgtacagatttaaaaacacacacacgtgctggattaaaaacagccactggtttcagtgccagggccagcaaggcctacctgagccaggcggaagcagcagcttgcaaatagaaactgccacctgcgagcgcttcttgggtcatgtgcagctccacctcagctggtccctgagccgtggtcatgtgggggttttgaagggctaagttgaagcaagtaattgcaaaagaacaggtggcactctgagggcaggggaaggagacagaagtttgactgcgtttgaaattatttcagtcagggaaacatctgcgttgtcttgttaagcagcttgtaggcccacccctggctaactgaactttgtgagcagttggggcagttatttggatatttgtccaaaggtggtagggaggcagatgacattctggggttactggagtccacctctgtgctgatggggaaagtatggcatgatgaatccaaagcaaccagtaattctttttgaaagtgcaggcatttattttgagctgtatttcataggagtttcatttggtttggttttggtatagagaggtgtccatagatctctattccctttttttttttatcgacaaggcctactacggataaatcagtttttgttgcctgaatacactttgaattagactacagaagccagtttgagctcaaatttcacacttgctgcagacaactctcagtgtggacagtgcctttctgagtaattaggatgttatatgactttttggtgaagccgtatagggtaaggagatgccccaaggcccctgatcatttcagaagccacctggagcaccagaaggggtcatcttcccagggctatggctctgtgtgcttagacatagtatggaattgtgctctaagcccacaggcttctccagagttaaaaggaagcaagaacatccttaagttactttttcaaaatatgcgcttcaggaggaaccaggtttccccaggagagagaggctccctgctcaatcagcacagggagttgctagcgggcaggctgcccagtgctgtggaatctccgccagcctctgggttgggggctccctcccacttcttgcttcttatggagtacatgggactgctctgctttaagccgcgatcagagctgttgtgagcaggacaagattgcgtgatcacgaggtgcgtggggagatgctaggacatttgttgatgtctttgacctgtgctccgtctctgttggatgactgggttagctaacaccactagagggaggtacagaatgttaaacagtcgtcagagtcacactgagggttgttttaacagagggcaaattcccagtttgtcaagcatatctctgttagagtccgaagttcatggttttaatggttctagctcgtagcccttaatattttcaggatagctgggtcctgccagtgtccgctgagtccatcagcacaaccagaaggtccagggtccaggcatgggaagcattctctgacaataccgagccctcgggacctcctgaaaccttgagcagaggctggagaagaccttcagacagtccttttactacctcacaaagtgccatgcccgggacctcagacctcagggttgtgacgttgttgatgttgtcaggccccagtacgtctctagtgaccgaagcagacctgcctgaaagggcactccggacagtgagccctggctctaacctgtgccctcatatttctgctgcctcatatggtcttgtttgcccactctgtaggtgactgatcaccctaaaagggaggtaggtatctagcagtagcacagttactttgagcctgaccacttgttctgaagtgcagatgttgaaacatgcattgaggaagaacactttaaggaagcactttatgatttactcatggctggtgttggcctcaaagtaaaagaacatcttaatgcagaacagtacaataaagagccccataggatggatgccatcatctgtccccatggttgggattgccaaggaaagtgccttgttctgtgcatcttcagaatcccccaggccctctcttgatccttttcatgaagtccagagcattccttctattacaggctgaagatgcattgtaaaaggtaatgctataatagtattccctcttctcaataaatgtgcaaaactggagaatctggtgctgatctgcagcatacttgacaacacagggaataccgtggatgttccacgccagccttacatccgtccccattgcctgcccatgtccagtggccctgcgcaacaaaagtaagggcttgtcttaccacactctccccagcatctagctcaaggtagatgactgactgggaaattccggttggataaaatggcttttccacattgcaactttgcatctctattaggaaaatttagattgaacctttcctctacttgatgcttagtttgagaacagttttcacaactttagagggtctctctcagagtatgttatactgtaaccttgaagtttgagatgaaacaaggtgtcagaggttttgaatctttcaaaggaattgccttttacagattttttttttattccctaagaagggaaaaagagagggaagaactacactaatgttagagataaggtatgttttggctcaaaatgtgtcatgaacctaaaggtaacttgatgggcagaaatgtctcagccatgtgaaccaagaagtgggaccacagtgcaaggctgtgggtggcagcactagatatggtggtggcaggagtgtgacatgtaggcactccatgggggacagctggacggtgtctatcaaaagtgcaaatgcgtaagctctttgaactagcaatgctactcctaagaattgtacctgtgtacaaggtacttgtgtacaagagtttttgttgaaacattgtaatagcaaaaagttggagagtgccaccaatacaggggaatggttaaatacattatggccagcttaaacaatggaatagtttgtagaaatttaaaacaatggatcctgtgtgtgtgtactaccatagaatgggccccaagatgcatgattaagtgaggaaaaaagcccatggtatcctaatgtttggaatggagaaagtgtgtagatgtatgtgtgtgcatatgttttcacacagacgtatacacgtgtatatcatatgtccacctgcatatgcctaggatgtctctgggaggatatctagcagcccggcagcctgaattgcctctgggaagaggggtgggaatgacttttcaatgtacaccttttgtaccttttgaattttgtaccatgtacatgtattatctattaaaaaatagttcttaatttttaatttggtatacttttcttaatagaaccaaaatggaagaaaattctgattctcta

SEQ ID NO: 504 - protein, 32 aa, Homo sapiens
MFHASLTSVPIACPCPVRNKSKGLSYHTLPSI

SEQ ID NO: 505 - DNA, 4874 bp, Homo sapiens
gagggccgcaagaacgagatgctgctgtccaaggtgaaagcgaaggcctcctgaacatccccagccgtggctgtatgtcattgattttacttttaagcaccgtatatcacctacaagatcatgaaatggttctgaaagcgacagtagagagatgcagttgtgatgatttcaacaacctggatgttttctttctcctctttgcttccattcatctctgttggctgctgttgatggagtcagacagtaaacacgtggcttggataacacccatcatcctatgaagaatatagggagtacttgttctctgttgattcaacttttatgtctccagtaacattgcgcttatgaaggtacctgtatttgtatggactctgaataaagaagaattcatttgtttagcaagtattagttcagcaaccactgagaaataagcactgaggaagattcagagacgtgtaaaacacagttcctactgcacaagtacccagcaggtggcccagggaggcagatacagcacacttgaccgcagaactgggctatccaagatgtttttcagtaaacagaaggcatttagctgaaatgatcagcccatgtagtgttggtcacttgggcctttcacctgccatggtaccttttgttcccagctcctccaggtgccagccagcaggcttggtggtgacagcaactggaacgaaagttcagtgttgttttaatttttatacgttactcaagttgatttctcagaaaattgaaaacagaccttgtgctgaggacacgtcaataaaaattataccttcccctgccccaatgttcatgtgagtcacagcatgcagaggggctgtgcatccccctcattgaaggcacatttgatgaggctacgctgcagatgggtcatggtctgagccaggagagagatagacactgttccctgcactcaaggcaagtagggtgtcaggaggaagagcagtagggtttgcagagatccagggaaacttcctggaggaggcagcatttgagccctatctaaagggagaatcggatgttgataggaagactgttttaaatgaaaatacactatgattaaaaacccaagagagtgcagaggagtacaaggcatgcatgttgggaaaggagggaataagctagtctctgcaggaggcttcagagacccgtctgggaagtagggctgagactaggctttggagggccttgaagggcagctgagggttgattttaatccttggaaatgaccagtgcagatcaaacatggagctcctgctgccctggtcctcaggagtctggtaactcagtcatgttctgtaggtttgtgctccattttgcataaatcttgcaaacataccaggtggcaggtttgcacagtaacacaaaagcttaaacatgtcaagcaagtggggcattcagcagccacagaaatgtgttcatttttagtccctaatggatgtgattaagcagggctgatgtgtacagatttaaaaacacacacacgtgctggattaaaaacagccactggtttcagtgccagggccagcaaggcctacctgagccaggcggaagcagcagcttgcaaatagaaactgccacctgcgagcgcttcttgggtcatgtgcagctccacctcagctggtccctgagccgtggtcatgtgggggttttgaagggctaagttgaagcaagtaattgcaaaagaacaggtggcactctgagggcaggggaaggagacagaagtttgactgcgtttgaaattatttcagtcagggaaacatctgcgttgtcttgttaagcagcttgtaggcccacccctggctaactgaactttgtgagcagttggggcagttatttggatatttgtccaaaggtggtagggaggcagatgacattctggggttactggagtccacctctgtgctgatggggaaagtatggcatgatgaatccaaagcaaccagtaattctttttgaaagtgcaggcatttattttgagctgtatttcataggagtttcatttggtttggttttggtatagagaggtgtccatagatctctattccctttttttttttatcgacaaggcctactacggataaatcagtttttgttgcctgaatacactttgaattagactacagaagccagtttgagctcaaatttcacacttgctgcagacaactctcagtgtggacagtgcctttctgagtaattaggatgttatatgactttttggtgaagccgtatagggtaaggagatgccccaaggcccctgatcatttcagaagccacctggagcaccagaaggggtcatcttcccagggctatggctctgtgtgcttagacatagtatggaattgtgctctaagcccacaggcttctccagagttaaaaggaagcaagaacatccttaagttactttttcaaaatatgcgcttcaggaggaaccaggtttccccaggagagagaggctccctgctcaatcagcacagggagttgctagcgggcaggctgcccagtgctgtggaatctccgccagcctctgggttgggggctccctcccacttcttgcttcttatggagtacatgggactgctctgctttaagccgcgatcagagctgttgtgagcaggacaagattgcgtgatcacgaggtgcgtggggagatgctaggacatttgttgatgtctttgacctgtgctccgtctctgttggatgactgggttagctaacaccactagagggaggtacagaatgttaaacagtcgtcagagtcacactgagggttgttttaacagagggcaaattcccagtttgtcaagcatatctctgttagagtccgaagttcatggttttaatggttctagctcgtagcccttaatattttcaggatagctgggtcctgccagtgtccgctgagtccatcagcacaaccagaaggtccagggtccaggcatgggaagcattctctgacaataccgagccctcgggacctcctgaaaccttgagcagaggctggagaagaccttcagacagtccttttactacctcacaaagtgccatgcccgggacctcagacctcagggttgtgacgttgttgatgttgtcaggccccagtacgtctctagtgaccgaagcagacctgcctgaaagggcactccggacagtgagccctggctctaacctgtgccctcatatttctgctgcctcatatggtcttgtttgcccactctgtaggtgactgatcaccctaaaagggaggtaggtatctagcagtagcacagttactttgagcctgaccacttgttctgaagtgcagatgttgaaacatgcattgaggaagaacactttaaggaagcactttatgatttactcatggctggtgttggcctcaaagtaaaagaacatcttaatgcagaacagtacaataaagagccccataggatggatgccatcatctgtccccatggttgggattgccaaggaaagtgccttgttctgtgcatcttcagaatcccccaggccctctcttgatccttttcatgaagtccagagcattccttctattacaggctgaagatgcattgtaaaaggtaatgctataatagtattccctcttctcaataaatgtgcaaaactggagaatctggtgctgatctgcagcatacttgacaacacagggaataccgtggatgttccacgccagccttacatccgtccccattgcctgcccatgtccagtggccctgcgcaacaaaagtaagggcttgtcttaccacactctccccagcatctagctcaaggtagatgactgactgggaaattccggttggataaaatggcttttccacattgcaactttgcatctctattaggaaaatttagattgaacctttcctctacttgatgcttagtttgagaacagttttcacaactttagagggtctctctcagagtatgttatactgtaaccttgaagtttgagatgaaacaaggtgtcagaggttttgaatctttcaaaggaattgccttttacagattttttttttattccctaagaagggaaaaagagagggaagaactacactaatgttagagataaggtatgttttggctcaaaatgtgtcatgaacctaaaggtaacttgatgggcagaaatgtctcagccatgtgaaccaagaagtgggaccacagtgcaaggctgtgggtggcagcactagatatggtggtggcaggagtgtgacatgtaggcactccatgggggacagctggacggtgtctatcaaaagtgcaaatgcgtaagctctttgaactagcaatgctactcctaagaattgtacctgtgtacaaggtacttgtgtacaagagtttttgttgaaacattgtaatagcaaaaagttggagagtgccaccaatacaggggaatggttaaatacattatggccagcttaaacaatggaatagtttgtagaaatttaaaacaatggatcctgtgtgtgtgtactaccatagaatgggccccaagatgcatgattaagtgaggaaaaaagcccatggtatcctaatgtttggaatggagaaagtgtgtagatgtatgtgtgtgcatatgttttcacacagacgtatacacgtgtatatcatatgtccacctgcatatgcctaggatgtctctgggaggatatctagcagcccggcagcctgaattgcctctgggaagaggggtgggaatgacttttcaatgtacaccttttgtaccttttgaattttgtaccatgtacatgtattatctattaaaaaatagttcttaatttttaatttggtatacttttcttaatagaaccaaaatggaagaaaattctgattctcta

SEQ ID NO: 506 - protein, 32 aa, Homo sapiens; identical to SEQ ID NO: 504

SEQ ID NO: 507 - DNA, 6757 bp, Homo sapiens
ggcaggcggcggcggcggcggcggcggcggcagagggagtttccgctttgcactccaccccggtagcagctccgcggcagggacagcttcctccggacgcttggcgggcttcgctctcgccttacgacagcccggtcggatcatggggttgcccagggggccggagggccagggtctcccggaggtggaaacaagagaagatgaagaacaaaatgtcaagttgactgaaattctggagctcttggttgcagctgggtatttcagggcaagaattaaaggcttatcaccctttgacaaggtagtaggaggaatgacttggtgtatcaccacttgcaactttgatgtagatgttgatttgctctttcaagaaaactctacgataggtcaaaaaatagctctgtcagaaaaaattgtctcggtcctgccaaggatgaaatgcccacaccagctggagccccaccagatccaggggatggattttattcacatatttcctgttgttcagtggctggtgaaacgagctatagaaacaaaagaagagatgggtgactatatccgctcctactctgtatcccagttccagaagacttacagtctccctgaggatgatgacttcataaagagaaaagaaaaggccatcaagacagttgtggacctctcagagatatggatttagccgccagagcaaaatggagaaggctgaggacaagaaaacggcacttccagcagggctgtcagctacagaaaaagctgatgcccacgaggaagatgagcttcgagcagctgaagagcagcgtattcagtcgctgatgaccaagatgaccgctatggcaaatgaggagagccgtctcaccgcaagctccgtgggccagattgtgggactctgctctgctgagatcaagcagattgtgtccgagtatgcagagaagcagtctgagctatcagctgaagaaagtccagaaaaattaggaacctcccagctacatcgccggaaagtcatttccttgaacaaacagattgcgcaaaagaccaaacatcttgaagagctgcgagcaagtcacaccagcctacaagccagatataatgaagccaagaaaacgctgacagagctgaagacttacagtgagaaactggacaaagagcaagcagccctcgagaagatagaatccaaagctgatccaagtatcctacagaacctgagagcacttgtagccatgaatgaaaatctgaaaagtcaagaacaggaatttaaagcacattgtcgagaggagatgacacgactacagcaagaaattgaaaacctgaaagctgagagagcaccacgtggagatgaaaagaccctctccagtggagagccgcctggtaccttgacctctgcaatgactcatgacgaagacctagacagacggtataatatggagaaagagaaactttacaagatacgtttactacaggctcgaagaaatcgagaaatagcaattttgcaccgcaagattgatgaagtccctagccgtgccgagctaatacagtatcagaagagatttattgaactctaccgccagatttcagcagtgcacaaagaaaccaagcagttcttcactttatataataccctggatgataaaaaggtttatttggaaaaagagattagtctgctgaactcaattcatgagaacttctcacaggccatggcctcccctgctgcccgggaccagtttttacgtcagatggaacagattgtggaaggaattaagcaaagtagaatgaagatggaaaagaaaaagcaagagaacaaaatgagaagagaccagttgaacgaccagtacttggagctgttagaaaagcagaggctatactttaagactgtgaaagagttcaaggaggagggccgcaagaacgagatgctgctgtccaaggtgaaagcgaaggcctcctgaacatccccagccgtggctgtatgtcattgattttacttttaagcaccgtatatcacctacaagatcatgaaatggttctgaaagcgacagtagagagatgcagttgtgatgatttcaacaacctggatgttttctttctcctctttgcttccattcatctctgttggctgctgttgatggagtcagacagtaaacacgtggcttggataacacccatcatcctatgaagaatatagggagtacttgttctctgttgattcaacttttatgtctccagtaacattgcgcttatgaaggtacctgtatttgtatggactctgaataaagaagaattcatttgtttagcaagtattagttcagcaaccactgagaaataagcactgaggaagattcagagacgtgtaaaacacagttcctactgcacaagtacccagcaggtggcccagggaggcagatacagcacacttgaccgcagaactgggctatccaagatgtttttcagtaaacagaaggcatttagctgaaatgatcagcccatgtagtgttggtcacttgggcctttcacctgccatggtaccttttgttcccagctcctccaggtgccagccagcaggcttggtggtgacagcaactggaacgaaagttcagtgttgttttaatttttatacgttactcaagttgatttctcagaaaattgaaaacagaccttgtgctgaggacacgtcaataaaaattataccttcccctgccccaatgttcatgtgagtcacagcatgcagaggggctgtgcatccccctcattgaaggcacatttgatgaggctacgctgcagatgggtcatggtctgagccaggagagagatagacactgttccctgcactcaaggcaagtagggtgtcaggaggaagagcagtagggtttgcagagatccagggaaacttcctggaggaggcagcatttgagccctatctaaagggagaatcggatgttgataggaagactgttttaaatgaaaatacactatgattaaaaacccaagagagtgcagaggagtacaaggcatgcatgttgggaaaggagggaataagctagtctctgcaggaggcttcagagacccgtctgggaagtagggctgagactaggctttggagggccttgaagggcagctgagggttgattttaatccttggaaatgaccagtgcagatcaaacatggagctcctgctgccctggtcctcaggagtctggtaactcagtcatgttctgtaggtttgtgctccattttgcataaatcttgcaaacataccaggtggcaggtttgcacagtaacacaaaagcttaaacatgtcaagcaagtggggcattcagcagccacagaaatgtgttcatttttagtccctaatggatgtgattaagcagggctgatgtgtacagatttaaaaacacacacacgtgctggattaaaaacagccactggtttcagtgccagggccagcaaggcctacctgagccaggcggaagcagcagcttgcaaatagaaactgccacctgcgagcgcttcttgggtcatgtgcagctccacctcagctggtccctgagccgtggtcatgtgggggttttgaagggctaagttgaagcaagtaattgcaaaagaacaggtggcactctgagggcaggggaaggagacagaagtttgactgcgtttgaaattatttcagtcagggaaacatctgcgttgtcttgttaagcagcttgtaggcccacccctggctaactgaactttgtgagcagttggggcagttatttggatatttgtccaaaggtggtagggaggcagatgacattctggggttactggagtccacctctgtgctgatggggaaagtatggcatgatgaatccaaagcaaccagtaattctttttgaaagtgcaggcatttattttgagctgtatttcataggagtttcatttggtttggttttggtatagagaggtgtccatagatctctattccctttttttttttatcgacaaggcctactacggataaatcagtttttgttgcctgaatacactttgaattagactacagaagccagtttgagctcaaatttcacacttgctgcagacaactctcagtgtggacagtgcctttctgagtaattaggatgttatatgactttttggtgaagccgtatagggtaaggagatgccccaaggcccctgatcatttcagaagccacctggagcaccagaaggggtcatcttcccagggctatggctctgtgtgcttagacatagtatggaattgtgctctaagcccacaggcttctccagagttaaaaggaagcaagaacatccttaagttactttttcaaaatatgcgcttcaggaggaaccaggtttccccaggagagagaggctccctgctcaatcagcacagggagttgctagcgggcaggctgcccagtgctgtggaatctccgccagcctctgggttgggggctccctcccacttcttgcttcttatggagtacatgggactgctctgctttaagccgcgatcagagctgttgtgagcaggacaagattgcgtgatcacgaggtgcgtggggagatgctaggacatttgttgatgtctttgacctgtgctccgtctctgttggatgactgggttagctaacaccactagagggaggtacagaatgttaaacagtcgtcagagtcacactgagggttgttttaacagagggcaaattcccagtttgtcaagcatatctctgttagagtccgaagttcatggttttaatggttctagctcgtagcccttaatattttcaggatagctgggtcctgccagtgtccgctgagtccatcagcacaaccagaaggtccagggtccaggcatgggaagcattctctgacaataccgagccctcgggacctcctgaaaccttgagcagaggctggagaagaccttcagacagtccttttactacctcacaaagtgccatgcccgggacctcagacctcagggttgtgacgttgttgatgttgtcaggccccagtacgtctctagtgaccgaagcagacctgcctgaaagggcactccggacagtgagccctggctctaacctgtgccctcatatttctgctgcctcatatggtcttgtttgcccactctgtaggtgactgatcaccctaaaagggaggtaggtatctagcagtagcacagttactttgagcctgaccacttgttctgaagtgcagatgttgaaacatgcattgaggaagaacactttaaggaagcactttatgatttactcatggctggtgttggcctcaaagtaaaagaacatcttaatgcagaacagtacaataaagagccccataggatggatgccatcatctgtccccatggttgggattgccaaggaaagtgccttgttctgtgcatcttcagaatcccccaggccctctcttgatccttttcatgaagtccagagcattccttctattacaggctgaagatgcattgtaaaaggtaatgctataatagtattccctcttctcaataaatgtgcaaaactggagaatctggtgctgatctgcagcatacttgacaacacagggaataccgtggatgttccacgccagccttacatccgtccccattgcctgcccatgtccagtggccctgcgcaacaaaagtaagggcttgtcttaccacactctccccagcatctagctcaaggtagatgactgactgggaaattccggttggataaaatggcttttccacattgcaactttgcatctctattaggaaaatttagattgaacctttcctctacttgatgcttagtttgagaacagttttcacaactttagagggtctctctcagagtatgttatactgtaaccttgaagtttgagatgaaacaaggtgtcagaggttttgaatctttcaaaggaattgccttttacagattttttttttattccctaagaagggaaaaagagagggaagaactacactaatgttagagataaggtatgttttggctcaaaatgtgtcatgaacctaaaggtaacttgatgggcagaaatgtctcagccatgtgaaccaagaagtgggaccacagtgcaaggctgtgggtggcagcactagatatggtggtggcaggagtgtgacatgtaggcactccatgggggacagctggacggtgtctatcaaaagtgcaaatgcgtaagctctttgaactagcaatgctactcctaagaattgtacctgtgtacaaggtacttgtgtacaagagtttttgttgaaacattgtaatagcaaaaagttggagagtgccaccaatacaggggaatggttaaatacattatggccagcttaaacaatggaatagtttgtagaaatttaaaacaatggatcctgtgtgtgtgtactaccatagaatgggccccaagatgcatgattaagtgaggaaaaaagcccatggtatcctaatgtttggaatggagaaagtgtgtagatgtatgtgtgtgcatatgttttcacacagacgtatacacgtgtatatcatatgtccacctgcatatgcctaggatgtctctgggaggatatctagcagcccggcagcctgaattgcctctgggaagaggggtgggaatgacttttcaatgtacaccttttgtaccttttgaattttgtaccatgtacatgtattatctattaaaaaatagttcttaatttttaatttggtatacttttcttaatagaaccaaaatggaagaaaattctgattctcta

SEQ ID NO: 508 - protein, 175 aa, Homo sapiens
MGLPRGPEGQGLPEVETREDEEQNVKLTEILLVAAGYFRARIKGLSPFDKVVGGMTWCITTCNFDVDVDLLFQENSTIGQKIALSEKIVSVLPRMKCPHQLEPHQIQGMDFIHIFPVVQWLVKRAIETKEEMGDYIRSYSVSQFQKTYSLPEDDDFIKRKEKAIKTVVDLSEIWI

SEQ ID NO: 509 - DNA, 5332 bp, Homo sapiens
gttatgaaagttacagggaaagtatgacaaaaaagattaacatgcaattataagaccaggctaatttccatgccttctcagaggtttagcatccttaattgcctgggatcccaggggcccccgtggctccactgtgcgttacaaagacctgattgcctctcctaagagtcataatctggatacagagctgactgcttggcatttccccctgcctcagagtcctgtgtgccggtcataactctactggtttttctttcagggccatggcctcccctgctgcccgggaccagtttttacgtcagatggaacagattgtggaaggaattaagcaaagtagaatgaagatggaaaagaaaaagcaagagaacaaaatgagaagagaccagttgaacgaccagtacttggagctgttagaaaagcagaggctatactttaagactgtgaaagagttcaaggaggagggccgcaagaacgagatgctgctgtccaaggtgaaagcgaaggcctcctgaacatccccagccgtggctgtatgtcattgattttacttttaagcaccgtatatcacctacaagatcatgaaatggttctgaaagcgacagtagagagatgcagttgtgatgatttcaacaacctggatgttttctttctcctctttgcttccattcatctctgttggctgctgttgatggagtcagacagtaaacacgtggcttggataacacccatcatcctatgaagaatatagggagtacttgttctctgttgattcaacttttatgtctccagtaacattgcgcttatgaaggtacctgtatttgtatggactctgaataaagaagaattcatttgtttagcaagtattagttcagcaaccactgagaaataagcactgaggaagattcagagacgtgtaaaacacagttcctactgcacaagtacccagcaggtggcccagggaggcagatacagcacacttgaccgcagaactgggctatccaagatgtttttcagtaaacagaaggcatttagctgaaatgatcagcccatgtagtgttggtcacttgggcctttcacctgccatggtaccttttgttcccagctcctccaggtgccagccagcaggcttggtggtgacagcaactggaacgaaagttcagtgttgttttaatttttatacgttactcaagttgatttctcagaaaattgaaaacagaccttgtgctgaggacacgtcaataaaaattataccttcccctgccccaatgttcatgtgagtcacagcatgcagaggggctgtgcatccccctcattgaaggcacatttgatgaggctacgctgcagatgggtcatggtctgagccaggagagagatagacactgttccctgcactcaaggcaagtagggtgtcaggaggaagagcagtagggtttgcagagatccagggaaacttcctggaggaggcagcatttgagccctatctaaagggagaatcggatgttgataggaagactgttttaaatgaaaatacactatgattaaaaacccaagagagtgcagaggagtacaaggcatgcatgttgggaaaggagggaataagctagtctctgcaggaggcttcagagacccgtctgggaagtagggctgagactaggctttggagggccttgaagggcagctgagggttgattttaatccttggaaatgaccagtgcagatcaaacatggagctcctgctgccctggtcctcaggagtctggtaactcagtcatgttctgtaggtttgtgctccattttgcataaatcttgcaaacataccaggtggcaggtttgcacagtaacacaaaagcttaaacatgtcaagcaagtggggcattcagcagccacagaaatgtgttcatttttagtccctaatggatgtgattaagcagggctgatgtgtacagatttaaaaacacacacacgtgctggattaaaaacagccactggtttcagtgccagggccagcaaggcctacctgagccaggcggaagcagcagcttgcaaatagaaactgccacctgcgagcgcttcttgggtcatgtgcagctccacctcagctggtccctgagccgtggtcatgtgggggttttgaagggctaagttgaagcaagtaattgcaaaagaacaggtggcactctgagggcaggggaaggagacagaagtttgactgcgtttgaaattatttcagtcagggaaacatctgcgttgtcttgttaagcagcttgtaggcccacccctggctaactgaactttgtgagcagttggggcagttatttggatatttgtccaaaggtggtagggaggcagatgacattctggggttactggagtccacctctgtgctgatggggaaagtatggcatgatgaatccaaagcaaccagtaattctttttgaaagtgcaggcatttattttgagctgtatttcataggagtttcatttggtttggttttggtatagagaggtgtccatagatctctattccctttttttttttatcgacaaggcctactacggataaatcagtttttgttgcctgaatacactttgaattagactacagaagccagtttgagctcaaatttcacacttgctgcagacaactctcagtgtggacagtgcctttctgagtaattaggatgttatatgactttttggtgaagccgtatagggtaaggagatgccccaaggcccctgatcatttcagaagccacctggagcaccagaaggggtcatcttcccagggctatggctctgtgtgcttagacatagtatggaattgtgctctaagcccacaggcttctccagagttaaaaggaagcaagaacatccttaagttactttttcaaaatatgcgcttcaggaggaaccaggtttccccaggagagagaggctccctgctcaatcagcacagggagttgctagcgggcaggctgcccagtgctgtggaatctccgccagcctctgggttgggggctccctcccacttcttgcttcttatggagtacatgggactgctctgctttaagccgcgatcagagctgttgtgagcaggacaagattgcgtgatcacgaggtgcgtggggagatgctaggacatttgttgatgtctttgacctgtgctccgtctctgttggatgactgggttagctaacaccactagagggaggtacagaatgttaaacagtcgtcagagtcacactgagggttgttttaacagagggcaaattcccagtttgtcaagcatatctctgttagagtccgaagttcatggttttaatggttctagctcgtagcccttaatattttcaggatagctgggtcctgccagtgtccgctgagtccatcagcacaaccagaaggtccagggtccaggcatgggaagcattctctgacaataccgagccctcgggacctcctgaaaccttgagcagaggctggagaagaccttcagacagtccttttactacctcacaaagtgccatgcccgggacctcagacctcagggttgtgacgttgttgatgttgtcaggccccagtacgtctctagtgaccgaagcagacctgcctgaaagggcactccggacagtgagccctggctctaacctgtgccctcatatttctgctgcctcatatggtcttgtttgcccactctgtaggtgactgatcaccctaaaagggaggtaggtatctagcagtagcacagttactttgagcctgaccacttgttctgaagtgcagatgttgaaacatgcattgaggaagaacactttaaggaagcactttatgatttactcatggctggtgttggcctcaaagtaaaagaacatcttaatgcagaacagtacaataaagagccccataggatggatgccatcatctgtccccatggttgggattgccaaggaaagtgccttgttctgtgcatcttcagaatcccccaggccctctcttgatccttttcatgaagtccagagcattccttctattacaggctgaagatgcattgtaaaaggtaatgctataatagtattccctcttctcaataaatgtgcaaaactggagaatctggtgctgatctgcagcatacttgacaacacagggaataccgtggatgttccacgccagccttacatccgtccccattgcctgcccatgtccagtggccctgcgcaacaaaagtaagggcttgtcttaccacactctccccagcatctagctcaaggtagatgactgactgggaaattccggttggataaaatggcttttccacattgcaactttgcatctctattaggaaaatttagattgaacctttcctctacttgatgcttagtttgagaacagttttcacaactttagagggtctctctcagagtatgttatactgtaaccttgaagtttgagatgaaacaaggtgtcagaggttttgaatctttcaaaggaattgccttttacagattttttttttattccctaagaagggaaaaagagagggaagaactacactaatgttagagataaggtatgttttggctcaaaatgtgtcatgaacctaaaggtaacttgatgggcagaaatgtctcagccatgtgaaccaagaagtgggaccacagtgcaaggctgtgggtggcagcactagatatggtggtggcaggagtgtgacatgtaggcactccatgggggacagctggacggtgtctatcaaaagtgcaaatgcgtaagctctttgaactagcaatgctactcctaagaattgtacctgtgtacaaggtacttgtgtacaagagtttttgttgaaacattgtaatagcaaaaagttggagagtgccaccaatacaggggaatggttaaatacattatggccagcttaaacaatggaatagtttgtagaaatttaaaacaatggatcctgtgtgtgtgtactaccatagaatgggccccaagatgcatgattaagtgaggaaaaaagcccatggtatcctaatgtttggaatggagaaagtgtgtagatgtatgtgtgtgcatatgttttcacacagacgtatacacgtgtatatcatatgtccacctgcatatgcctaggatgtctctgggaggatatctagcagcccggcagcctgaattgcctctgggaagaggggtgggaatgacttttcaatgtacaccttttgtaccttttgaattttgtaccatgtacatgtattatctattaaaaaatagttcttaatttttaatttggtatacttttcttaatagaaccaaaatggaagaaaattctgattctcta

SEQ ID NO: 510 - protein, 32 aa, Homo sapiens; identical to SEQ ID NO: 504

SEQ ID NO: 511 - DNA, 6858 bp, Homo sapiens
ggcaggcggcggcggcggcggcggcggcggcagagggagtttccgctttgcactccaccccggtagcagctccgcggcagggacagcttcctccggacgcttggcgggcttcgctctcgccttacgacagcccggtcggatcatggggttgcccagggggccggagggccagggtctcccggaggtggaaacaagagaagatgaagaacaaaatgtcaagttgactgaaattctggagctcttggttgcagctgggtatttcagggcaagaattaaaggcttatcaccctttgacaaggtagtaggaggaatgacttggtgtatcaccacttgcaactttgatgtagatgttgatttgctctttcaagaaaactctacgataggtcaaaaaatagctctgtcagaaaaaattgtctcggtcctgccaaggatgaaatgcccacaccagctggagccccaccagatccaggggatggattttattcacatatttcctgttgttcagtggctggtgaaacgagctatagaaacaaaagaagagatgggtgactatatccgctcctactctgtatcccagttccagaagacttacagtctccctgaggatgatgacttcataaagagaaaagaaaaggccatcaagacagttgtggacctctcagaagtgtacaagccccgtcggaaatacaaacgccaccagggagcagaggagctacttgatgaagaatctcgaatccatgctacacttttggaatatggcaggagatatggatttagccgccagagcaaaatggagaaggctgaggacaagaaaacggcacttccagcagggctgtcagctacagaaaaagctgatgcccacgaggaagatgagcttcgagcagctgaagagcagcgtattcagtcgctgatgaccaagatgaccgctatggcaaatgaggagagccgtctcaccgcaagctccgtgggccagattgtgggactctgctctgctgagatcaagcagattgtgtccgagtatgcagagaagcagtctgagctatcagctgaagaaagtccagaaaaattaggaacctcccagctacatcgccggaaagtcatttccttgaacaaacagattgcgcaaaagaccaaacatcttgaagagctgcgagcaagtcacaccagcctacaagccagatataatgaagccaagaaaacgctgacagagctgaagacttacagtgagaaactggacaaagagcaagcagccctcgagaagatagaatccaaagctgatccaagtatcctacagaacctgagagcacttgtagccatgaatgaaaatctgaaaagtcaagaacaggaatttaaagcacattgtcgagaggagatgacacgactacagcaagaaattgaaaacctgaaagctgagagagcaccacgtggagatgaaaagaccctctccagtggagagccgcctggtaccttgacctctgcaatgactcatgacgaagacctagacagacggtataatatggagaaagagaaactttacaagatacgtttactacaggctcgaagaaatcgagaaatagcaattttgcaccgcaagattgatgaagtccctagccgtgccgagctaatacagtatcagaagagatttattgaactctaccgccagatttcagcagtgcacaaagaaaccaagcagttcttcactttatataataccctggatgataaaaaggtttatttggaaaaagagattagtctgctgaactcaattcatgagaacttctcacaggccatggcctcccctgctgcccgggaccagtttttacgtcagatggaacagattgtggaaggaattaagcaaagtagaatgaagatggaaaagaaaaagcaagagaacaaaatgagaagagaccagttgaacgaccagtacttggagctgttagaaaagcagaggctatactttaagactgtgaaagagttcaaggaggagggccgcaagaacgagatgctgctgtccaaggtgaaagcgaaggcctcctgaacatccccagccgtggctgtatgtcattgattttacttttaagcaccgtatatcacctacaagatcatgaaatggttctgaaagcgacagtagagagatgcagttgtgatgatttcaacaacctggatgttttctttctcctctttgcttccattcatctctgttggctgctgttgatggagtcagacagtaaacacgtggcttggataacacccatcatcctatgaagaatatagggagtacttgttctctgttgattcaacttttatgtctccagtaacattgcgcttatgaaggtacctgtatttgtatggactctgaataaagaagaattcatttgtttagcaagtattagttcagcaaccactgagaaataagcactgaggaagattcagagacgtgtaaaacacagttcctactgcacaagtacccagcaggtggcccagggaggcagatacagcacacttgaccgcagaactgggctatccaagatgtttttcagtaaacagaaggcatttagctgaaatgatcagcccatgtagtgttggtcacttgggcctttcacctgccatggtaccttttgttcccagctcctccaggtgccagccagcaggcttggtggtgacagcaactggaacgaaagttcagtgttgttttaatttttatacgttactcaagttgatttctcagaaaattgaaaacagaccttgtgctgaggacacgtcaataaaaattataccttcccctgccccaatgttcatgtgagtcacagcatgcagaggggctgtgcatccccctcattgaaggcacatttgatgaggctacgctgcagatgggtcatggtctgagccaggagagagatagacactgttccctgcactcaaggcaagtagggtgtcaggaggaagagcagtagggtttgcagagatccagggaaacttcctggaggaggcagcatttgagccctatctaaagggagaatcggatgttgataggaagactgttttaaatgaaaatacactatgattaaaaacccaagagagtgcagaggagtacaaggcatgcatgttgggaaaggagggaataagctagtctctgcaggaggcttcagagacccgtctgggaagtagggctgagactaggctttggagggccttgaagggcagctgagggttgattttaatccttggaaatgaccagtgcagatcaaacatggagctcctgctgccctggtcctcaggagtctggtaactcagtcatgttctgtaggtttgtgctccattttgcataaatcttgcaaacataccaggtggcaggtttgcacagtaacacaaaagcttaaacatgtcaagcaagtggggcattcagcagccacagaaatgtgttcatttttagtccctaatggatgtgattaagcagggctgatgtgtacagatttaaaaacacacacacgtgctggattaaaaacagccactggtttcagtgccagggccagcaaggcctacctgagccaggcggaagcagcagcttgcaaatagaaactgccacctgcgagcgcttcttgggtcatgtgcagctccacctcagctggtccctgagccgtggtcatgtgggggttttgaagggctaagttgaagcaagtaattgcaaaagaacaggtggcactctgagggcaggggaaggagacagaagtttgactgcgtttgaaattatttcagtcagggaaacatctgcgttgtcttgttaagcagcttgtaggcccacccctggctaactgaactttgtgagcagttggggcagttatttggatatttgtccaaaggtggtagggaggcagatgacattctggggttactggagtccacctctgtgctgatggggaaagtatggcatgatgaatccaaagcaaccagtaattctttttgaaagtgcaggcatttattttgagctgtatttcataggagtttcatttggtttggttttggtatagagaggtgtccatagatctctattccctttttttttttatcgacaaggcctactacggataaatcagtttttgttgcctgaatacactttgaattagactacagaagccagtttgagctcaaatttcacacttgctgcagacaactctcagtgtggacagtgcctttctgagtaattaggatgttatatgactttttggtgaagccgtatagggtaaggagatgccccaaggcccctgatcatttcagaagccacctggagcaccagaaggggtcatcttcccagggctatggctctgtgtgcttagacatagtatggaattgtgctctaagcccacaggcttctccagagttaaaaggaagcaagaacatccttaagttactttttcaaaatatgcgcttcaggaggaaccaggtttccccaggagagagaggctccctgctcaatcagcacagggagttgctagcgggcaggctgcccagtgctgtggaatctccgccagcctctgggttgggggctccctcccacttcttgcttcttatggagtacatgggactgctctgctttaagccgcgatcagagctgttgtgagcaggacaagattgcgtgatcacgaggtgcgtggggagatgctaggacatttgttgatgtctttgacctgtgctccgtctctgttggatgactgggttagctaacaccactagagggaggtacagaatgttaaacagtcgtcagagtcacactgagggttgttttaacagagggcaaattcccagtttgtcaagcatatctctgttagagtccgaagttcatggttttaatggttctagctcgtagcccttaatattttcaggatagctgggtcctgccagtgtccgctgagtccatcagcacaaccagaaggtccagggtccaggcatgggaagcattctctgacaataccgagccctcgggacctcctgaaaccttgagcagaggctggagaagaccttcagacagtccttttactacctcacaaagtgccatgcccgggacctcagacctcagggttgtgacgttgttgatgttgtcaggccccagtacgtctctagtgaccgaagcagacctgcctgaaagggcactccggacagtgagccctggctctaacctgtgccctcatatttctgctgcctcatatggtcttgtttgcccactctgtaggtgactgatcaccctaaaagggaggtaggtatctagcagtagcacagttactttgagcctgaccacttgttctgaagtgcagatgttgaaacatgcattgaggaagaacactttaaggaagcactttatgatttactcatggctggtgttggcctcaaagtaaaagaacatcttaatgcagaacagtacaataaagagccccataggatggatgccatcatctgtccccatggttgggattgccaaggaaagtgccttgttctgtgcatcttcagaatcccccaggccctctcttgatccttttcatgaagtccagagcattccttctattacaggctgaagatgcattgtaaaaggtaatgctataatagtattccctcttctcaataaatgtgcaaaactggagaatctggtgctgatctgcagcatacttgacaacacagggaataccgtggatgttccacgccagccttacatccgtccccattgcctgcccatgtccagtggccctgcgcaacaaaagtaagggcttgtcttaccacactctccccagcatctagctcaaggtagatgactgactgggaaattccggttggataaaatggcttttccacattgcaactttgcatctctattaggaaaatttagattgaacctttcctctacttgatgcttagtttgagaacagttttcacaactttagagggtctctctcagagtatgttatactgtaaccttgaagtttgagatgaaacaaggtgtcagaggttttgaatctttcaaaggaattgccttttacagattttttttttattccctaagaagggaaaaagagagggaagaactacactaatgttagagataaggtatgttttggctcaaaatgtgtcatgaacctaaaggtaacttgatgggcagaaatgtctcagccatgtgaaccaagaagtgggaccacagtgcaaggctgtgggtggcagcactagatatggtggtggcaggagtgtgacatgtaggcactccatgggggacagctggacggtgtctatcaaaagtgcaaatgcgtaagctctttgaactagcaatgctactcctaagaattgtacctgtgtacaaggtacttgtgtacaagagtttttgttgaaacattgtaatagcaaaaagttggagagtgccaccaatacaggggaatggttaaatacattatggccagcttaaacaatggaatagtttgtagaaatttaaaacaatggatcctgtgtgtgtgtactaccatagaatgggccccaagatgcatgattaagtgaggaaaaaagcccatggtatcctaatgtttggaatggagaaagtgtgtagatgtatgtgtgtgcatatgttttcacacagacgtatacacgtgtatatcatatgtccacctgcatatgcctaggatgtctctgggaggatatctagcagcccggcagcctgaattgcctctgggaagaggggtgggaatgacttttcaatgtacaccttttgtaccttttgaattttgtaccatgtacatgtattatctattaaaaaatagttcttaatttttaatttggtatacttttcttaatagaaccaaaatggaagaaaattctgattctcta

SEQ ID NO: 512 - protein, 627 aa, Homo sapiens
MGLPRGPEGQGLPEVETREDEEQNVKLTEILLVAAGYFRARIKGLSPFDKVVGGMTWCITTCNFDVDVDLLFQENSTIGQKIALSEKIVSVLPRMKCPHQLEPHQIQGMDFIHIFPVVQWLVKRAIETKEEMGDYIRSYSVSQFQKTYSLPEDDDFIKRKEKAIKTVVDLSEVYKPRRKYKRHQGAEELLDEESRIHATLLEYGRRYGFSRQSKMEKAEDKKTALPAGLSATEKADAHEEDELRAAEEQRIQSLMTKMTAMANEESRLTASSVGQIVGLCSAEIKQIVSEYAEKQSELSAEESPEKLGTSQLHRRKVISLNKQIAQKTKHLEELRASHTSLQARYNEAKKTLTELKTYSEKLDKEQAALEKIESKADPSILQNLRALVAMNENLKSQEQEFKAHCREEMTRLQQEIENLKAERAPRGDEKTLSSGEPPGTLTSAMTHDEDLDRRYNMEKEKLYKIRLLQARRNREIAILHRKIDEVPSRAELIQYQKRFIELYRQISAVHKETKQFFTLYNTLDDKKVYLEKEISLLNSIHENFSQAMDAARDQFLRQMEQIVEGIKQSRMKMEKKKQENKMRRDQLNDQYLELLEKQRLYFKTVKEFKEEGRKNEMLLSKVKAKAS

SEQ ID NO: 513 - DNA, 87545 bp, Mus musculus
  misc_feature (1)...(87545): n = A, C, G or T/U
tagatagaagtttccagatgagataaggaccgccaaggataacagcaaagaacaggaatattggccaagattttgctgagttagttgcctggtcctcagcactaaggcaggccacagttccttcactttctgcccacaggtcctcattctcagagcctcttcttaaacccatcatccactgtaaccgtctataaagatatcttatagtcctaactaatgcaaaggctgaaaaaacctttgtaaagtgtatttttagccgggaaaagtgatttgctacatccaatacagccctgaaactgttatagacggctgaaaaggtagcatccatcatcatgctgacagaggcaaatgcatgcacaatactttcaatggactgaaatgcacctctgctgctttcttcagcttgctgaacaaacctactgggaggaagatcatctacacggaggcggttaaagcccaaaccattgtatccataactataagggctatagcttccataaaatgaatttccgtaggctccatatccagaagaaaatgaactgtaagcaggtctgaaagtgtttacattgttgctccctgtctgctgggatggcctgggaagaataggcgggggcactcttgtaagtgttggttgtccaggtcttgtcaataaagtagggcccaaatcagcagatctaaaacacacacacacacacacaaaaacccaagttacttatgcacaaaatcttttgtccaataagtaagttttaattatggctatgtattttattttagaaagaatttctatttctctttaattgactttagaagttggtatggcaggtgctgaagagatggcactagatgctcttccagaggacctgggtttgctttccaacacccacatggcaggcagctcacaactgcctataacttcaatacgaacttacagggcatcagtggccctcttctgacctccatgtgcacctccaaggctttaatgcttttctgttgtgtcatgtttacatgcatctagtgtccaggcgtattccttgcttgctattacaaccagcatagtaaagacgactaagcaagcccatgacagaaggacagatgatatttcctcaatgatgtgttagtttcttccactgggcatttaaaaaaaaatttaaacagaaaaaaaaattggcagaatacatacatatttttatgtagattcaatagctaccatgatcttagcttattttttctctcactttgatccacaaattcttgaaacatttgaatttaacttctaaacttgatacattatcccctaagtatctcagaaggcatttcccaagaaaaaacatttcagttactaccctgtcactgaaagctaaaaagtttcatacaatcaataatgcaattaatataaaaaactaatccatttcccagaaatgttaaagagctttgaagtaaaattcagttaccatcagtttacccacttaatataaagctcaattgtttttattttcctagttggaatactttcattactcctgaaagacatgcagagttcacagggagggcagtgagaattaggataaatcctaacagagcataaggacttatatgaggacgccataatgaaacaaactgctagtcagactatattaagtagtttaaaatagcctgtattcactagcagtcactttctgtttccctcccacctctaaccattggtaaacacaaacttactctgtctctatgaccttatctagtccagatatttcatatgtagttgattttgttgttgagatatcttaaaacatctatgaagtttaccagtacctaatcattattcccgggagtaatgtagttaggctcctgtatgctttagatcactttgtttgagacagcctactctggcctataaccttattactgtgtagttggtctctctagaacagggattaaatgcatctgtcaccatgtctgtctttcaagtcatattttcatcaaccaattagtacatatacttgctttatgtgcattgctattaaggatctattgctgatgtattaatagcatctcagtgcaataactcatgactgaacagatctaatacttacaccttttctttagtaaagcttcacggccaccttgtagtttggattattagacagaactaacttgggagccattttaaacggggagatccatgtattaatgtgaaaaccccagaactaaacagactatataatggacatgagtgcacagtcgttaggactgaaataatcttcaacactgctttgttacatttcagctgacattacaggtctttctctgtcctatacatgcacacaaatgacaaagtactgattttgaggttataaatgaattttggtgggtaggcaattttgcaaatgtgagatctaaaaagaaggtctgtggcagagtgccatagcacgtgtgatttgtagcttgttgtcacttcagcatatttccaaggctcaccctactggagaatgagtcagttcatgtgagcacttcttccccaaatgcctcagagcagaagtgtctcagacttgagattctggaacacggtgtacagataatgaggtcatgtggggatggcattcaagtgaaacatgaattacacttgtattttgtacacttttacacaaataacctgatggtaatttcatacaaaagttttagtatgcttgcaatttttgtctgtttctgagatgaattcttgcaacacagctctggatagcctagacctggttatgcagctcaggatggccttgaactcaatggcattcctctcaattgggtatatctatttctatttatctatttagagacaaggtctctctatttaccacaggctgttttaggactatgtagtccaggctagcttcaaattcacgaaccctgtgtttcacctcccaagtgcttgaattacaggtatatgttttcattttaacctcaacttattacctgatgtcagatgtaaaattttacctggcattatgtcagtattcaagaagtttcagattttgtaatgtttattactcttcatagacaaaggatagtcattctcatattcatacatatatatatatatatatatatatatatatatatatatataaaatttagggtgatattggtctgtttcaatgctctggctttggttgttttgaataatgtcactagtgaagacttaattatatagacatttttgtatctcaagtctactcctattgtgaattgatgggctgtacactaaatattacatttaatctttgcagaaactgtcagactagtttccaaagcaaccataccactttacaaatattcccaccagcagagtttgaagattacagcttgcccacattctttcttgttaatggcatctaaacaatagtcgacttaatggtcagggtggctaatgctcaccgtggttcttttaacaccggtctcatgtagccccggccggccttagacttgttacaaaaccaagagtgactttgaacttctgatcttcctgcttccacctcctaagtgctgggattagcatttgctgctatccagttttgctatagtttcgatttgcgtttctctgacgtgtaatactattaaatactctttatgtccttttggcctcttacagtcttatcataagaaacagctttatacgtccctcatttacttgttttgtgcatgcatatggggaacaggcacatgctatggagtgcatatggaggtcagaggacacgtgagggtccaggatgtggctgtagtcatcaggcttgctgataggcatttttacccacaaagctacctcaccagctcactttcctcacaactaaatgggcttcttatcatggtctttttagtatttatctttgttactgaattggaagagtcaaaatgtcctttttaaaaaaacattttgtttttactttctgtggataaatatttttgcctccatgtttgtatgtgtattacatgcatttggtagctgtggaggccagaagagggtgctggagcccttgaaactggagttacagagggttatgacctgctatgtgggtactgggcaccaagcctgggtcctctgcaaaagtagcaagtattgagcatctatctgtctaactccctcaaaatagcttttaaaagtggtttttgaaaaaaaattatatatttagtttatacactgcatttgactttttcttcccattatattctaaagtacaataatcagggttggcaagagagctcagtgcataaaacatgttgccttggacgcctggtgacgacatcagtttgatccctagaaccacaatgggagaagaaaactgacccccaaaagtagtacactgatctccacacaggtagtgtggatgcatggaccctcacttacacttgatccttgtttatatcacatacatcatgtctaactgcaaaatcataatatctaatgtcagggaaatctttaacattataaacaagttacagaacttttactttaaaaaaaaaagctaaatccaacatttaaaaaaggaacaaaatttgaaaaggtctaactaacaatagcacattcaggctctgacaaaggagttctgctacaaagtaaaagcataggagaaaagctgatatatttagatttgatacaagataaatacactgagggaacaagacacaaacaaaagcatactttgatgaaggctgactttacaggctcattcacttctgtgtcaagaatcacaaggtgagtcaggaaattagaaataacaagaagaaggttctactcaaatgaactcaagtgctcattgaggctaagagtcaggaccttggtgcctactacaaaatatgctgtgaacttttttttttcctaaagcaagctatagaccttcctaaaacaacacagtttattgctactattcttggttgcctttcagaactagacagtaaaatactattgctaaagagcagcatactttggttgtagaatatatagaaatcaagctgaaactggttttaaaacctcctccctgctggctagctagtttctgtgtaaggaggtgttatgcaggctgctgtgggaaaacaaaaacaaaaacaaaaacatcactgtgtcacccagtagtgaaccttacatgctacaatactatcctgccaggtaagatacacccaatgatgaataatggcaaagagtaacgaactacttttggattggatttaaggcctgttctacaggaaggaattcattcatgtctggtactataaatctggttaaaaaccccatgattagtcagatcaaaggccctgggggtgggggttggggcaaggaggcatatctgatactaattggttttgctaaattggcatgttgtaaactaccttttaaatatttgtgtttacacacatagggctatcctaaccatggctagagaagcttaagcttgtctctgcagttaagagcagagactcttaactggtcaaagtgtgaatgagtgactattgactgcttagccctaatgggacatctctatcaacccttgctctacaacttaggacacaccagaaaagcgggggtggaaaaaaatatgagagccaaaggatgggaggagtgctgtgaacactgtcttctagacagaacaaggccatcctaactcatgagctcactacagctatgtaacatgcaaaacacttgtacaagatcaagccaacaatatcgtaagtcaacattccaataggtagtactcagtacactacaaaaagatgtggaaagatggggcggggggtggcatgctggaggtgcgtgggggagtggggggtgtataatatgatcaagatgcattgtttatatgaatgaaaatgtcaaagaataaacacaagatattatatttaaaaatacagttacagacctaagaaagggattggccactgacacacttcaagctagaaaacaaattaacttccacagttaatatgtaatgtttttggtttaatccactgtttttacacctgattcttgttagatgtaaatgcaggattgggtgctatgggtgcacacagatagaagcaaggagactactatgcagaaagagaaaagtaaaattctaaaattcctaattttatagaagccatgaacatgaagtattaaagaaaaattaggatgtcaggttaacaaaatcagtactaaaaaaaatgaaaaaatgaatagcctaataccaagattcctagatatttaaaatcatcagtgatattatctagttttaagaaaatcaaatgagctgggcatggtggtgcatacctttgatattaacacttggggataaggcaaagactggtgcatccctgtgagtttgaggctagccaggactacataccaagttccaggcctaccaaggctacatatacatagtaagaccttgtctcaaaaaggcaaatcaaacatgaaataaaaacatgtaatgtgaagtaatgtattagaaatctcagacatgatgccgcagcattagggaatgccttgtaagtataatactagggaaaaacaaaaaacaaaaaaacagttgtatgctgaggagagtggagacctaagaactgcatgctaagggtggacttcataaacacaagaactctccaatcagaaataactaactggaagacctgctgctgctgctgctgctgctgggtcacaaaagaaaaagattttgcttaaagcattagagaacaaggtactgagaaaatttaaaatcaaggtgatgaaagaagaagacatccagagttgtctagggacagcagctgatccaggaagagatggtcgcaggcacagctgcttaggccatttagcacaatgcctggagcaagttcagattgggatcttaaaggactacatgctattagggagaacagattgagaggaaatagaccagctttgggctaaacaaaaaaatatgcttcaaataagcccaatccttgactggattaaagtaccctatattgccgttgctctgacagtgagaagtcagtctccagaggaagacagctcacaggtttcgaatcatcttaatcacctacataaggttcagctctctacaacgaaactgggcctccatgatgacaacactatatgtttctttaaaagaacattaacaatacagagctccatagctacagagaaatccagaaaatgaaacagattttaaatgtaaagacaaggatttctcagcaagtcatagaagacataaaatcagactgaaaggaaattccaaagaaaacaaaaacctttcaatctatgaactcaatggctggtttaattagatacaggttatattaaaaaaaacaaatcaaggcttagggctaaggagttggctgagaaggcgaagtccttgttgtgtaaggactgagtttggatcctcagcactttcatggagacatgtttctatactccagagatgaggaaacaggaggttcccagggtctcgcctgcaaacagtccagtctaggctagtcccaggttcagtgagaccctacctcaaaatttaaggtgtaaggtagacagtgacaggggaggacgcctgaggttgacctttggcctctagacacagatctgtgagcgtactaaccgcccccctctcccggccctgcaccttagccaggtagtattgtcattcatgcctgtaacctgggaggctgagaaaagaggatcttgagtacgaagtcaacctgggcaatctagctagactgtgtcaaagatacaaaagaaaaagaaaaaggaaaaggaaaagaaaaaaaacaaagaaaaggaaaaagaaaaaaaaaggacaaaaattaaaaagaggggagtataaagagacaacaaacaagcaatattttaagacaaaaaaaaaaaaagctgaaaaatttctgaaattcatgaaagataccaaagtcagacctaagtattcctacaactcctactcagaataaaaatgcatatagaagcctaaagtagttcaatgctgaaaaacaaccaaccaaccaacctacgtcaaacaatcagaaaaatagtgaaagcagctggcagtggttcagggtggggacatttttaggcaagaataagaaatgactgaaattatcaaaaagctaccaaaagcaaaaagccaggaacaaaattaggtctcttgatgttaagacagatgatctctagattccttgctaacaacagtaggcatttttacagttcaaagcacattagataatgcttcttgtaccagatacaatgtttagaggttcttagcctgtggtcataaccctcttggcaaccttttatctccaaaaatatttacattatgattcctaacagtagcaaaattatatttatgaagtagcaacaaaaataattttatgattgaggtcaccataacatgaaaaactgtattaaagggttgtagcattaggaagattgagaaccactggtttgaagatgagtgttcaaacaatatttaaaggtataattatgttaaaaactttggtgagttaagaaaaattcagaaggcgattgcctgtaagtcccaacactgcggaagtttaggtagaaagaccactgggagctcaaggctaccctgtctctctggcaagacatctgtctaggaagaaagaaagaaagacacacagaaagaaaggaataaaagacagaaaaaaaaagagaaatgaataagtgatttcttaaatactttgagtactgcatactgtaggtactgaaatggatggaaaaatacagattatacgtgtatagttatatcacagaggacctaggtattatataaaatcttttttttcttttttttggtttatttattttattttcaatatatagctatcttcagacacaccagaagaaggcattggatctcatgccttcttggatcacaactcatggttgtgagccaccatgctgttgctgggaattgaactccagacctctggaagagcagtcagtgctcttaactgctgagtcatctttccagccagccccaataaaatcttaaagagaaaaatcatctacctaaagaaataaaatgttaacttttcaataaaaaaattttcagtgcaaaattttctcattaaaaaactgatataaagacaaaagtataatttaaaaaaggaatccaatatcacataggaacataaatcttaaaataatacagaatccaggacagtatattaaaaaaaggaagctaagtaggttcatttaaaaatgcaagataagttcaacattaatggaataacccataattgcataccattagtaaaacaaatataaacaggtacagaaaacaatcataaaatttaaggcacatacaacaaaacaacaacaaacccagaaggctaagtaatgttcagagaagtttaacgggatagcaaagaacacacttagaaacattctaatgaaagtatcaccaataagtgttgctttaacacgaaaaatacagcttatcactctaattgtatctattagttactgtgcccaagtgttttagtacttttaaaagagcaccagattttccaataagagaaaagtactccaacgtacagagatttttacgcgccaggaaaacgtacaaacttgctctgaaatcatgtcgcctggattaaggtatctatttatccaaagaaaacacaggttcctgaaactctaattctgttttaaatttttaaaagttgcagacccatttgttactgatttaaatcaaagcaaataaaaactttataggccttagacgacagtcacacacacaattttgtacacaaaggctacccacagacctcgaattcctgtcttagaattctttcaaccctcaacctaaacgttaagttatgctagaaaagaaagccaagggtaagagcttggattccatgttgcgtaaacgtgacctttgggtcgttcaaccaacttctggagaggctgtaaagcttttccatgacttttgctctctatccttgtcctggctgggccaacgtcgcgctcggcagcagacccaagctcgtcgctttgaagcgggtcaggctgtcccgcccccccatgtcccgcaaaagcgaaaaggcagggaagcgccgcttttctttctagctcctgcatccgtggggccggcggggcgcccgggggaagaacgggcggtcgtacagccagcagactccagacccgctctgcactcgccccgggccggcagcgggaagcgacgcctccccccaataacggcttcaaccgcctcctgccaagtccccgctctggcctccaaagtcgcggcccaaacacctcacactcactggtaagtggggccggggccggagcccggcccggggccggccccgggaattctgcgagactcccagggtttggggggcggcggcggctgggaggccatctctccgccagctccgctccggctcagggaagcgactgcgacggctgggtgaaggagcgcctcgcttgccaggcacgacaggcagaacaccgagccctccgccccgcccacgcctgacgtcaggccaaggcgtgtggtcaggcgaagctggaggaaggaggaagggaacagctaatttgctggggtgtgggagggggtcgggagtcgggagagcgggacgtccctctttcttttccctagtctgggtttcaaatttgagtaggggctcatcgacgtttctggcagcagctactacgacctaggtgccgagtccgtcggaggctcctttgccggccgaccctttaaggctagcagtaaagcccctcgcagtctttcgttcgtagagctagggggagtgcaggctgccaggcggacagccttacaggtcaccgtgtaagacgagggggttcctgcattcctctcgtgaggggcctggtactttcgttgtaaagctctggttttcttggggaacacaacggctgagcgcagtaggtgcgctgtctttactcttccccgttcccacccagggccgaaaagggttaagactcggctgcggcatcttgggagaaggtaaggcctaggaagtacgaggtgaggggttagggactgggtgtcgaagaggcgtagctgcagtcccttttgtttgttagtcaggtggagtgagtggtaagtttctagaacctcagcacatagagttaagggcttgtttggccagaacagagctttccccttacctttcccctactcccatgccagaggacgaactatgcctgtgcaggaggaaatgcattaaaaaagatcttatggtgtgaaactcaagactgtttcagctacccccctctcccccgctggctttgattctctatttagcctaggttagctttgaactcatggagatcttcttgtttcttgtgtactgaaattataagcgtgagcgcttacacctggcaagaagatgcatttttacataattatttccaactcctcatagactctttacttaacattaaattaataggttaagtgaactgatagacgggattatgaaactgaaataaatacttggccacatggagtttcttgatttttttttctttaatagagtatattcccatattgtaagtacttccttgaaaggtttacacaggcaaccctgagtggtcccaagtcccggaatcggaaagtttttaatgtcatgtccagagcaagcttgtctttctttgttcctctcccctgtaatccacatactcacttagtcaagttcatattttagaatatagatatgacaagcagtatttgaagggtacaaaatagaatttttcaaatgaaagcttttctttttaaggacataaatacagcacgtagctgtagaatactgaaagtgctcattttagtttcttctagtatgcttccactgactgaggagaacaagcacgtggcacagctgttgttcagttctggcacctgtccaagatgcatcttaagattctgtggtgtggatcttcccgcaccttacaaacacccatccaaggtatattctttttaaattaaagaatgtttttttatagtttggaatgaatgtcactagctttgagtcctgtgagtaacatataattccactaaaaaaggaagattatcagctattggatgggtcacacggcccccaatggaggagctagagaaagtacccaaggagctaaagggaactgcaaccctatatgtggaacaacaatatgaactaaccagtaccccggagctcttgtctctagctgcctatgtatcaaaagatggcctagtcagccatcactggaaagagaggccctttggacttgcaaactttatatgccccagtacaggggaacgccagggccaaaaaggggaagtgggtgggtaggggattgggggggtgggtatgggggaacttttgggatagcatgggaaatgtaaacgaggaaaatacctaattaaaaaaatatcaaaaaaaagaaggaagattaataaaattattcctacaaaggtaattttgaaactgcaattaccttaaaaacttgatgtaggaatataactattttcaggtaactatcatttaacagttagtgcagagagaggtctatggtgggattttttttttttttttgctacatttaatatttgtgaagacattttataaagggcatctaaacacaataccactagatattgcttcttacatacattaatgcaaagcaacaggacaattcatagtcctgatttcttcttttaaacagaaaatgagttcagttatgtttttttaaattaagtttctctctattatttttatgaatatatatatgagtatgatgtgagtgttcatataatttatgcatatgttgtgagtgcttgtgtgtgtgtatgtttgtaataagttctctccttcctccatagactctgggaaatcaaacaggttgttagacttgtctgacaagtgctcttacctaacagactttattgcttgcctgcataccagtcctttgctgtgtattactgtttacatgtatgtatgtattcttcaggtgctggatagaacccagggcttcacactgccagtgttctgtcattgattcatgtccccagcctgccacttgatccactcagtgaagggaatacgttctgagaaatgtgtccttagaggacgttttgcttgtgagaacattctggaatatacttaagatggctgcagtcttactaggcagtgtaatcttaagggcccattagccacagctgtacagtctgttgttgtcaggagtattgtatgatacctggctctgtgggaagcctttaaaaacaagtgcttattgaatcattattcctgatactagtaccataagaaacgctagatagagtctttcatattcacagtaatacagagagagctgaactgttgaatagaataacttacttgacatatggttgatactaacagtgacattctttttaaaggcaaatacttatatgtataaatatatacactcatacacactcaattttttattttaaaagttgctaataaactatgccacagtcagtattgtttttctgtcattgtgttgtttctactattaacatagtaacaaaataaaaatagtgcctagtgtgcatctagtgttgctccacgttaagctttcacttaatcgtttgtaagtacatgagatgattgtctctattttcagatgaagcgactgaaacacagagaggttaagcagccctgcccaaagttaaacagcttttaaatgaggaagctaggaattaaacagtatgtctgaatccaaagcctagaatttggagctagaagacgtggatttgaatctcagttccaccactgttcagcttcagtttactactgtgtacatggatatggtgacaccttctacctcacgggattttaagggatgctatcaattattaagtatgtgaaagtaattggaaaccagtaatggctcataggcagtggcagttgctgtgtgtgtaaatgctcagcttatatttagctttgtgtaacctttcttatatgctctttgcacacacacacactatatatactggattcaaaatatattttatataaaactggcagcaattttgacttgttatattctttgtgaataaatattgtaaacaaaatattcaaaggctttttgaaatgttttaagctgttttgctatcatatagctatacatgagctcacacatgtacatactatcttatactaatgttacagatgttagcaatcaacatttgtgtgggtcgtaatatactttgaaattggaatgctaacacatcaacaatgaatttaatgtttgactgaaaaaaatgttcttgagttagtatagcctaactaaattctatccaacgacgaacagtcaaaccagcctgatgtagtggaagcataaggaaaacagagtgaagaggaaaaagcagcagcctttgcaagtggaggcttgtttttatgttcaaatacccgggatgacagaaattagacaagatgcagaccagggcttcctttgcttaattcatataaatagaaagtatttataaccccaaattttaatactaccaaatctatgtatgttggtaaattgtctcaaaaattatcttcacttacgcaacctctaaatgataagatttcacattaactcacactatgcttatgagcttgttaaataacttagcaagaataaaaatcagcttgtactcccccctccgtgtgtataagatagtatgtacatgtgtgtacttgtgtatagctatataagatagtatgtacatgtgtgtgnnnnnnnnnnnnnnnnnnnncacatgtatgtactatcttatatagttatacaagaacacacacatgtacatatatcttatatagctacacttaagcacacacatgtataatacatgaacacatatatgtatacactatcttatatagctatatacaagcaaaacaaagcttaaaacatttttaaaaagcctttgactattttgtttattcacaaagaatattacaagtcaaaagagtgtgtgtgtgtgtctctctgtatgtctgtgtctctgtctggttcttttgcttctttgctgtttgagatggaacccaaagcgtcatgtatgttaagcaggattctgccactgagccacatctccatgccaggttgtatttttatgtttccataattagaattaaatttttcttttgtttttgaagttagtagtttaatgaccttcccaatagaactacaaaccagacttataaatctgttgatggagactttttccttaagattagggtttttagcttcaatgatttgtgaaattctggaaaaacatgcacatatgtaataggcatttgatcagcatgagggttaaatgcattaataataaattcagagtcaccagtaatgcactggtgttctattaaggacagaaatcaaggcacttctccttggtgtcatttaaccaagagggtgccagattccagttctctactttgctctcactgtgttgcctgtcattttctgtctctctgggctgggagtctgaatctgtgcccacctgaaggctgtcttgtaaagtcatccctgtgtcggtcagtctgtccccctgacaaagactttgttcttttttagtttttatttatttttaaattttatttttaatcatctgtatgtgacatatgccatgtgagtgggtaccaacggaggctatagacatcggagcctctggagctggagtacagactgttgtgagctacctgctgtggccctctggaagaacagtccatgctcttaaccactgagccatctctccagcccaatctcttatagaacagcagagcaatcacatggacaaggaatgaggagtacttaacagaaatagttcatagttttacaggagttaagtatgactccaactgacccagatagcaaaccctatcagccaattgctgaatgctgcttttagcatttatggtggatatttattttataaggctggttttagcatttttgctctttccagcttatattccccccagcccccccccccgggggggtgtttgtgtctatctgtctcttttatttttttgctgtttgagatggaatccaaggcttcatgcatcaggcaagttcatatctcagaattcctagaaaaaaaaatgctgtagtcacttggttactcctgaattgatataaaccagtgacgtgtgagtccctgctattagtcttctctacaccttgttttgagacatgtgtattatcataatacacatgcattactcttgggtcataggcttggtagagtacacaatttaaaattatagctatacattaattccaaggcaagcaaggttggttgttgcattgttctcttaaaggcaggttaaacagagagtctgagttcacagtagtcttaagtgacttcgaggtctattgttaactttggctgtgaggaccagcaaaggttccagtctcttagaatttaagaggtgtttctatcacaatgcattgccacaagttcatatcttagaattcctagaaagccaatactgtagtcacttggttattcctgaattgatataaaccagtgatgtgtgagtccctgctattagtctcctctatacctagttttgagacagtgcctcattatgtagccctgggtgggttgaactcataagctatctgctacctttgcctgagcctgttctgtgggatctagagggctgggatccatgacatgcaaagcagggcagtacatgcctttaattccagtgctcagaggcaggcagtctcttctgcaaaaccagtaacatccgttactagtgactctgaactttttattaatgtacttaatccatgcactaatcaaatgcctgttacatatgtaaatgcttttccaaaagaatttcataaatcagtgaagctaaaaccctaaccttaaggagaaaggcatcttcaacaaaattacaaatctggctattagttgtgttgcgaagatcattcacttctagttaaacaaacaaacgaaagtcctcccacttggctgactttcatgcttcattgtgaggccctcaatgacactttaaaatgttattgcttcttttcaggagttgctcaatgagctacaaaaatttctagaaccggaaaaacctgaattaattttagaagctccaaacccaccattgaagaaaattcgtctacatgaagatgggattgataatttgagtgaagatggaaaggagggagtctctgttactgaagatgaaagcatggctgagaagccttcaaagctgagagtgtgcaatgtttgcttaggaattcttcaggaattctgtgagaaggggtttattacgaaggtaaacatccattcctcagcagagctctgctgatagatggggtcaacagtaaagcttagaggtcttcgtcacaccatccctaacattcatgcctgcttgctttattccaggtggtcactaacatctcttaatttaaaaaggccaactattctgaaattgtatcatactgcaaaattaataaaaacacctaccgtgttgacctgaaactgccagttgtgcagggtcagagtcaacaaatatttaatctcatgatgtttatgacaagctcactactcagatgtggaagttttttagttacctttgttttgggcagagctagagatggtctggtacatgctaggccagtgcagacccactgagcctcagccctagctctgaactgaatgctgggaagctgtgcagtgtcctgggagagattttattattagagtcacattttcaggaattcttgggagtttacctatctgtaatactcttttaggtgtgccaaaaggttgaagcctctgggtttgaattcaccagcgtggttttatctgtctcctttccaccgcagctgtctgtaagagaggtaaggtcatttgcccacttcagagcacgtgtaaaatgtaagctaggagtttctaatttctaaaacacaccaaacaaaaatgggaatgtaaacttggtacagaggctcccacttttaacctcagtactgggtgtggaagcggggtggcaaggaatttgaggccatcctgggaatattgctgcagtgttgcatgatgggacatgagcaagagtggctagacatgcctcggattcattgcacaggtggttttgaattaattttggttgttgcacattcagaaaccttttatcattattagttttttctcgtgacccctctaccttctgctatgtgataccaggtgtggttgtcacccacagtctaaaaggctacatatacaaaaatcacattgagctaaaaggacataatttgagaactttttatttgaagtgtcttctcctagatactggttcctaaacttttagcatgtaaaaggtttattcataggtaggtaaggtggctcctgcctgtaattccattatccagaagctggggcaggaggattgccaggtatttgagcctagcctgaagtttcccaagcaccatcccaaagatttgtatgtatttggtcaggtagggcttaggaatttgcattctaaacagcaaactcaccagtgccattgttacaaagactgcatgttgaggaattaatactcttaagggtttttggggtttttttttacatttttattttgttttagttgtgtgtatatatatccgtgtgtgtgtgtgtgtgtgtgtgtgtgtgtgtgtgtgtgtgtgtgtgtgtgtgtacctgtgtagaagtcaggacaacttgcagtaactggttctgtctttctgccatgtgggcctgaggcattgaactcagtcatcattcttggcaacaggttcctgtacctgctaaaccatcctgcctgctcaaaatgaagaattaaaaaatatatccattcttgcaagtggggagaagggctgtaaactttggacaggtgaatttcaaacaatgcaaaaaaaactggcataagcatctgcctaagaggtatgttataagttttaggaagttcagggaaagcaaatttagttcaaaccaaattattataaccaataaaaggaagtttagagaaaaatccccataaaggattggggggcatggtccttacggtggtagtgtatccctttaatctcagtacttgggaggcagaggcaggaggatctctgttagtttgaggccagcctgatctacagagcgagtctaggacagccagggccacacagagaaactctgtcttgaaaccttctctcccctgccccccaaattgggaagccgatatgatgattcacagttataagttcagcacttgggaaactagacaggatggttgctgtgaggtcagcctggactatataggaaaaacctgtctcattaaatagttttaaaagagtaaaaatgaggaattcggtctatgccaaagacaagaggatcctgaattcatcttaagttagagagagggcatcggaggaggaatgtgcatttaaaaattttcattttgaaaagcttaaagtattgtaatgagtggcccgatgaactccttgttaagtgttgcccagattgaacaatcaagttttatttcacaaacttaagatcagttacaaaaaatataagccaaaatagagtcatattagtacaaatataagagggaggctcagctctgttagaattgcaacaaaaaaactagaccctacagtgaactactaagagagtaaagaattgctaagggacaggaaacaaatgaagcaggagacaggccttcttggaatgatgcacactgatgatagatggagagaaaggtgggttctgaacgtcttgctttgcttttggcctttctgtcagggaaaatgtgatcgttctcaaaaacaaacaaacaaacaaacacgtagaacagtcattctgagaagagtgaaagttctggctccacaaagtgacgctttcctaaatgggctcagtcctctgggttcgtgaatagttatatttcagactgaactcgtgtatcatctacatagcatcttttgtaaacaacagaggctggcgccttcaggcagaaccaaaatgcattttggtaatcttccctccttcccttcaaaagcatctcatgttagacatatgagcagaaggttgcctccatacgaatccccatagatttggccatgtcacagtctgagaccccatgatgtgggggagatgtaggagaaagagggactagaatatcatattgtataccctactatgcctcctgctgctctctctttttcttgtacaaagtcacccagttcaaagggagatgtgttggctttgaagtgacatgaaattgactctttgaaagcaatagtaggtatggaataggacataattatgtttgggttcctgctacccaccttgaagaatatttactggcaattactaaaaataaaataaaataaatcatttcatgaaactaaaaaaaaattatatttcaagatagagttaaaacagcctgcacctgctcattatcctcagggatgttaaaaggcagcatattttccaagcgattggagacaaagtgcgcctttcccaaaagtaagtaagttaattctgaaaattagcagctggcaagctcagccgcaaagcacagtgagattctggaccaggagctccagggtgagccgtgggcactaagctcgaggaaggacaagtttgctgcgagcagagtatgtctgaagcatggagtgagctggtagagcttggcagtgcctcgcagccccctgcatggccagtctctcaaaatgctttcctgaaagtggccggaacatggcagggcctaactacaactgactggattgtgctggactgtctgtatccgaaaagagtgaatggatgactaatcccaagctggacagtgttcagcctcgtgaaactccattgagggaagacgttagaatagatgctgcatcttcactttctgtcttcccaaatcctagtctccaaaagtaggacacagaggtcctttgatgggcacctgcacattgaacacaccatcactgaactgcagggaggctcctgatgtgcttcagggctctctcctctctcttctgtccatagtttatgctagtgaagatgtatgtgaacctcactaggggctacatgacacagggttgagagtgcagcaggcatgttggctattgcagttaattcacagtagagcttatgaacaagagcagtctaaaaggacgaataaacatgagctaatgagaataaacatgagtttaagaataagttaataagaataaacatgagtttttatgcctgagtttaaaaagcagttgccaagtaaaggaatgacgtaatgtatttgcagagatgcctctggagtggtagttagagttgcttaaagagacagtaagccaattggataacggggtcagatacagggtggctaatgtttggctttcggcccacctggatgaaaaggtgacagttgtcttccattagtgctcctgttcttggaatgccatgcttacgtggaggtttgtgcattagaaggaacaaagacaagttagtttatgttcagaaggtaggctcaagatggatataattctcatcccaaagaatttaccagaatggatatattttttgacacagattaaaccaaggacagaaagccaccaagctgaggtacatgaaagaaagatcatcttctttttccatttatttatttattgattcattcattcactcactcactcacttactttacatcccactcactgccccctccccctgctgatcccctccatcccacaatcctcccctccctgcaccccttctcttctgagaggatagtattcctcctgagtatccccccaccctggcacgtcaaatctctgcagggcttctttcccactgaggccacacaaggcagcccagccagaaaaacattgcacagacaggcaacagcttttgggatagtcccactccagttgttcagtacccatatgaagaccaagctacatgtctgctctatatgtgcaagttgcctaggtccagcccatatagctctttggttggtggttcagactcagagagccccaagggtccatccctgtcagttgactgttggtcctcctgtggagttcctatcccctttgggaccccaatccttcctcctgattcttccataagagtctccaagctccatccactatttggttgtaggtgtctgcatctgtttgaatcagctgctgggtagagcctctcagaggacagccatgctaagctcctgtctgcaaacataacagagtatcattaatagtgtcagggattggtgattgcccctagaatgagtctctagttgggtcagttattagttggccattcccaaagtctctgctatatcccccgtccctgcatttcttaaagacaggataaatttggggttagtgggttggtgtccctatccctccattgaggttcctacccagctacaggaggtggcctcttcaggttccattccaccaattctgtgagtcacagctaaggtcacccccattgattcttgggagcctcccttatcccaggtctttgtcacatcctggagatgacccccgcctccatcatttgcagatttccatttattctcatggccttttggccactccccaccccacatgttcctccctgtacttgatcccattcccttcctcatcccctctccctcccagacccttccctccatctgcctattgtgactattttatttcctcttctaagtgagattcaagcatcctcccttggtagatgatcttcttaaagcccagcagggagttaagaagcccttctattttaatgctgttgcattacttcacatgggagtctacatcctttcacttcagataaagaagacaatgacaaattcatgattccagtctgtgagcttggtaagcctggaagtttattgggtttattgtaagcgactcaggcagcaatgttcctgaaaagccacctccacaaacaggatgacctgtgagaggtgcttcatacaataccagtacagcctgtgcccagcttctttgcctaagagcctcttgtcttcctggcttgtgtgctcttcatccaatctctggtggggaacctcattagtcttgtaacttttatgagcttcctggagtcctgtgaagttactgtttcttttaaaatatttgtgtgcgagtgtccgtgtccgtgtccgtgtccgtgtccgtgtgtgtgtgtgtgtgtgtgtgtgtgtgtgatgcgtcccagtgtgcctgtggaggtcagaggacagcttacagtagttcgttctttccttagaatatgtgagtactggagatcagctgtctggcctggccccaaatcccttcagctgctgagatgtttgccagccctcctgtagttccaggagcttcatgagtgtcctacccctttatgagaggatacttttcaacccagaggaaatggctacacagcatgcttccctttctgctgacttttacactctcctgccccttctgctgtgatgttcctgggactttggaggggaggggcaatgtaagtgtttggttacaatcttctgtgtctggctgagccttgggtactataccacacaatagacacttattctcagaaatttaactggtgagtttatgcagtaaccctctcccattgcaaagggaacatttcctcccattagtgaagctgagagcagcagtctgggcatagacacaaatgtttggaaatcagtttgagagacacatatctgtttaatgaaacagtgacagctccccattgtagcctgtgacctcctcagtcatgactgtgtgtcctgggcctgcggcactgttcgggttccttcctgtgatgtgatccaggtggactctgctgccacagccactgctctgctctcaggagtggcttctgtaaagccactgtgtgacaaggattatcaaggatgccccagaccaaattgggaagtcttgctcattctttgaggtttatcttgtatcagctgagtccagcagagggcgatattgtaccatcagtttagttcatttccatcttatggctagtatatgatgacccctttgttcaccctagtgaccttaaatgagttatattgcatcataaatgttactctgatcatatgaagcaccctgtttctcaatgttcagtatgatatggagttttgtttgtcagatcaaaatatatttctttcttttcttttcttttttttttttttttccctgaaacagggtttctctgtacagccctggctgtcctggaactcactttgtagaccaggctggccttgaactcagaaatctgcctgcctctgcctccctagtgctgagattaaaggcgtgcgccaccacacctggctcaaaatatattttttgtttccatgctttgcattaaatagtctgaattaggtaagaataaaattaccaattctgcagcagcactttttctttaatttaagaaattatattttaaaaaaatttcataaattaatattttaaatgttttttttttttttttttttttttaatttggggtcttaccaatttggatccgttgatctcatttaggatctgaagaaaataatgaattcctttgtcctaagcaagcacagactcacttggcatggtgtaattcttgtaatccagcactcaggaggcttagaggatcgtgagttcaaggctatgcaggctatgcagtgataccctatattaaagcaagtgaagaacaggagagctagaagcacatactcaaagtttgcatgcatttacagatccttggctttatctgaattgtattcttaggtaaagtctccctctctgctaatgtccttacttcttctaagcgattgtggtttctgttgtgtttagttctcagatcaactgcaactatagagagccacttgtttaagatagtaatgtgtgtgtaggcctgagctggctgtcttctgattcagcggttagattttctcctttctctttattttccatgctttttcaacttaaaatttgtatggcagacacccctcctagatatacaacacactaaagatctcctttgttctgctgtgctttctgaacttagaaaggcaggtttaaagtttgccttagcgtgtgcaggaaccagaggtcaacttggaattcttctggagcttgagacagatctctcactgacctgggcttgccaatatgactaagctggctggctaggcagagctccaggaacctacttgtcaccactgtaagttaacaggcctggcttttttgcatgagtactggggatcaaactcacgtcttcatgcttttggtggcaagcgtttttgctgacaggcacttcctcggccttgcgggcagcggctggctatgtgtgatgtgcagttgcacacagcctgtgagtgcactccagaggagggttttgagtgtcttaccattaactccctgccctatagctttgagacagcctctcattgaatctgaagctagataacaaccagcaagcaccaacaagcctcctgtctcccccctctcctcaggactggggctacccattcatatgcagcacagttggcctcctaattaggagcctgggatttgaactcttttttcctgcttgaacagcaagtgctcttgcccactggaccatctttccagtccccaggctacaactttaaaaaccttcatagcacacaagtatgtttatgcagccatccaaatccatctttctgtaagatgtgactccaagaggtttccagcatatgcaattttgcacttttaagagacatggaaaagccagtgaggtgactcatcaagttaacacgagtccccaagtccaaagctccgagctcagttccttggacccacatggtggaaaagagagaaccagtgctcacaaattgtcttctgacctcagcatgcacaccatggcatgcacaatgcccatgcacacacaaataagagtcatggactcatagggcttgaagacaccttcctagtcacgtagaacagggctccctagcttttcctggcattgaatttaaaggatgatagttatgtgtacattgttgtgatttatcacagccctggagagaacacctctccaggtgcaaacccgttcttaccttttgagaatgactgcaagaaagtctgtgagttcctgaccttagcacataaaaagtgaccttcgatggtcactctttaaatgatttgaaaattctcagtgttcctgtgtatgtgtgtgttctgtattgggggagggagcccatgccacagtgtgtggaggtctgaggacaactgtaacatcagttttctcctgcctttatataggctccagggatccatcccactttgccaggcttgcacagtaaacgtttaccctccaagccatctgccaattgttttaaaattcgtatgacatacatttatttatttattcatcatgtatgagtgtacatgtgtgcatgacatagtgcatatgtactggtcagaaggcaacttctgggagttggctctctcctaccatgtgggccctggggattgaattctggccattatgtttagagacaagtgcctgtacctgttgaactttttcagtggccctcttcaagtttaatgtagccctagtgtgtgcatcggcaaaaaggtaagttttttccatccttaaggatggtgaccacttgcctagccatcacatcttcatttgaaaaagaaagccctgagctcatagagatcaaatgacgtcccatcttatgtttatgggaatttgaatgtgttttcctgctcttttcataacactttgtaaagccatgttatctcttcaacctgtaaattttgtgtatttgactttacctgatcattttagttacagaataactttcttaactactcacattgtttttataattcatgttaagtatacagagccctaggcttcactagggtgttttcttacacatgtattatactttgtactaattccagcagtggttaagtagggccggaccaccatggaaatgtactgtatattggatccaggaatgcagttgaaagcatagtcaagcatgtgctttaaatgattaaagacatatatttattttctagcttgccttttttactggcctgcctccagctggtataggtggagaaagagcaagaaggaagaggttggttgctatggtttttcactgtgtgaatgtatgcataggctgcattaaaaacagtgaagtctcctgttttgatttgcatgtttctatacctgtgattcatcacacagcatctttagaacttatagttggaatcagcggtgtatagaatttaaaggaaagcatgaagaagcaaatcccttaaacgtgtctctgttggaggtaccacattagcacacggccacttgccagctgtggagagccttatgatatggttttcgggtacattaacttttaggactgtagcctcgtgcactaagtttcagaaaaaaaggaacttctaatttaggctcttcctatttctgatttgaatgacagaaatgtcatgtcaaccatcttttatttttttttaattttgttttgaataatatcgctttgctttagatttagtaattctgtcacaattgtatctgagtcatacatagtgacagtaaagcataggtcacatagaacacagctacatgagtactatgttttttaggagataaactatgtctttttagcaagataaacttatgaatgtaaggcactgctgtttattgagtatttgtataggcaatctcactcagacatcacagcgctcaaagaaggctgggcttttgtcttcatttttctgtgatgaaattgaaactgaagattgcattactgatgaatagtagagttaggatttgaactctgaactctgaactagcctatcccaaagagaatgcttgtaattgccacttgccatactgcccacgctgtgatttggtaagattttaaacacgggttgtttctagggcagatgcacctcctttggtactttctccaaaaactgtgatatctttaaagttagagaaagaatccttagctctctgtctgtttttaaacaaaacaagggctcttgtaatatcttaacaagagaaataatttaaagatgtgggagatggctcagtcaataaagtgcttgcccctcaagtttgtggccctgagttcgatccccatggccatgtaaaaagatctctggtacccaaacgccaagccaggagcactggataaagtgagcttgtcatatcagcactggggaggtggaggagacaagagggtttccagagcctgctggccagtcagcttagtctaattaccgagtcccaggtctcaactagagagtgtgtctcaaaggaacaagtgggaagcttctgaggagcagtgcccaggctgacccctggcatccacatgtgcctgctatggtgcctatggacgtcatagggactggagtcacaactggagttgtgagctgccactgggaattgaacacaggtcctctggaagaccagccatatacacctgaccactgaactatctctccagtccctttctcacatcttaaagatctttatttatttgtttggcttgatgcacggtcttactgtgtagcccttgctggcctagaactcagagatattcctgtctcgctacctgttgtgtgttgggattaaaggcctgtgccaccatgactggccctattcttactttgttaatcatgcatatgtgcacacaagtgtgggtttctgtagaggctggaggtcggatcccctgaagctggagttacaagcagctttaacttgcctgaggtgggattgagtgctctgcacagttagtccacccccttaggcaatgagccctctcattttctcccattttaagtgattgccttatagaaagaaaacagggattacttggtgggaactgactggttggatctgctgtggaatagaatgttttcttctagttttgaataagtgctcgttgtccctgcagtagcagcttcctgcactgtcctttgggtgtgtgaggagattgctgttaggattagcatttggagcttgatctaagcctcacataaaacagccataatgccctgtatgccatgccttttgcttaacataatttatgagactttttaaaaaatacataatgctttaagtttttttccccctattttctagtttttgccaccttttgagtgtatgtattttagaaaaataagtctgtgctcttgtttgacaaataaaatcttttctctttctgagaatattgatatgtagtgctgtggttataattttcctcttttcaatttattttgatttgacacatgcttgtctatacttacagggcagatatgatgtttttatgtatttctacattgtgtaataatcaaatcaggataatcaatacattgttttaaatatttagcacttctttctggcacaaacatttttaaaaatgcccccttctatctattctgaaatatatattatttcttaccatagtcatcctgccaccagagagttcagaacccattactcctgacaggtaatctacctcccaggccctttgtgctctaccttctctacctcatctgtgctgtcaactctagctggttcctgtgtgtgcgtgtgcgtgtgtgtgcgcgtgtgtgtgtgcgtgtgtgcgcgcgtgtgtttgtgcatgcttgcgagagtgtgtgcgtgctttcttctgttctttcttcttttgttctctttttccttatttctttttgtttatttgtttgctgttgttttacaagtgttttcacaaatacttttatgagtagtatggagaaaaatatgacaaatgaatttctattagtttggaagttaatggaatttatatacaatctagacacttgagtgtcaatatattataaggttgtatgatgggaaagtgttaggtaggagagaagtataaggaaagtttgttattaattaaactcatataaatatttaatcacctttttttggagaccgtcccatgtagcccaggctggcctcaaactgtgtctgtagctgaggatggccttcaactcctgatcttcttgcttccacctcctgagtgcttcatgcgtgctagggaaacactctacactcaagccccttcataacctctctgaaccagaagagtcggccttttccctcagtcagctaagaatagctgcttatgttttcatacatgtttcattgtattccagtcatctttgctttggctgctctttctcccaccctcttctcccctttaaaactaaggttttttgttttttttttttttaagcattttacttattttatatgagagagaggatgtagaacacgtgtcctgtggcgtgcatgtgggaatgagagggagactcagtagtatggagaaaaatatgacaaatgaatttctattagtttggaagttaatggaatttacttccaaagtagagctggctcatgctttccatctctgtgactttcagagcctgaactcaggcaccggccttgcatggcagctgaaggcaccatcacaccagtcctaacattataaagattgtttaaaaaaatgtgtttttattatgtgtatgtgcccaagtgtatatgtatatgcatgtgtaccacagaggtcagaagagggtgtcaggtcccctggaactggagttaagaaggttgtgagccaccatgtgggtgctgggaactgaacttatgtcctttgcaagaacagcaaaatctctttccctctgagtcatctctcctaaatgtctttgtttaattattttgctttctattcttcagaaatttgatcgaagtttcccatacagccagcctctgtcattagatctagcatttagacagtttgtcaccaaattattcttaggaatctgggttttttcccccatcacttggttttaagccctgttcgcttctcccttccctacctccttttaccttttctgcacatgttatgtcaaggtgtcctaataaagaactcagagttctgcctttgctccccaggatcttttaaaaaggaagaactctaagttgttgttgagaatttcttacatttgtatagtatttatgttgtttctggcctttcttctaccccctcagcctcttctctgtctcccttttaagttcatgacctcttcctgtaattattattatgacacacatgcttgcattcatgcatgatttcccagagtctgtgggggaaagaaagagctaactttcatatgtacatctgtgtgaacacatagggagtaggggtaggggagcacccattagtaatgttctactgtacacgtgtctaaggctgaccacttgagattaaataacctactggggctcgtcccagagagactggtcttccctccctctcagccattgttcccttgcagctcttatattgtggctggtaatcctttattgcgttagcgtgtggactggtggtgtccttatgtaggttttgagtcaatcctagtattgaggttctgtgagtgcagcatccctttcatatctagcagacattatctagcagcaggaatcctggttcttggcctcttataattttccactccttcttcagtgatgttccctgaactcaggtgtagggtcgtattgtcagggtaccagcaggggctgggcacctcatggccactcctctgcattttgaccagtgtgggtcacctgtggtaccactgctttgcaccaccagagatctcttgctatgtttgtcactgttgtggttcataggttttatagctatgtgagactattgattgctgtttcccttggcatgaaagctagtcctcagggaatcttccaggtcagttctagcttgactcctccaagtcctgcttctaaactgtgtggtgtcttcacaatagggttttcaagttctggaaggcaaccaaaggagagagagtagtctatcttgttgtggagagtctcttaggctccactgaccaacaacttggagggatttcccatgccaagcatgggggtttttgttagtctgtgacacttgtaggggaacatcaaccttgcttaaactgtttatccatttatatacatgcatgtgtatgtacatatgcatttaaacacataaaattacggttatggctttttcaaacatccacagtggtttttatcactgttttctccttttccctccctttgccctctcttgttaagagtccccctttccccgtaaaagctggtatgtcctacagttagactttgttgataggtgtgattagatttgccttgcttatttgccttttttgacccgcacatcagttgccaagcattaatagcttgaagtcagcccactacaaactctgttccactcaaatattcattatattatgctttaaagttttgcctaacgctagaattaaacatttgggagagacgaggaaggctccaagaattcctcttcgttaaaatgttcaaaagcttctcagaagactggatggattggcacattccaggatcccagcactaaactgaagctgtagtgtcgcaggactgcatggagagtcacagcccagccaggactgcatggagagccacaggccagccagggctgcatagcagatacctgtttgaaaaaaaaaaagaaaaacaaaactaaaccaaattagaggcagcttttgccatactggactataatcttagctacttaggaaggtgaggcaggacagttatgagttcaaagacagtctgagtaagttagtgaaactttgactcaggatacaaaaagaacggggactgtagctcagtatggagtgcttggcctagtaggtgccaggtcctagattcagtttctagtttcacaggaggaggaggaagtagaagaaaaagaagagaaagaggaagaagaggaggaagaagaaataaaacatctctatttttaaattactgtacagagctttaggccattgtgttataaaaacaatgaacatttttgttgattatttcattttgatttttcagttatacaagggggcacattttccataagttgcttaattttcttgtgtcacttgctgtaaaatggaaaagagaacttgaacccagttccagttctaagacagttccagctgtcttagaatcttatgtttcccagaatacgttctggtctccttctggtcccagtgctgggcctccatgggcaaagctctggaaagcaagtgggtggatggtacagtaaacctcagagcacagggaaagctttatgtgtatgtagaaaatgctttgttagacatttgtagtatgtccccttaatacatttagagaatgcagatatcagtagcttgccgtgtaacctaactaatttggagaactacctttctttaataacgagattgctgtgtaggaggtttggtgcattttacatctcccaggtgattctggtatcacagcttgagccactcgtgcagatggggaagaagtttacaaaggattgaactgaagaaagtaagacatagattattttaaaatagtagaactttctgtctttaagtacatggaataagtatgtaactgatgtgctccagttattcagattctagcctgaaagtgcctttgggtggtggcttttaataaacagataaaaacaaatttgtacttaacatgctaattacatgctctttaaaaatgtcttgagagcctgttggtttttagagtcctttaaagctgttatctacttatttagacacaggttggccttgagtgtgctaagcagcagaggatgacctggaaccactcacactcctgcttctgtccacgtcccaagctctgggattgcagctgcatagatgagtgctaccatgcctggtctgtgtggtgctggcacttaaccagcccgctgcatccccgtcctacccccctgttttaacctttactgacagacttcctctgagtctactttgtttcttgaagagaagatatgctagagaaagccaggcttttttggaagagcataaaaggaatctgaaagggccgcttggtttacataacaagttccaggacagccatgactacatagagagaccctatgaataaataagtaaataaaaaaagaatgaattaataaaatagataagtaaataagtaaataaacaaatgttcttccaatagatgaacaaaacttatgaaatattttgtacagtgaataaacactaataaaagtttaaagaagaaaactaaggcaaatactctttctgctgtagtcaataacagggttctagtagttttcaagcaaatatactgtgtagcatttagtttctgatccgtcacttagtctgtgtttaataaatgaatttggtgatgaactgagatgtgttgttatacaaagcaactttcgagcttggggattgactgaaatttctaggaacagtcatgacattacacgactttttctttgtaaggtgcatgttgtattggaaagtgaaatgacccggaagtatatgaagttaatgctcctctttcctgcttccagttccctagagcggcattgtagtgtactttctacacttttgctacatgcatagagcacatgtatgctgtattttactttgcactttaatgtggcattcatgctctataaaattgcaacaatatgtaatggactcttcaatacagagctcatatatggttcaattatattgccttaaatagttcatttaaccaattaactggcacttagatctccttcagttttgttttttgtttgtttttgttgtttgtttgtttctttggttggttttttgtttttgttttttcaagacagggtttctctgtgtagccctggctgtcctggaattcactctgtagaccaggctggcctcgaacttagaaatctgcctgcccctgcctcccaagtgctgggatcaaaggtgtgtgccaccactgcctggcgctccttcaggtttgatgaccagtgaaatccgtagtgagggtaattgcaccagcagctatctatctgttcttgtcagaaagatgtttacaatgagaaatgctggaccaaaggaaactcacatcttgaatatggtaaatgcttacaaactgatctcctaaagaaggaacagtttacaggtgtgtgcacagcgtcatgcctctaacagcctaggactgttgtaatttaaaatactttctaaccaacttgcagaagttatcttgttttaatttattcttatttgatttttaaccaattttttaaatattttcactaggtattttaattttttagctttgctttcttttttattttattttgttcttctttatttaagttatactccagattttattccccgccccccaacccaccctcccagtgttccacatcccatacctcctccccacacccttgtctccatgaggatgttcccaccccctatccccaaccccacctgatctctaaactccctggggcctccagtctcttgagggttaggttcatcatctctgattgaataaagacctggcagttctctgctgtatatgtgttggggacctcaaatcagctggtgtatgctgcttggttggttgtccagtgtttgaaagatatcaggggtccagattaattgagactgctggtcctcctacagggtcgcccttcttctcagcttctttcagccttccctaattcaaccacaggggtcagaagcttctgtccattggttgggtgcaaacatctgcacctgatttctttcgtctgcttgttgggagtatagtcatgctaggtcccttttttgtgagcgctccacagcctcagtaatagtgccaggccttgggacttccccctgagctggatcccactttgggcctgttgctggaccttcttttccttaggcttctgtctatttccatccctgtaattctttcagacaggaacacttatgggtcagagttttgactgcgggatggcaaccccatcccatacttgatgtcctgtcttcctgctggaggtgggctctataagttccctctccctactgttggtcatttcatctaaggtccctccctttgagtcctcagagtctttcacctcccaggtctctggtgtattctggagggttcccccaccctcctgcctccgcaggttgcctgtttccattctttctgctggccctcagtactccagtcctttttcctcactcaataccagatcaggttctcctcctacccctactttccctcaggtttctccttccctccccacttgtgattgctttcttctccctcccaagtgggactgaggcgtcctcacttgggcccttcagcttgttgacctttttgatttctgtgggctgtatcttgggtattgtgtaattattattattatcatcatcattattattggctaatatctgcttattagtgagaacataccatgcatgtcctttgggtctgagttacctcactcaggatgatattttctagtttcatccatttgtctgcaaaactcaggatgtcctcgttcttaatagctgagtagtattccattgtgtaaatgaaccacattttctgtatccattcttctgtcgtgggacatctgggttgtttccaacttctggctatcacaaataaggccgctatgaacatagtggaacatgtgcccctgtggcatagtggggcatcttttgggtatattcccaagaatggtatagctgggtcttcaggtagatctatttccaattttctgaggaacctctggattgatttccagagtggttgtaccagtttgcaatcccacaagcaatggagaagtgttcctttctccacaccctctccaacatgtgttgtcaccctctccaacatgtgttgtcacctgaggttttgatcttagccattctgattggtgtaaggtggaatctcagggtcgttttgattcacatttctctgatcattaaggactttgaacatttttttaggtgcttctcggccatttgagattcccctgttatgagttctcagtttagttctatgcgccattttttgattgggttgtttggttttttggtgattagcttcttgagttctttatatattttggttattagccctctatcagatgtgggattagtgaagtttttttttcccccaatctgtaggttgccgatttgtcttattgactatgtcctttgtcttacagaagctttccagtttcatgaggtcccatttatcaattcttgatcttagagcttgagccattggagttctgtttaggaaatttccccctgtgccaatgagttcaaggctctttcccactttctattctattagattcagtgtatctggctttatgttgaggtccttgttccacttggacttgacctttgtgcagagtgacaaatatgggtctattttcatttttctacacacagacagccagttagaccagcaccatttattaagatgctttcctttttccattgtatatttttggcttctttgtcaaagatcaagtgtccataagtttgatcaacatgtctgtctctgtaccaataccatgcaggttttatcactgttgttctgtagtacagcttgaggtcacggatggtggttcccccagctgttcttttattgttaagaattatttttgttattctgagttttttgcctttccagatgaatttgagaattgctctttgcatgtttttgttgggattttgacggggattgcattgagtctgtagattgcctttgattgcatgaccatttttactatgttaattctgccaatccatgagcatgggagagctctccattttctgattttactttatttttacatttttatttattttagtgtcttatgtgagtgttttgcctgcatgtgcgtttgtgcaccaaatgcatgtctgtacctggggcggtcagaaaaggggtttgggttccctaggagcagagtttctaaaggttgtgacctactctgttgactctgagttgaacttctccaagaacaatcaattgttcttaacctctgagccagttttttctttttaagcaggttcccatgcaatccaggcttcccttcaacttgctatagagcccagtggctctgaccttgaactcctgaccctcctgactctccctgccaagtactgggaactatttgggtttcttttcccacattttaatctttgcatttgatattttaaaaattgagcagtaagagctgcctgggcgtggcattgctaggctttgcctgctctatgttttcagcctatcatttgtcatttacttttgtttgtggtcaattcagcaagtataaatttatagtttttataaaactttggtttagggaaaatttttctctaatttttcaacttatgtctctcaattatgtaatatttaatcttaggtatttgtgaatgtatatgttttaaatcttagttgaaagtttagtgggttctatatttcctgtaacatttttttatttggttattaggaaagttgtatgcatgtttgtgtgcacacacacatactcacatatgctccagtattcacatgtgttgtttatcttttgatatctcagtcctataatactgctagttgagttgactgtcttaagtatacagttaaattattccttactaaataattgtgtttgagatacatttttgcagggtgttatgttgacaggcaatgagtttgttgtatttgttagtgatttaaacgaatgagacattttttaaatgtgtactttcactttatgatatgataaataatgacaggtacagctagcataagcagggtatttggaatcctcagaagcttttccgaatgtgacaggtcatgtaatcaaatttttggagaaccctggtctaggtgtgtgtctgatttgggtttctgttgctatggtgaaacaccatgagcaaaagcaggttggggaggaaagggtttgttaggcctatgcttctgaatctgctgtccatcatggaaggagctcaggacaggaacccagacagggtaggagtctggaggtaggagctgatgtaggccacggtgggctgctgcttactggattgctttccatggcttgctcaggctactttcttgtagaacccaggaccaccagtccagggatggttccacacataatgggctgagccctccctcatcaatcactaattaaggaaatatactacaactagattttatttttttatattattattattattattatttgtttgtttgtttggttggttggttggtttctctgtgtagccttggcagtcctcgaactgactctgtagacgagcctggccagaactcacagagatccacctgcctctgcctcccaagtgctgggattaatggttgtactattatttgccaggctcctacagctggatcctatgaggtatttttctcaactaaggttctctcctttcagatgactcttgtttgtgccaagttgacataaaactagtcaggacagtgtaacaacttacctttttttgtgagttcatgtattcatcttctgtattgcaaatgcagtcgtctctgtttttactcatttattgtttgtccctggatgctcatgagctgagctgcagctggaaatcctggcctacttggtttggttccttggggctgtttttttcctgtttgtactggtgctctagatgagctagtattcatttgaaatcaattctgtcattttctcttccctctaatgttgatatgattctatatacctccaccttgcttctctcagactcttagcttctggcctcttttcctctaattgttgctacccatgtgtataatgacttgtgtgcatatgattagagtagaccacttggtattacaaagccacttgggaggatcacccctggggaagagaatttcctcttacagcatttcttagtaacctgtagctctttgtctagggttgaagccccatgagaattctccttccattgctattagcatgtatgttggtgttcttgtccatgtcttttgatggtggcctgtaggaaggcatgggattctctagtcacgggctggaaaagttaggaacttctccaaagaagttgctgcctgttataggccagtcttgtcttatgatggtcgagtgaatttgtggaacagtgctgtgggggcttggaaacctgtaggactaagattgagtcactgagttttgtaagggtaggtattccaacaccaagctcaaaggaaaatatatttgcaactcccagctatacctgttggcagcagatggtccttgcttcactaatgttttcaattctagaattacctggattcagttgctaagttatagctcatgaatagttttcttcacaggcattctgcctatttgaatcaccctccctaccttttcttccaccccactcatggaatttcctagttcccagtcaaatctttgagagcaaagaaaacagaagttttggaaggcacagtggaaagccttaaaactcacagcatagccattctagtaaattgtaaatagacctgtaacttaattgggccctgcagatttattttgtctgtgttgatctgtccttgctttccctgtctttcctagttcacaaaagccttttaacactctccagttttattgcaacatagtgggggaacctagagaaaaggaagtcttagtgtcttgtttcattttctttttctcaatccctcagagaaaaacaacagaggagctctctgtgtctctctgtctctttctgtctgtctgtctgtctgtctgtgtgtatgtgtgtgtttgtttgttgggacattagctatgaaaaaaaggtgttttgatgcccctaactgcccacataactgttagcattccctactgagagaagtccatatgtataccatctttgttgtaaataaattgaagagatgtgggcttcaaggtttcaatgacattgctagtatttagaaacttccaaatgcctgctggtgtggaagtcctgctagtctatgactttcttacctctttaactttttttttttaagtgcatatgtgtgtgttgcatatgtgtgtgttgcatatgtgtatgtatgtgcactgtgtgcatgcagtgcccacaaccagccagaagaggacatgggacctcgggaaactggagttacaaagggttgtaaactgtgggtgttgggaattgagcatgggtcctttagaagagcatccagtgctcccagctgccgaaccatctttccagccccgttccttacttctcaaagtcacctctgtgcccattcttcagcagctgtgctataacacgttattccttgctcgaatcactggttcattaccaagtgtctttggcttgcttagttcatgtcttccttcatccttcaatcccagtgaatgtttctggggacagataagctcatcctgccccatttacatgaaatgcttttgagtttgccttagcatggaatcttactgtgtccctatgtgtggggacagtggtcctgtaaactaagttcctgactcttcctttgcctcccttgccacccatcttagccttgttagaactcccagagccttcctagcaccctctggctttgcaccataggatatactttctccattggttacccaggcagttcttggaaccagttcctcaaaattcagcatgtgtgacagggggtcccctgtcctcagatataacccagtgatgttatcacctgcatcccccatgtgtcttgtcatttcactgcctttctttttattttatgagtttgctcctagacaaagacttgtctatctttctgcacgtcagtgagatcttactacaaggaggtaccccaccagtgacaaagtgttgaagcccatgacttaagatacgcagcttttgttctctccagacatctttgttacagacctagatgtctatagggaccaggtaggaaataagaaataaagagtgggctggtcattttctcttcatgtttccaggatatgactatctttttaataatatttttcatttattctttgaaatttcatacatgtatatggtgtatcttgattatttccaagccagaccttcctttcctctccctcagaccctgaaactcaggacttccttgtgttaaatttccctatgtgtgataaatgtcggcacaagtggttctccatcatcttcctacactgtcacataagaaatgtgaatatgtcatatgatgcctgatgagttgtgtagacttgaggaccaatgttgcttttgtatactgctgtgcgtatgaacgtggctctttctacgttttggttttagtcttcaggttcatgtcctgatttgacactggaaagatacccagttctccagttttgtttgtcgtaatttctagtcttattgtctgtcttagttacgagtcttagctgagggcttggaagggggttattttggctcagggttcccagaggtttgtggccaggaagaagtggcagcatgcacagcaggtggctggtcatgatgtgtctagtcagaaagcagcaagagatgggttctagtccccaactcactctctcctttgtatttataagagcgttcagtagcatccaggctgtgttaccagcaaacacaacacctcagcaagctgttggtcaactttcctaggatttgcctaggtagaatgaattctcagctaatgttaagctaagtctaggattaaactttgtggctcctgaacttttaggaggtaacatattgcctctagtatcaaacttgattaaacttgttaactttaatgccatttgattctgttggggtagaagaatttattgactactctagagaaaggatcttttttcccccagctgtctaaagagtagaacgtttattaaagttttcttggtgagctgaaaaggagagacatgcttcttttcctaggcagaaacaggtctggggcataattaacatgtggtaaaaattggataattgaataatattgacttcttggggattcagccttttatctactgctgtgtgattagttttttccaacctgcagcttgcttgagcagggagtctacagaggattaggaaggaaaaacttgttagcaaagtactgaaggcttttgatttaattttgtactgcccatggttatctggtttccctaagcaacctccagttttcagccactttataatcatgatgtgataagataaactgatgccttcatgaggaagtaactcaaaagaagagacagaaaggtcactaaaaagtagagaggagccaggtgttgtggtgcacacatctagtcccaacactttggaggcagtgcaggtagatctcttgagttcaaggccagcatagtctgcatggtgagttccaggccagctagggttacacaatgagaacctgtctcaaaacaacaaaaatgaagagaaaggacgatgagattgtgcccaacgagttttctatagctcatattggccactgagggagactctagaattaccatagcagtatggggggtgcaaaggaatgaatggaatcctgcaactataaggggggtttgtattgtaacaaccacagcctttcctcagtggtctagctagggctcagcactcagtgtcgctgtactggctgacgtgtattaagtgtgtgcttactaagtagtagcctgcctgtctgtatgcacctgaacccatcagggccagagaggagtgagtgaggccgtgagcgcctgtgtgaatgctgggaaccatactcaggtcctctggaagaacagcctgtgtttatagtctctgagctgcctccaaaggtttgcaagttttaattattctttcccagaataagttttccctaacattgcagaatttttaagtgcatgaaaaaagttgaaatgtcaacccatattagattctataattagtgcaattttactatatttattttatcatatattttattgtatacctattatttcatttgggtaagtttgtctttgtttttgttgtatttcagagagttgcaggcagaaatactacattaactcctgagcatataaatatatcatgagccagatagagctataaaaaaatgaaaaggagatttttcagttttatgttttagaagtagtatgtgtgtgcaatcactttgggctggtttttttttttttttttttttttttttttttagatagggtcttatgttgatcaggtttgcctcaaacttgctaggtagccaaggctggccttgaacttctgatctttctgcctctcccaagtgctaggtttattggtgtatacacaaggccttgctactttcaattcctagtccacagcaagtcagcactgcaaagtgaagtctatgtgtttttatttgaacggagcctgaggccactgcagtaaatactggttcagcatctaataagaggaagcttaattagcaaattgtttaagccctttgctaaggatgttggagcttcattgttactgaatactttcccttttctcttttttctgggtgtgactgacttgcctacagcatgctgcatggttgctggtaaaacaggaaatggggtaagtaattgaagtagggagtttttaccgtcatttaaatacaagctacctagttcttagattacttttactatgctactgctccctcatcttttcgagtagactcagtagctatagagacattggcacatgagatactttctttatgtaccatgacaagtttgcttccttacacagcaagaaccaagtgccttacactgcccagaccgactcagttgatgtgactgtagataaatatttacagcattaggcattttttgaatgtagtttgggaggctatcttaagataataaattttagatttgtacttgaagctaagttataaataaaactagatgataaaccatgaaaagtaaaattctgcttaggtcatgtaagaccccggaagctgggcctctgctcaagtcccgggatgagctggccggcaccccaatgacctcaaaaccacacctgatgcaaactgcaagaggttttattatcagctagctgaggacaaactcctcaagccatgcagggcaggggcgtttgacccccagcggtagcagtaggggcttttaacagctgaggaattggggggagttgggaggagagttcttctcttctggatgtccttggtaaaattacaattatctcatctctggctgtaaggctcagaaacaaaaaggcttttcgctggctatagagaacaaagagcttctttctggctgtattcatatagagatcagggaaaacaagcttgggggacgtccatgggctttaccttccagggagaaaggctctaagtcggggtctcacagtcagagcaactgtgagcttatacataatacattggcatacatctcttacagggtttggaatctagatctttggatttaagggatgtaatatggtattaaatacaatatataatacatacctttctcaggactatacgatgtagttatgagttatttctgtagtgaagaaaaccacacatcaagttatgtaaacagaatcttacatgttcaaatcaggatttggttgccagctgcattaaaaaaaaccctgttaattcttcagagttttgttttgtttttacataaacattctgtgacttaaagaggggctgtttgattattggaggttcctgtgaacttcagtgagaaaaacccagaagaaaacagctttctatattagaagcttatctgtggttctgaggtttatagaaaaagaatagttaacctgtattttttgttgttgttgtttattttgtattttatgtctgaatcttccatttttaaaggaacaataatcacatatttatcaaagactgcgggcttaatgaggttttatgtttgtaagtttcaaagcctaaaaatttaggtataacaatttttttttaagtttatagaaaacaatgttttaacaggattagcttttgctgtagctctttagattctcaggtttataaacaattttaaaatagtttatttttctgtttctaccttttaaaaaaacttttatttatttatttatttatttatttatttattatatgtaagtacactgtagctgtcttcagacactccagaagtgggcatcagatttcattacggatggttgtgagccaccatgtggttgctgggatttgaactcaggacctttggaagagcagtcggtgctctgaaccactgagccatctcaccagccccctgtttctactttttatcctttaaaatatatcttcttggggctggagagatggctccatagttgagaacacttgctactcttccagaggatcctagtttgattcctagtacccacacaatctctcccagatcaattcattgtaactactacctgactgactatttctggcctgcagttagtagtttctgctggtcttgctaattgtaaggggtattgttttaggtaataactccatcagtgaagatcagacagtaagatggatgactcagggccaagtgtgctagcactcacctttagtcccagcacttgggcggcagaaccaggcagagctctgagttcaaggtcagcgtggtgtacctgagttccaggacagccagggctacatagagaaatcctgtctccaaacaataacgacaacaaaaacaaataaaagagattactcatgattggactctgccctatctgttgtcacaagaagtcctgtgactggccatcatggtgtttggtattttctttacttgaatgatataggcttgttagttgagtaataataacttgaggtagtagatcagttttagtaatgctatactctgttttacttcctcagatcctttttattaacaattgtaggttgcatactaaagctagccctcataatgggcatttatccagatgtattgggtcatgaatagattttagggaaatgtgagatcattatttaactcatattacacaggtgaacatttcagaatgttgatacttgaagatagaatgtttcttcctaggcagtgggggctttggggagactgcagcttttactttgatacccataaataagccccattgttagcaagggaggagatacaaatgttcgtagcatggatataacattgcattagttttgtgattccaagctgtaaacattaactttatttgacctttccagaatgtataaatcttggaattccaactcaggaaaatatattagtgtgcttttttttttcattgaatcttcaaaattaggctcacgtgccactaaaaatgccagttctttgctgtctctaaagtacaggcctatgaagtgaggaatttttgttgggtttatttaattttttatctactgtatacaacagtgcctgacacatagtaggtactcgttcttttaaaacaattgcatatacttttctctttacgtgatcaatgaagtttttaatgaattcttatattattcagaaagcagagtctgtccctgggaagaaatgatgtagtccagctgaaagaagcctacaagtggataactcaccccctgttttcagaggagctgggcgttcccactgatggaaaggtatcagacaatggccagtggcactagtgacctctgggtcattgcttcacctcattaatgctggatacctggttaccagaagcttatataactctgtctctgaaggtctctgaaggttttaaatgttcatttagaactctctaaattgatgttaaggcctcttatttgtgatccaggacacttagaaagataacaaatactgggaacacattaaccttaaaattctagaactgaatctttacttggcatgtacttgtagtttagctggaaggacagatttactgatacaaagcaatcagtctattaaaacctgagcagggagccaggaagatggctccgtgggtaaaggtgcttgccatgacgcctcatgacctgaccagttctttttttttttttattacgtattttcctcaattacatttccaatgctatcccaaaaggtccccccccccccactcccctacccacccattcccattttttggccctggtgttcccatgtactggggcatataaagtttgcctgaccaatgggcctctctttccagtgatggctgactaggccatcttttgatacatatgcagctagagtcaggagctccggggtactggttagttcataatgttgatccacctatagggttgcagatctctttagctccttggatactttctctagctcctccattgggggccctgtgatccatccaatagttgactgtgagcatccacttctgtgtttgctaggccctggcctagtctcacaagagacagctatatcacggtccttgcaacaaacgcttgctagtgtatgcaatggtgtcatcgtttggaggctaattatgggatggttccctggatatggcagtctctagatggtccatccttttgtctcagctccaaactttgtctctgtaactccttccatgggtgatcgtttccaattctaagaaggagcaaagtgtccacactttggtcttcgttcttcttcagtttcatatgttttgcatattgtaccttatatctcgctatactaagtttctgggttaatatccacttatcagtgagtacatttcatttgagttcctttgtgaatgtgttacctcactcaggatgatgccctccaggtccaaccatttgcctaggaatttcataaattcattttttttaatagctgagtagtactccattgtgtaaatgtaccacattttttgtatccattcctctgttgaggggcatctgggttctttccagcttctggctattataaataaggctgctatgaacatagtggagcatgtgtccttcttaccggttgggacatcttctggatatacctgaccagttcttgactcccacttggtgacaggagagaatcatttaccacaggttatcctctgacctacagacagacagacagatgcacacactcacacactacacatacaaaatacactcatgcatacatacacatatgcacaagcatatgttcacatgtacatgcacaggatttaaaaaaaaacctaagcaaatactgaattaattctagactatttgatggtttatctgtgcttaacttgctttgaaatacattgacatttggttttcaactacagtgaagtgggtttattccataatacctgagttacttcaagtctctgtttctaggcctttgaatctgggacgcctggccactgttccagttctagagagagtctagcctcagtcctgggagagctgaccaggtttaccctgtgtgaaaacagggcaggtgcccagcttacgagacgttaggcttccctagtccagggtcactgctcattttgcatgaaggggattccccgagtattagaaatattcctactcaagtaaagtcacaacaccatcttctaaggctagccaggtttggaaaccattctaaaagatgtgtatgctctatgtcattgtaaaagtaatccttttaagtttttattgctttttgagacagggtcttatcactcaggtgggactcgaacttactgtgtaaccgagaactcctgacccttttgcctccccctctcaagtgctgcgaccagcaggatcagctctttaagtggaatacaggaagaatagagtaaaactaccccacagatggtctgagagggaaacaaaataatgaaagcactttggaaattagagaagtcattaataaactgttcttacctcaaatttcagttttgaagcagataattttaaattttacatactgagtcaaagaacagaaagtgggagacaaaagacctaataatgtgtgagtaggtttcagtcttctttactagaaaatacttggttcattttttgttatgtagattaggatacggaacaaaacagaaaccgtttgtcattgcggttctagagactaggcttggtaaagacctagtgagcttagtgtcttgagaactcaataaaaagacagttactgccttgtgacatttatagcttttgcttcagtatcaaagtttgaatagtctctgcagaggtaagatgtgtagagcatgaaattattcacatacaaaaattcttgctgcagacatttttaaaaattacatgaatattttctataacttaatgtctcacagtccttataactgaaagttatccatgaagtaagattaataagacagttttccaaaacatctaattagaagtggctagtgagaatcataccaaatagcttatggtttcaccctggtggaatgggattggaaaaccatcttgtatttgattatcgtataatggggaaatatcacttttgaaaaaacaaaaattaaaaatactttttttttgctggtttgttttttgagacagggtttctctgtgtagccctggctgtcctggagctcactttgtagaccaggctggcctcaaactcagaaatccacctgcctctgcctcccgagtgctgggattaaagatgtgtgccaccacacccggctaaaaatacttttttaaaagtcaaatttgaatatttcaagaatagacttgaaggctggggagatagctcagttggtgtttgtcacacaaacatttggaccagagtgaagattgccaaggctgcataaaagccgagcagaggtggatcccaagagtgtgctggccagcctggtctaactccatctcagaagatcaggctagcctctcgtctccacatacacatggacatatgcatgcatgcgcgcacacacacacacacacacacacacacacacacagaggcttcatccagacttcttaaagatttaaacaaaatgtctgtcctgctagcaattgttcagggacctggaatgtctcttcgatttttagttatctccttccagctcctgaatttttttttaaaagatttatttatttattatatgtaaatacactgtagctgtcttcagacactctagaagagggagtcagatcttgttacagatggttgtgagccaccatatggttgctgggatttgaattcaggaccttcagaagagcagttggtgctcttaaccactgagccatctcttcagcaccccagctcctgaatttttatccatcttcattctaatgtacgcatttgtctgacactgacacaagctgatttgacttaaaaacttatttgggggaggggtatttggggaggtttggatggaaagaagggaaaacagttttgctagtctcattggttactgggtttagaagtgcctcccttctaaagcagacaggcaggtttgagagttctagtattctaggttccttgtagctttctgagccaacctttaggagttgacttctatttccattcataaatcagtagctgttagtttctttttgctcatttaaaacccgtctttgtcatttgtagagcttgttcgaagtgagcgtggtctttgctcatccagaaacagctgaagattgccatttcctgtaagttgccccgtaaaaaagtgtcaattatgtaaaattgttagagtttttctttttcatgaagatagtattgtttctattttttgtgactactttagaacttgtcatgtcttagatttaaaatgtgcccctttgtagagattcctcagagaaaccaatacaactcaaaaatgtatacattatatttatatagtatataaaaatatataaatataggtatataggatgtatttaattatgtccacctaatataatttcattaaatgttcttctttttctcttcctctgactctcccccttcctttcttcttctctaccccctcttcctcctctcttttctctccccccctttctctctttttttccctcctgctcttcttcttcctcctcctttttttcttctttttgaaacagtgtctcacaatgttgctctggctgtcctggaactcactatgtagaccaggctggcctcaaattcagagttacatttgccttctgcctcacaagtgctgggatgaaaggcatatgtcaccaccacctggctagatttttatcttaacttgaattttatttcagaggtgaagtttgccgagattgtttcaaaccagctaaaaataaacaggtacttttactttttaccttatgtatttatttgttttcttctggaatttttgagacagccttatgcagggttacctggaactcaccatataaacctgtttggtctggaacttgtagctcaggacctctttgcagaactccaatcatgccatacattacccagcctccgctcttctctgaaccacacagcagggctccataaccccccccaacacacacacacacacacacacacacacatacacacacacacacaaatcttgtgtcttcggtacctaaaacacagtgccctgtggatgtgctgctaagttctgctgccagctcaggatgtagtctggctcctttggcccgcagttgtatcatcttctttgtactgaccctggggaaacacttcagttggcatttaccttcaaggagccaagaacccctttgatttaggcttacttccttcaaatgaatttgactcttcacaagatggaacctaaagtgtgtgcggtttgccctcaagacacctttcctgttgctccagtgctgggcaggaggttctcttcatctctttaacagttgtcccacgagtagcccctagtcgtcctcatggaagctttgttccacctgacaccaaatgaaccaggcctgtacacattcctgaattctcctcagcatccttatctttccagcttccacaagaatggcccagtaggctcttcttagatcatcaagagcttctctcactcaaggttcccaactcttccacattcctcccgtaagtcagttccagaggcttaaggaccacagggccaggctcatcacacagcagtgggctgggctcagtattgatcctacctttgttactttacctttgctgtgtaaaataccctgatagaatatttggagagaaaagttttggctcacagtactgtacaaaaaggagccagtgagctgaacacaagtatccattgagtctttcttcctgatgtcttgatctgccctggctgctttcgttaaggacatagtctgaagaagaggcctggagaggcatgccaggtacattaagagcacctaagtttgacttgctttcttgggattcttaagtatttcttgattttaaatatgtaagatgatataattcatccactcagtgtatttcagctcttgtttagttgatgtctttttcatttcaccccatatagtcggtatttaccagaatggcagttttgaaagctttgagtaagataaaagaagaagacttcctcgggtaagtatagacgtaaggagcactgcacatgtttagaaacagtggggaatcagtggtgctcgcttgcctggctgtcactcaggctgtgtgcatcgcagtccctcgcatagcaccagcatgtgcagcatttagtaaatgttcatcacattacacgtgagtcgtctgacttccatgtcttacagagaggagccagagtgtggctccatgcacagtacttacctagcagggttgagcctgggtccaatcctggtaccaaaacccagacttttgattttgagaggaggacattgatttccagaacaggagttgcattgcctgagtaatttactggcccgtaggcctagtgcttttcctgttccatctcaaatctgatactctgtagcgtggccatgtctaaaggagacaagaggaggcttgggagtgagctcactggaacagagagcactggctggagagtcagggagcctggcttcagctctgttctttactccacacttggaatcttagcgatctcagcttcttcttttgacatcattacccttttcaaaaatataaaattttaacatatagaaatgcagtaaactatattttaactatcagtgccttaaaaaaacttactgtagccttccttctagaagattcttgaataaataatcaagcaaaaattatgatagagcttcttattgtttatgaactaaaaaataagtctcacaatggaaatattctcactagattttaaaaagtaacgggtactctatctagaggctagagagatggacttgatctggtttcagcactcacataacagctcacaactctaacacaatccagagaatctgatgttctcgtctggcctccgaggacactaggcaggcatgtgatgcacagacatgcatgcaggcaaaacactcatacacagaaaattaagattaaaaaaatactttatataaataccagttcttgggtttctaaatgattttattgttaaggtaccttgggaaatcatagaaaagttccaagccccctgtttggggctaaatcagaatttaattatttacaggtagcctccagttggtgttttgggaattcctaaaggatggaccgaggataaattgttacttcctcttctgagattaaagtgcactagctaagagaatagcaccccagcttgtccctttttcaagacttaccagagtcacagttgaaatgagaaggaagaaggagggaaagtggaggaggactccccacaggtagggcagacgccccccccccacccccacacatacaagtggtaacacttacccaccacagacagctttacccaagcaatggaggtttattcaagccagcagcaagtgaccagatagaacaaaatggttgaagagcctggaggggcttctgcattgtatatgtgggttttccccagaaatctacaggctgttagaaattaccactggggaagataagatcccctgactgtgtagggcaacataaaagccctaatttgcttggtgccactgctgtgtgttcgaagggatggagtgttgtctcagtagttaagagcacttgttaaggacacgggtttgattttcagcatccatatggagttcactgcctcctcagacaccgggcacacatggggtacatagatgtacatgcaggcaaaagagttatacacataaagtagtaaaaatcttttttggtttttcgagacaggatttctctgtatagccctcgctgtcctggaactcacttggagaccaggctggcctcgaactcagaaatctgcctgcctctgcctcccaagtgccgggataaaaggtgtgcaccaccaccgcccagcagtagtaaaaatcttaaatcttaagatttaaaatcttaaaaagaagcggtattcagtagctgaaatcatagcttatgcctgttatctagtcctcaggagcctaggtcaaatggattatggccaaactgtgcaacacagtgagttccagaccaaccttttgaagccctttcgcaacataagcagacatggggactggaagatgcctctgagatttagcatgctggctgttcattctaggatccagcaaccatttctggccttcacaggcattccacacatgtggttcacacacacacatccaggaaaaatatccatgtacataaaaataaatatatcttttcatctttaaaacaagacagtaaaatttgaaaagtagtagaggcctgaagaaccctttttgctccaaaactctaaggtagggagaggtgccctccttgagttctaagtttcttagtccaggctgaagcagctcagttttgttgacttgtgtctcaagtattagagttcataaaatttattttgtttttcaggcaatttccttgtcctccaaactcaccgaagactgtatgcactgtccttgaagttgagtgcactcatggtgctgtttttgtcgctggtgagtatttcatctgaatagacacaccctgtgagcctccttcctgaacatgtccactgtctactcctccattctggtcttatcgatatagagaggcctgagactaagcaagagaagctatgcaagagaaaactaggaaggcagagggcagttaggaacatggaaaacaaacttaacaaaactaacttcactatcctgcctgtgtctaaacacttagctttatgtagagaaaaagaaaatgtattgactttcctaattggtatatagcaaacaggttttttgctttgtttcaaaagttatagttgctttataataaaacctaaaagcaaaaataaataaataaataaaaataaataaataaaagctaaaagcttaaatgaaattgcttttttacttttgattgcctctggtggctgcttttttttttttttatagcttattcataaggcagtgagtcacaatttgttaggaggttggggagttttgttttttttttaacttagaagttcttaaaattttcacaaaattaattctctgtaatacatcatcaacagtgaccatggtatttaaatgattgccagttatctgggaaggcagtctttttatgatcattatgtttcatagtatcatgtaactctttcagtcagtgaatcacattagtaaattatttcagtcatttgatacactgtctctctgtttctaagctaactattctattgttactttaaatcttacttaattatctccatgtttatgtgatggcttcccaagttagactgtttcttagttaaggcctgggcctccttttatatcctagcattcagaatagcaaacttactaaatagttgttacttccctttttaatcctcatacattaatcacagccttccattcaactacctgatacttctttggcaggcagatataataaatactccaggaatctaccacaaactccttggataattgatggagaaaggaaaatggaatcttcggtggaagaattaatttcagatcatcttctggcagtattcagagcagagagtaagtattaagatgctcatgttaatgttaaatacattgtcactcacaaagatgccttgaaggctccaggaaaatgtctccatttggttagttatgcctgcccgagctccttgtctccaggcttcccttgaacagccactgttcatgttcacagggcttccagcccatgctggattctagttcagagccaaggatagctgtcctttctcagtgactgctctctcctgggaaacccaaacaaccaagactgctttagacaaatgcactaatcgctaatcttggcaaacttctttggggaaacatgaagaagtttcacctctcatgtccagtgcttgttcaggagtacttagcgccttaacctacagagtaacttgggaggaaggttcaggactggagaaaaagaccaagagcaacagtttacagaggttttatggagtgcattttgttttcatttcctaggtattaatgagccaggtttgtgggatgagtcagatctgggaaagcttatgttttccttgtctcaacaggcctgcaagtcaaaggcagcttcaagtcttgtgattttaaatagtaggaatagataaaaaggaaagttgtaaaaacaactgtaaaaaacaacttcaagcagtaggcaatgccaggctttggagtggggcctctcatggatcagctaggcactgcctttctctctgagaaacacctaggaacatactctaaagtcaggcggaggtctagtggagcagtggccgtcccatccagcccttgacttgttaggaacaggtgctttagaccacatctctcatgatttattgtctgtcatatgagtaagctcccttttgttttttacttttataatttttactcttatgtattggcacttacacctgagtgttaaatggtactggatcccctggagctgcagttagagggctgtgagttgatcatataggtgctgagaactggacttaggtcctctgcaagagcagtgcacattcctaactgctaagccgtctctcttgtaccccacaccttctaaaggtttatatacattgttttcttctgtttgtatgtgcgcgtatggatgcgcatgtagaggccagtggtcagtgttggctgttgtcttggtagggttcctattgctgtgatgaaaataccatgaccaaaaagcaagttagggaggaaagggtttatttggatcataggccaccatcagaggaaggcaggacacgaatcaagttgggctgaaacctggaggcaggagctgatgcagaggccatggaaggtgttgcttactggcttgtttcacatggtttactcagcctgctttcttacagaacctaggaccaccagcccagggatggcatcacccacagttgggggactgggccctcccgtattgatcactaattgagaaaaatgccttacagctggatctcacagagacattttctcaactgaggctccatcttctctggtgactctagcttgtgtcaagttgacacacaatcggccagcacatctagatttcttccacagttgctttccaccttactttatgagacaaagtggcactgaacctggagctcaccagggtggctagccaggctagccagtgagctccaggggtctgctcatgttcagcgcacccaccaagcaccagggttagagatgcatgttgtcacccttcactgctttaaagcctttttaaattatgtatatgtgtatatatgtggggtgtgtgcccacaggtttaggagcattgggtcttctggagctggagttctaggtgtttgtgagctatcttatgtgggtgctaggaaccaaactcaagtcctgctcagagcagcaagtgctcttaccacaaagccatctctccagctagggctcctggtgctaacatggctgctgggtctgcgagctagagtcctcatgcttctacagggagcacttagcgtggcttagctgtcttcctagctgccaggcatcatttctgaatggagaaaagtgacctagaagacttaggaaaacacctttgtggcattgctatgaacttttacttaatatttataaactgctattttttcacaagatatgggttatgaagacttgaaaataagctcagcttgagctgatggcatcactcagtgtgcactgaggtctgactttggttcatggcattgcatcaaaaagaaaaaagtaaagaagtcttgctcacattgttgggggggggggctgcctggcttcctttctattctggaatcttcagtttggactacttaggtcccaaagaaacccctagtttcttcagggttccagggttgctggaggctttgaaactcccctttcaggctttcataaaggtaatttttttttttttttttggtcattttccacttgaagagggaaaacactgtaccctaactgaacatagacagagccgtgaggctgaggatatagttcacttgtgcctgggattgattctcagttggacatggtggtgcaggcctggtacttggaaggtgtcctaggagtcctagagaccaaggagacctagaaggttaaggtcatccttgctaaataatgagtttgaggccagtctgaggtctctgagactctgtctcaaggaacaaataaaaaacaggccaggcatggtggcacataactttcagcacagcactcaggaagcagagccagtctgatctctatgggttccaggacagccagtgggacccagtctcaaaaacaacaaaaacctcaaaaaaaaaaaaaaagacaaaaacaggctgggtgatggtgacagttaatcccagtgctctgggaggcagagacaggtggatgtctgtgagttcaaggccagtctaatctacatagcgagttccaagacaaccaggggtacacgatccctgtctcaaaaatcaaacaaacaaaaacaaacatataaacaaaactaaattgtatgttcagtgtattcactgaaaaattgatacgagctcagttgtctggacctggatgctgactgactcctgtgtgtgtggtagtggtgggcagttataagcttgttcagaatccctgattgataaccatcatttgccagccattatttctcagctaggtgaattgtaacttctgatcagtggttcatatctgagggctctgggaaaatgagctttaacggttatttccttgagtttgacagtgtatgcaacaaaccagtgttggatggagcagccttgcttcatacacagccatctgtcttttaatgagggcagacaaacttgtctctcagttgctttgaactagcccatgctgttatgtacctgctaattctgtaggtaataagtattaagtgttgacacattctcaaagtcaatgaatcgaggaagtttttccctattactacatttactaccttatttgctgaataaaatggttgttggaccaattccctgtggtctatgccctgtgtcttggcttcctggggtcttcaagccttcagccatctggcctgagtctgaaagccaccacatagctggactaccacttagtgagccgtgataatccttgctcttcattttgcttttgacatgacctttcctttgaggagatgccttaaacacatgtagaattagaggagacaaggcaaggcataattcaagtttagaaaagtccattttaagcatgtattctctcgtacgaaagcctttcccccagctgctcctcatcacacacttaagacagtcttgaggttttctccataaatgacttccaggttctatctaggattcaatctgttttcttagattttaagtttgaaaccttttctaaagggagctggttgcatgactcagtggctgcaggcatgcgtgctgagactgatggtctgagtctggtccacagctcccttggttcaaggagagagctaactctgtcctctgacttccacaggaacactgtggcgcatgcctgtacccacagcatctcacacagacatatacacatgtaatacaacagtaaatagaacatggagaagaccatggaactgtgcttgtaggaatgtgtgtgcagggatggtcttacatttgtttcctaccctgtgtctaccctgtgtcacatcgtactttccatcagtggcaactctctgagggtgtggacgagtccacctggtttacctttgtctctgtgacatcaagcacagtgcattgccacagcagacgtcctggggggacgcagcagtgcctttgtgaggctggactctgatggtctcccatgtttgttcatcagtgtagagacagctcagggctcccagtgcctcccagcccctctcagtcctccatccaatcttctgcttctgccttgttggttccagtatgacctggtggttaattggttcaagtgtcagtatgccggatccaccagtcttactaccagatctgcatttgttaatctgatgtgacttttggcatgacctgtctgcttcaccttcctcagaaggaaaatgaacacccatgaccactggttaaagtgtctggagtaatggctgctgtggaggtgaagtcttctatttgatccgtatctatgagctttgttatgtagaggtgtaaaactgtcttccctgtttgacatttttagtgtttggtctgtgatgataagttcatcttggattgtgcattggtttgaacatggctccatggtgggtttgttatataattaatttgctatttaaaggtcagacctttttctcaatttctttccatagagtttaatttcagcatgattgctcttgttgggttgcttacttgaaagaaaaaagacaaagtttttgccaagagccagtggccagggaggtggggccttcctcccagctttggctttccatgagatggggtacagatgctagctaaactctggctttgacatcagaaatatgtagctctgccattggattgtttgacactgggaatattgcctaaatctacaaagcttaatgtccatttatttaatgtttcatgaagttataataagaattaagtgatgtgtgtatatttttaccccagcttgtggcatatgatgagtagtatttattattactatgtctattttagccaagattgagattagagatgaggtggtcattagcccttgaggttacctcctatggattgctgggatgagttctaccacaggttggaataaagaattgcagagcttctgtgattctcatctttttctattacaggttttaatttctcatcctcgggacgagaagacgtagacgtgagaacattaggaaatggtaagatggcatcagcaccacttggttagaacccatttgcttactgcagccacttaaagccaagggaagactaggttctacagatgggggacctttgtgcatcatgcagctgccttggcaaactgctgtgtttgtctgaacagtcatttccttggagacttccttactggaagcctgcaagttgtaatgattgtgtgtgccttaagaaggtaatttttttccctccaagttattagttactccgtttaagaacttctcaggtgcgcaattttaatcccagcacttgggagacagaggcaggcagatctagttggaggacagtcagggctacctaaagaaaacctgtctcaaactttagagagaaatacacacactcactctctctctctctctctctctctctctctctctctctctctctcagggatgaccagttttcaaaatatctgtctttatttaaaaataactgttgcagctttcatttctttcctattttatcttgttgagttataagaaagatgatgagacatcgttttgaactgttagacatttgcagttccttctcctcacaggatcacagttgttctgggtcactagaagagtggctgggagaatggatctcacctcggtgtgtctgagcagtgctctctatgatgatagttccatcagtgtgtccaacttaattagtggctattgaagtcttgttttgtaattagcacaagcctatgtgaggccctctggggaaggcagtcctttttacacactgcctggatgggtttagcagcctccttgctccagcccccagaagccctattactctcatactcgtatatctcagacccctacactgcactaagctctcagtcctggagctcagcctgcttctcacacctcccgcgtttgcccggtggtaactgtcatcacgcttctgtttcctgccggggtgtgcgctgccaggaaggccctttgcagttgaacttctgaatcctcatcgagtgcatttcacctcacaagaaatgaaggagctccagcaggtaagggctgcacggctccgccaggcctgtgtttgtgcagagctccgactgagcgggactgagtcggtaattgtttttctttctccgatactgcagacaattaataaatcatctgacaaaatccaagtccgtgacttgcagcttgtcaccaggtaaggatggatgtgctagagagttcaaaaagtattctttcaaaagtttccaaagatcatatgtttgtaagggaattacatagcgttattaaggaaaataaaaatctagcaacccaattaaatgggaaaatgattaagtagacctttctcaaaggaggatgtatgagtagtctatgaacatgaaacaatgcctagcatcttgcacaagggctgtgcaagttcaagccacacccaggaggatggctgtcaccaaaaaatgaaagtatcaagtgctggcaaagacatagaggaactgccttgtgtgttgctagggttgaaagtgtggccacttcgacagtctctcctaagctcaaacatacaatgatcatatgacctagctgttccacttctagatatcacatcagcaatagaaatgaaagtatgtatcaatcaaagaccacatgcagatggttgtagtagtgttttttacaaagcagagaggtagctagtggtaatatagacctgtaattctactaactgctaagttaaggcaggaaggtttgaattcagggctatccttagccaagtagtgaatttgaggccagcctgggttatataatactcttacgttaaaaaacaaaaagggtagtagtagtagatactatttgtatatctatagaaaaacacaatgtgaaatcatcccttctgatacttggaagttccaagacttgtttgaacacctgagactatagatattactgagtctataaatagtgtgtttttcctgtacacaattgatgaaaagggttgatttaaaaaaattgagcacaagtcagaagcagagagagcacttgctgcccttgccaaggacctgggttcagttcccagcacacacactcgcgtgcacacacacacacacacacacacacacacacaaagtaactcacaactacttacctgtaactccagctgcaggggatctgactcccttttctggcctcataggacaccaggcattcatgtggcatacctacatgcaaacactcacacatacatgtaaaataaaaataaatggtttaaaaagtaaagcataaaagaataatagctaataataaaacaggacaattatagcagtatacaataaaaaatagttaagcaccgattgccccatttcaagtttttgaatgtaatacctttggtctgaggttgacaacaggcaaagagataaggggagcctacacacccacctggtgcagtatgatagggagatatggagtattgtatgtgttgacacaaaagttcttttgttgttttgtttagggaggcaatagggcatatgaaggaaggtgaggaagaaaagactaagacctacagtgccttgatatggacgaatagagctatccagaagaaggacattgggttcctggacgacttaaaggtacaacatgcagttctttgcttgtttttcttttcttctgcatatgaaaaagctcattgtcttctagtttattcccagcacaccatagggcttgggcttttgggtcagcgtgacctatgttcagcacctggctttcccactcactgcccagtgatgggatggtggtctaactctttggagtcagcgttgcttttaacccctgagccatctctccagcccctcctaggtacattcttaattatgtaactctggacaaattccttaacctctgtatgctttcatctgtaaaattaatttagaaaaaataaattagttatacaatgcatttcaagtggtaccaactacatagaaaatactcagtaatgctactatatttggctatctataaaatttaaatataaaacaaaatgtgttactagacattggtcctaaaatcacatatgaatgagtacatgcaggaactgtgtgaggcatgtgcattctggaagcatggcgctgggaaggaccagcaaggtatctcacagtggctaagagtacttttacagtgcaagcataagaacctgacagtggatctcagcccttgcgttaaagccagccatggccatgtatgtttaaaaccccagagctgtgggaggcagaggcaggaggattgccgacacttgctgactgccagcctagctccaagttcagtgagagaacccatctgagaggagtgaggtgaaaactaacagagcaggacccccaagggccttctatcctatacatgtagggtgggggaaggggaagggaggagggagggaagagagtggaaatttcaatgcaaggtctgaattagcataaatgagcacagttatctgatattatttaaatgggcagtattttgtagcaatctagatgagctactaaatgaatgacatttgtttcatatacaaatatatgtatacaaacacacacacatgcagagagtttatctgtataatagagttttactcctgagatctttagaatcatgtggtaaaagctgggtatggtggtccagaagatcaaggcaggaggtcacaggtataagccagcatcagctatccagctaggccctacctaaaagaaccaaattatttaaagtggttgttattaacataggaaaagtgttgtcctaaatgctaaggggaaagctgtaagaacacctagagggaggccttgtgattccagcacacccaaatatgctgagtgcgtgagcgcgcgtgcacacacacacacagctatggagaaaacaatatggcaaaagtttccaaaaataggatttatcgttagtcatgcagagtaaggtacccaatagattaaaaaagaaaaaggataaaggatctgaacagatggttgaaaaaactagagatgaccaagaatcatttggaatgctgctccacctccagggcagagtcacgctgttcccttaaaccattaaagcggacagtgagtctcgtggggagggaggagctgcatattgaagcagagatggaaggcatttcagacatggaaggcaacatgactcctgtgtaagggtgggcatgacaggtagcttcctgactcaacagtatcaaactgggaaggaaatgacattggctggatgaagtgacacagcacataaagggtgtgagttcaggaccaacctgggctgaggagaccaagcaaacaagccaaagtctctggttggataacaagcatcttggcctttaatcccagcactcgggaggcagaggcaggcggatttctgagttcgaggccagcttggtctacagagtgagttccaggacagccaggactatacagagaaaccctgtctcaaaaaaacaaaaacaaaaaaaaccaagaccagaagcagagttatgtattcatttaacctgggctagagttcatctggacataaactgcctgaatctgactcatgaggagcagcggccttgaaggctacagggaaagcctacattgtttgtccacccagggacacctggtccctccacaggccttgtgctttgcccctgctgcctagggcctttaaaaacattggggtttttgttcgtttgtttgggtttgagttgaagttattgatgtgtaatgaggctatcacgagtagcccagactgagctcacagtgtggccaaggatgttgttgaacttctcctttccctgagtccacctgagtgctgggtcacacaaatgcctggtttttatactgtgctagagagtgaacccaggggcatcacacatgctgtgcaagcactgttagcattctgtctaagctccaccccacagttacctggcaacagccagataggcctgacccacaataaaagggactacttgccccctcctcttactcttgcctctctcttgcctcttgttcccttgctcctcctccctcccattcccctccccattctctccacatggccatggcaggcctccacttctctgctctccctctctgcctttctctgcctctactaccgtcttaactcccctccccatgccctaaacaaacactattctatactataccatcgtgnnnnnnnnnnnnnnnnnnnnnnnnnnnnnnnnnnnnnnnnnnnnnnnnnnnnnnnnnnnnnnnnnnnnnnnnnnnnnnnnnnnnnnnnnnnnnnnnnnnnnnnnnnnnnnnnnnnnnnnnnnnnnnnnnnnnnnnnnnnnnnnnnnnnnnnnnnnnnnnnnnnnnnnnnnnnnnnnnnnnnnnnnnnnnnnnnnnnnnnnnnnnnnnnnnccacaccccatagaacatattcttatagctctttatcttttaataaacacatcactggtgccgtgaagcactgtaccaaataagccctatctccaaccacagatgaggagatataacacagacatacctttaagaatacagattcaatactctgtaaatcatatattccttcatagatttataaatcagttgggtgtaatggtacacatctttaatcccagcactcaggagtcagaggcagacggatctctgagtttggggccagcctggtctatagtcagttcctgtctataaggaaaacaaaacagaacaaacaaacaaacaacccaaaaacccatcaaaatcatagatgtaggaattatttagaatgttgctaaaaaaaaatatcttgcaaacaataggtttaggggctgacattgaggctcaatgaaaaataaatccagtaaaaacagattcaggggctgggggtgtagctcagtgatggggtgtctgcctggtgcaaggccctgggtgtgattcccagcactgcaaaaacaaaacaaaacaaggcatatttggggggttaccataggtctagttagaaaaataacacagaaaggtgattttatagaggcagaagtcagaggccactcccaggtacactgtgggtcaggtggtttctagcaacacttttatcatcttagagaattcccattgctataacaataaagctgacttagttctctgttctgagaaaagggccactgtaggttcactgctgctctcctccttttaaaggtcatcctttgtctaaggaagaaacagtgtgtgtgtgtgtgtgtgtgtgtgtgtgtgtgtgtgtgtgtgtgtgtgtgtgtgtgtgtgtggtgggggtgggagtctgtgtgtgggaggccagtgttaaggtgggtgtaatggtttccttttgtggactgaaaagcaaaccaaggacacatggcctgagagctgatgatgctgtgttgagagtggctctggtgactggcctctcaatcagtcctgaggggagtaacaagcagggagagaagagctctcactagctatttattattaatttttgttattatttttagacagggactcactgtgcagctctggctgtcataatataagaccaggttggcctcaaactcaccaagatccatctgtgtctacctctagagtgctgggattaaaggatgtgccaccatgccagacagtattagctaacttaaaggctggctgtttctgtttttttaatattcctctatccatcattataactactcacacagttcagtcttgagcatatttgtctttttggctagagaaaagtcaagcctcttagagacaactcatctcataaaaattataatcatcagaatcatggggaggggctgttgacgttgctgttgtggatctccatgcccttcaagcgtggtctttgttggaacttgctcttgtctgtggtgtctggaagggaatgtagacttttctttcttagcagagcagtggctgcacacggtcatgcaagtcaggaggagctgttacagcaagagactgcacagaattcagagttcttaagaactgacttttctagtttgcctaaaacctatttttaaaagcttaaagtagttgatcttttagagtatgaatccctatttcttaatttatatcatctaacatgaggggaaatctctaatttgatgtaattataaggaaaagcaccctgtattgctgaaaaccatctgaattgctaaggtatatgcagatattgctaaggtatatgcagatattgctaaggtatatgcagatattgctaaggtatatgcagatattgctaaggtatatgcagatattgctaaggtatatgcagatattgctaaggtatatgcagatattgctaaggtatatgcagatattgctaaggtatatgcagatattgctaaggtatatgcagatattgctaaggtatatgcagatattatatttgttagtctgggctaagaagtactggaagagtgtgagtcactgtacagacttaagttacgcttctgagctgaaacattttgataaacggtgatgcacctttccagataccgtctgttgtacaacaaaccacaaaatagtatactgtccgtaagatgtgcacacttcccgtacgcacaggtgacactcaggtcccattgtgtccctgccacttctcctccagcccagattcctctgtgtggcattagaagacaaagctgaacaatggtatcttctagcaaagtcctatgccagaatcctgactgatctgttaagtttccaggcaggagcgccctcactgtcattcccttctgagcccccctcttatagtgtgggtagtagtaatattcagaaaagaagtaattaggaactaggctatgagaagtcccattgagttagagcctaaggagatatagctggttctgatattagccattcccacctactccaaaaaaagaaacaaaacaaaagcccgtgggaactgctgtggtgagcttcaggaggcaaaggcagcactcaggtctgactctgcaattgcatcgtgtcttcctctaggacttaaagattgaccagaaaacacctctccgagtccttcaccgaaggcctttggctgtgagaactcgggccattcactctatgaagacacactacctggatgagcatcattttcgtctgcatttgaagacccaagctggaacgtatccttctgcctctgcagaggcctaaccagaatgggatcaggatagttaatgctgcaggatagttaatggaccagttgatctgggaggttttgtttgtttgaaatgtgttcttttccaggctcgtcctgaactcctgatcttcctgcctctacctctcaagtgccgggattacaggcctgtgccacctcaggtggtctgggatattttgaaatggacttgagtgtattaattcaatattttggagtagaatcaatatttttgtttgatgtctgttttcctatttgttgttcaatgcagagttttaaaccataaagtagccatcaatttaatgtctacggttgtgtttcagtgtctcaccattgtgtaacatatgatatatacttaggaagtacttttgattcatttcttgtccttacatgttttacaagtcacatgttcataaccctatttggtcctctaagtcttccagggtttgcccaactggttagacaggtgatagaaggagaccatggcattttactttctttaaagttgagacaagctctcacggtgttgcctaggcaggctcattatagaagcttaagctatattctgtttctgcctctcagaaatacaacagaaatacagacagacacatggttgtatccagtacttcctgacatattgatcatagctaatatactggccttgtgagaaaaaggaaaagaaacactacatattgcttacttaaacaataatattttggtgttagtgtttcaactattgactatgttttaagtagaaaagattggtacttggagttctaaaaagctacatgtcaaagctggtatttgtgtataatgtattctgacttgtggtactggggtcagaactgagttgttagttggagtatatcagttttttaggcttagtttaatatttactctcttacaagactatgtctcactgtgaatcctagactgtccctggtctcaagattctgcctctgccttccaagtgctgggataacgggcatgtctcaccatgcctggttttggtatgtatgaaggggggtggaggaagagagaggagagagagatccagtagcatgaaatgataaatgtcttctaactggtatgatgcctgttctgtatacaacacaaacctccaacctgggaggagtctgggctagccaccagaagctctcatccctgtactgctataagtagcgtgcctctccttctcacacactccttccctcttcctctgtattaccctagagtggctggattgacccagctgcactggaggaagaacttatctactccaaatagcttttaagtcttgtagtttgaatccagggtggtttgtgtagactgtggtgagcagcgtgttttatctttattgtctggagcacatttggctattgtagatggaattaaaataaataccaatttaaaatttattttcactttggtattggggattgagcccagggctcattcataataataagtatatatcgtaccactgagcttcacagcctacctcagattataaaagcaaagtaaaacaattcctgtctttagttttacataccaagaagaaatgctgtgtctttggagaaactcagaccttttcaagcctgttaggacatttatggaaacagctacacacatgcacttactatgttagcccagaaaaccaggtgagcgtctagctacctcgtggtgcttcctttgaagtgtgcgggtcttgctgcactgagcccatttgcactgttagtctggtggctcagcgcctccagcaggaacaagggccagacctttcaactgctttttctggagctttttggtctgctgctttctttattgttactagctttctctgaagaaaactggagaaaaagaatggcaattgaagagaaattaggaattaaggaagaaacgttcctaggtaattgtttgaggaaaacagacagtggaggaggagaagtaaggcagcctgtgctgctgcttctcagctccctggaggatgccgccatcttcctgtacaaacactatcgactgcttcctactccactgtgctctcactaaggcagcataatgctgctttttggttcctgttttttttagtgaaccatagagaaaaggtgtacttttcagatagagttcaggctacagtagagtcctatagaatgctaatcttaatatcaacttccagatttaaccattgccttcataatggatagacctatgtgaagaaaacagccccccaaaagaacttagacaggctctgatggtctgcactgtaaccctagcactcagggctgctgtaagctcaagacagcctcaactactcagtggttccaaggcaaaacacccagaagtgtaaacacagaagaaacagaaagcaaaacaaacatatactgcctgtaactccagcgtggggctggggctcccattcccttttctggcctgtaacaccacccatacataaattccatatactcaaaagacacacatgtatcataaataataagcattattattttttagacaggtggtggtggtgtgagcctttaatcccaacactctagaggcagaagcagtccaatctctgtgagttcaaggttagaaaaaagttttggtctaaaaaaagaaaaagctaaaaaatattacttaattttctcttccatcttaatcctaatatattccagggttacccctcactgaggatacttactgtgtggccctgtggaaacatcacttggtagataccagttaccattattgacagatgggactagataacacacacacacacacacacacaagtttaaaaagtaaagtattggatttggcatggtggcatgagcctttaaccccgagcactaaggaggcagaggtaggcaaatctctgtgatgttgaggtcagcctggtctatatagtgagctccaggctaggtctacacggtgagatgctgtctcaaaaacaaacaataatgtaattatatagctagcttaatgtatactcaaactttggcattttaagatgtgctaattaggaaaaacccaaagcttggggcttggggtgacgttgccagtgtttccaattcctcacttggaaggtggaagcaggaggattgagatcaagtttccgtagtctgggctacatgacaccttgactcaaacaaatcaaagccatggcctttggtaggttgatgtaaataggtctggttgtatgttggcatccaggctggtgggaaccagtttgccatagcttactttttaatacacatctcaagtcagagtttagaaatgacctctcttttgtaacatttttaaattctatttattttcccttctacttgccaaagtagttggtattgcataatcttttccttaaagagacctagctacattaaagaatttgtacatggagactttgggagaaccaaaccaaaccttggctctttgatgaacgtgactgcagacattcttgagctggatgtggaggtaaagtattttatggggaaatgcacactacctgtaagtcacacgcagatacattaggtcttctgacaacaaaccaagtagcaccacctgtcttcatgggtattttttatatgaagggtgttttgtgtcttagatttattttctttttgtctgtgagtattttgtctgcatgtgtctgtacaccacatgtattcctggtgctcccagagttgagaaggaagtgctgggtcccctagaaccagagttatagatggtcacaagccaccatgtgggtgctggggatggcatgcaagtactctgaaggagcagccgatactcttaaccattgagcatttctctagcatttctctatactggaaagaattagctctggaattttattaaaacaaataacaaaccaggatcccatttgcgatacttgtagattatgtagctaagttactaattgatattaggtactgttgttaactgatttacctatggcatcaggttaaacccttaaagaaaagaaagaaataaagttgtaactgtgcctcacacatccttctgaatgctagggttatgtgtaatacagaattttagagctgggtagggtgggggttgtgtgtgtgtgtggggggggtgcacatctctaatcccagcacttgagaagcagaggctggtagatctctgagctcaagaccaccctggtctacacagttccaggacagccagggcaatttagagatagctgctctcaaaaattgagttggatggtggattttagggctgggctcatctcagtaatggcagttgctgccaaggttccactaaattcagtccctggaatccacgtggtagaagtagagactccaccctcatttcatgtgttttggcatggggacatgtatgtatgaatgagcatgcacaaacacatacacacacatacatgcatacatgcatacatacatacatacatatatatacatacacatcttgggatttatgaaaactttttgctgtgtgtacctgtgcagtggtttttttgtttttttgctgttagggaatctggagtgtgaagtcacccatgggctaacgaatgcatgagtttcagtaaaccaaatcaagcttttgcttttgtttggtcttaatgtggcccaagctggcttggaatttgccttgtggttcaggctccccggtgctgtgagtacagatgttcaccactgcacctagcaaagctttatcttaaggtcccacagagaaaccaagatagggcgtgtttggcctgcccagaatgtgagtctgtgtgttttggtgtgtctggaatgtgattgtgtgggccggaatagattgcttgctgtgactataatctacaagaacacagtgagggtgagttgcagtggaaagtaatatgatttatttctttatttttatgttgtgggacagggtcttatggagcccaggtaggctgtgaactcgatcctcctgcctctatctctgaagtgctaagattccaggcacatgggctggcgagatggctcagcagataagagcactgactgctcttccaaaggtcctgagttcaaatcccagcaaccacatggtggctcacaaccacctgtaataagatctgatgccctcttctggtgtctgaagacagctacagtgtacttatgtataataataaataaatattttaaaaagatttcaggcacatttcatgacacctggcttgaagaattctgagatcagaagatacttggtgcttttctggttctgctaattttctgtattcatctgccttacatttaatcacacactgcttgagccatgtgccattctggccaacagtgattccattaagtgtcacctgttgacattgtactgtagtacaccatggtatttgcccagtgatggagtcacctaaaaacacatttctcagcatgtggccctacagttttgctgtgttaaataggagggtggtagaatgaaggacagtcagagcaaccgttgttgagacttctgaggaaaaatagtgtggctacccaactttgaatttgtttctactttactcataactgacattacagtttttcagtttcttctcttaggagtagagaggtctaatagtaattgtatcttcgttagttcagaaatggccctcagtgttgctgctcttagcaaatgtaattctcttgcattacggtaaaactgccccagaaatgcttgcccgaattcctgttgtactgatttgtttcctccttttagtctgtagatgttgactggccgcctgctctggatgactagctcccacgtgtgaacacaaaaggctttcctggcatgatgtggacatacaggcagcatatcctggaaaatgactgtttacccaccataacggtgtcttcaaaaccacttggatcatgttgatctgttcctaaagttcactgtaacatctcaggatctatttgtacgcatattttgtgttgtgttgtgttgttctaagaatgtcttatgttttctcattccctgtctcatgaccacaaaaccaaaatagaaggaatgaaaccattttccttctaaagtctgttacttagagagagatgtaatgggaggccctgtcagtcaggagagctgggacttctagcataatctcctgcaggggatgataccttcaaagtaacttgctaaagctttcagatcatctgaataaatgttacaactagactcatgtagaagagtgtcctataatattccaatatgtcaaatgtaaatctgattctaatattttccagttactctcaaacaagcttctattatcaatagaagtactttaaggaacaatttgtcatagtccttatgacctcaagtgactattttgacaatcgaaaattgtcagtatgtgtctcctgcaaagcaagtgacaccttacccctggaggcgtactctagacactgcctacctcttttgtcttttatgtaaagagaaacaagtgccttcagtaacttttgtcccagagttacaaatttgaaaattcgataatgctaaacaaatacaaacatattttggtgtttcaattattttccaatttcaaatgttttctaatttcaagtggtctatctaacatctgattacataaacaaggaaacaaaagttaaatgacacacctagttactcttataacaggtctggagctgatgttgtgtctccaggagcctttctaaaaacccttgtcaggagcacctgcatctcctgtgggtgacagtgtcctaagaaggacagttaggcttacaaagccaggaggttggcttctggaacttggatatcaagtgacgcccccaagaaatggctaatggtatgtcttatatgatctcataattgtcaattgtaatggcatggtgaagagaaatcttaaacatattgaaccagaagaattaatcatcaaaaataccagaagggaagctcaataaaattttgacttaagtaaaattttcatcagctagtgcaacttcttgactttttttgatgcattgatttgaatagcatttgattattcacgtttctcatctttgcacacaattcatactgactctgaaagatgtattatatcaggaagatgtttttgattgcgatgaaagggcagcctgctcctttgaaaccttgtttcatcatgtgtgaataatagcaaagggtttttcattgtcagaaaattgaaaaggagataacagaaactaactgatgaaaagtgaaaagttaaagacttctatgtaatgtttctcagcttctgatgaaattttgctaaaagattaaataatttgggaaaagtctttgagcattgttttttttttagctcagttttgaatgtactggacccaaaacatgaaggtcaggaacttccaacaaagcattccttgaattatttcctgttgaaaggtaaacagtagctatagacaatgtctttgggagtgaggacacagggctaggaagtcttgtgggtttgtgtcacttggcttacagtgtatcctcttctctatgctttgtttaacttagaagcaatgtttatgtcatctgcagaatgagctctctcttcttatctgtgttgcagatataagctgtagcttattttcagaagggaaaaaaccacccaactctggagagcgagagaaagcaaggaaaaaaagacttgataaaggagaatcttcctagtaagataactggttacctttgcaagttagatgaagtaacttaacaagttaaatttctatttcctaaaagacaacaagcattctctttcacttggggctgtattctttgtttttaaatttatttttgccagtctcatacatgaatataacacagtggtcacacttacccagtcctttttctgtattgtttccaagacagggtttctctctgtagtcctggttgtcctagagctcacaagtttctgccttcctccaaggcacttgggattcatggcctgtactagcacattgacccctactttatcccccaacacccccaacaaaaggcctccctacaagacctcttcgtactgtaatgcctttgttttgtgacccactggtattgtgagacccccaacttagagcgtttctccctggaaggtaaagcccctggacgtcccccaagcttgttttccctgatctctaaaaatacagccagaaagaagctcgttgttctctatagccagcaaaaagcctttttgtttctatactttacaaccagagatgcctgcgttccagtgccgaggacacggagataaaaattcagaaagaactcactccccactcccgccttgtaaatttcaccaaggacatgctgaagagaactctctccccaactcctcccaattcctcagctagctgttaaaagccccctactgtcaccgctctgggttgaactcccctgccctgcatggctcttgcagtttgcatcaggtgtggttttctctcaggacactggggtgctggccagctcatcccgggacttgagcagaggcccagcttcgggggtcttacagtattaactacctttgtgggcagggatgtaaaacattagtgaactcgcaaacagaagcaacatttaagatgatgcctcttcaagcatctatcaacagctagtagttcttggggagacacagagccccgtgatctctccctacccactcaagcatcttcagttaccatgaggtcatgattgctacagtcaagtgatgttgttgagaaggttatgtctcagcagtcctcatcagccagctcatctactatttctactcctgagtcttatttttaaatctccacttgagaaggaactgagtgaagtagctttgtgagggaggccacaagagagagggtttcactttgtagcttggactagacttgaatttatgattctccttcctctgcctctcaaagtgtctggattatactcaggagccacaacccccagtccagatgtaagcttttctgactggttttaaaatggacatgaggaagaaagggtttatttctcttacacttccatcactgacagaagtcagggcaggaactcaagcagaaggcacggagcagtgctactcactggcttgctctatatggcttgctcagtctgctcttgcatagcatccagggccatgagccctgaccatgtggctctaaccacagtgggccgggccctcccacatcaatcagtaagcaagattccctcttcccagatagcctagcctgtataaagttaacataaaaactagctggcagaatctgtgttttattattatgaaaaaagaattactttcatatcttaatttttttttcctttcaaaatgattcaaaacttaactaaaaagtacaaaggaactttcccacagaggtgctgagtcagcaccacctcaccatttcaaatacatacatagtgcataattcctagaagacatcttgtaaatcacaggccacccaccataccaggaagtgagctctgacagaccaccattatctagtcggaagacatcgctgaggttgtccatcagtttgtctgtcactggcttcatgaccgagccctcctgctttgtagtcggtgtatgctaagcttcatgaagcggttgcacagcttcagcccagttatttagtgggctatgctcagctccagtttgcctggtactagatttaagatgtgaggacaccacggaggagatgcttcctccttgcatcttgccaaactttctagtccctgaggggtgggtgttgtctatcaaactcttccagtcttactgtcctttccctctctactcagtgccttgcagatagaccagattttcactcatttgattggaatccaccaaagatctctacctgactcagttactactgattctaagtataactgctaatgtgtgtcattcttttcacatgtattgaatggcatcccactgagagagagggccttctctcatttccttactttatggatgtggactgaagcctgggttgtgttttttttgttttgttttttgttgttttgtggtgttagggactgaaccaagacaaagcagcactgtcaccaatagattctcattttattcaatgacttggtaatttgccactgatattatttctatatattactctgagcagtgagaattctcaagctcattcctatgcccttctaacattatctccatcgttctttgagcatattcttgtaaaataaaaatatcccaggctttgtatttcctctacactagccacaaaataggcagtttctctaaaaagatcaggttccatttgtggaaaatggtattttttctagaataaatttcttatatttatcatgtgcatgtccatatgtgatacagcatttgtaaggaagtcaggataatttgtgggagtaagtttagttcttgaataccatgtggtttctggggatgtaaattgggtcatcaggcttggcagcaagacttctaaagcaagcagagaggaattgctgccaaattctgatggcagaatccaacaaagacatcattaagacaaaactcaggccagtacccctgatgaacatacatgaaaaaatttaagatgctatcaaggcaaactgaacagcatactcaaaaggtagctcactgtgaccatgtgggattacttcaaggatgggttaatatgacaaaagcaatcataattccaatgatatttttagcagacccatcaaagatatgtatggaatcagaagaaaaaccaagcaattgaagtgagcttaaaccagaatgaagttggagaggcaggaatggtgactcaacctgaaatcctaggactcagatggcagaggtgggaagaccatgaatttgaagtatgcagcaagatctaggccagcttgaccctgttccaaaataataaagaccaaagcctgcaaggactgaagatgtagctcaggcagcagaatgcttgcttagcatgcatgagtccctagattccatgctcagtgccttgttaaaacagcatggtggttcatgcccaaaaccccagtgaaatcctatctcaaaaaccaaccaactaaccatctaaccaacccaagactccttgaaagggcatttcaagtacttcttgagactactatttcaaagggtagttacagatagactgtatcctgagaacattttataaaaatgcctactattcctaaacaatcccaaatagctaccccttataatgaaaaagtaaaaaacaaaaaacaaaaaaaaaaagaaatctgatatttcgtaagcaaacagcaaaactgtaacaagcatttttagaaaatggtctatttattacatcaacaaaaatcacagtatacaaagatattacaaaagtaacacaatatgctatataataaaaggcatcttgacattaaaaaaatatttcatcttgatacaaagcttaacttcttaagtaccagtatcttgagaacttaaaaaaaaataatttcatcagagccttgaaattcattcatcatcaagcatataaaatcagtttgaaatgcagacaacttagtggtagagagctaacaccaaccataacttgtatgagaccctgggttcaatcccagcatgatgctcccctcctctctgaaatctaaatattttacattaggtgaggtgtggtgacatatgcctacaatcctagtactcagaagggagaggcaggtcaatattcaatttaaggtcaaaacaacagcaaagattcccctgttttgtaggggtctattaaccatagccaatagtgttttaaagttctctggtgactgactagctgaggtctccctcaagcatccctcctgcctcatccttccaagtattggagctacaggatatatcactatggctgcttcactaagagcagtgaagtcatagttatcccaagatgcctcagccttactttactccagctcatgagaagttacattttggctaaagaagcttagaaaaaaattaccataggtaaatttggtattttaccaaaaattataaagctgctaaaaactcaatttgttgaggagtcaacatttctttttattttgtttgtgattcttttgttgttgtattggtttgtttttgggtttgttgttttttgagacaagttttctctgtgtatccccatctggcctgacacttactacagagtaagtgtccagcccaaactaacagaaatctgcctgcctctgccccctgggtgctggttttaaaggagtgtgttagtgccacctggcttgtttgtgattctttaaagttctgaaagctaaaaaaaataaataaagtctgggaggcagaagcagacttccatgagttccaggacagccagggcaacacggagaaaccctgtttgggaaaaaaaccaaaccaaaccaaaccaaaccaaaccaaaccaaaccaaaccaaaccaaaccaaaccaaacccaacctccccaaagccaaccaaaaagacaaaagatgatgaggacatgcgtgggtttcggcctttctacagacatgaaaacaatcagacctgatcacttttgagatttgatctcatccactgttgaccttgaggtttaaattctgccatgatgttcggcttaaatattcaagggatgaaactggatagacttgggtggcaccttcatgcctatggcccactgctgggcttccaagaatagcgtgggctttccattcctagacacaaaagcattctatcctcttccgtgcacatccaacctctgaacagacctgaaaccctgcagtggcaacgtcacaggagttaaagtactcccaaagactctcaacttacacaaagaaatcaagtcacaaaataccaaaagtaaagccagtaactgacttcccttgataagaaagtgtcctcggagagagccaggtccatatggggcaacttaaagacgtttgtctaaagagaaacctgcttttctcataggtctcccaaagtgtttatccaccctgtgatttttctctctgggtatcaagtggttaagaatgtttggataatagactaatcagggcccatgagaaacacaatctttaactcggtgtttctattcagacatttcttagcacaaaccacaccctaggaagtaggaaggccaggtttttagttctttggagttaggcaccgagtctttagctgtacatgctaggtgctctatcactgaactatagctcaggacgcccttttttccactttatattttgagataggagctcacaaagttgttcccttgaagtcactctgcagactgtgcaggccttaaacttgtgattttctgcctgagtttctgaagaccagcaggtccatttaggctaactgactaaaatcagtctctcttctttatcttgttgcatgctgtctgacagcttatggtaaactttcaatattccaacttatgattaaaacttgatatggtacaattagacaacctggatcaccaattttaagtctctccacaaaaatatagtttttctgagactgtggaaacacgacacagcatagtaaaacaaactgacttactctacactaaggttttccaaatggagaactaattagcaaaagaaaaggataggaagtcagcaggctctcaaaaatcagaacagtggtttggaggtgcggagaacttctggggtcccaagcatagtggttgcattgttttaatataatcaaaaattcttcaaattataccttaaagtttgtccatgtttctgtggttgactatatatgtgattcttcataagaaaagaaacatatctttgagaacaaaagttgaataccattcccctcttattttctacatggaacagggtacattgtacaatatacagttacaaaaatgttatgaatacaggctacttacatgtctatgcatggtaaactgtcaaggggtaccgctggggtatgtaggatataaccttccatacagaggcaggatttctacctgatactatactggtggtactacgatttccaagagaacagctttgggtatcaaagagcctcagggtagtttttatacttttgttttataattttgttgttgttgttgcaattctgggtatcaaacacagggccatgctctaccatgaagcatgtgccagtgtctgtatagttttttgaaggaggaggaaagaggaagaagaaggaggagggggaagaagaggaggaggaagagcagcagtcgaccagaagagaagtatgtctcacaggacaggttatcttggcatcattacttttcctgcagggtgaagcacctttcccattaaaaactatatcctcaaatatgattttataattatcccccttttctaataaatagctactatttatacagcaccagttaggccagagtgtacgtcaaatgctagagtcccagagataagtgagaagcacttaactgactaccatccgctgaaggtctgtaatataggagcagagagaggcagagctgcacctctcagctgtagcagcaggaccaagccttgcagagaagcctgctgttaaaagctaagtgttgggagcacaggcagaataggttacatctatagacacctgtgggaataaattcaacatgttccaactacaacgtctaagaggaataaggtatcaaaaaaaaaaaaaccttaaacatatggaaaagatattcactgaagaaaaagaataaagatttccagtaacagaatgggcagacacaggacactgagtaggcagactcaaaaggacaatatatgactggaggacaatcagatatgactttgaggtctctattaaattatcccccgtgacagcagtaatgccatgagggaagcagagctgagggaaggcagctgcttaccaagagcatcccacagcaggagaagctgcggtgctgaggagagtgcagacaacacagccccgtcccacaggatcctgtccttcaggaggtgccaggctatggacagcacagacaaggagggtaaaggctgacaggaagacaaggaactgggaaaactaaagacagagatggaaggtgaaggagcgagcgagaggtgagaagatggaagaggcaaaatgtggaggacagggcactgtgggggaagggctcttggtatttagaggggaaattttttaacctttccttttaagctcaagaagatacttactctgtttatgcaaaggaagcaagaactaactggtgacatggggacaggaggagagacgctgtgcacaagcagaatctggaaaagaaggccaattctttcaaaaccatgtgaaatacaaacgcagccatagagaaaggaaaaacatgttgctaaatgcattgtaaggtataaactgaatgatgtgatcagtaagaggcactggaaaataaaacgtcaattgaaaatactctaaatgcagatgtagacagaccttagttcaacttagaggaaaaactgtgaaataagtcactgtgtgagtaccatctgttgagctctctaatagctgcgtctgggtttatcagttttactaatacaaaatgcttgtggttggtctgagctgagcagatagctcaactgtgagaatacttctcccaggaaagacctgtttttgtctctagcaccacacaaacctctgtgtgtgtgtggggggggggtgcacactagtaatcccagcactcccgaggcagagcaggagaactgaaggctgagttcatcgttggctacatagcaggttgaggccagcctgtctcacacaaaagttcaaaggagacggtgggcttcggatgcatactgaggaaatggccttctgggtttgacgatggaatagacagatgtgggaggtaaaggaagaataaaggcgcaccaaggtgcttagcaacgggaagcatggcgtgacaatatacagagcagggaaggctgaaggagacacaaggctgggagagaagttcaaaactctgtatggatatactgagctaaaacgaacttgttattttgttttcttcttcatagggctgaacacagggcctagcaaatgttacgcaagctcctccactgagtcacacccttggtcttttctatttctgagacaagatttccataagctgttcaagctggtatttaacttactatgtagttcaggcaggttttgaacttacgatctcaagtagggaaattactgacatgagcccaaaatacctggttagattctttatagtgaagcagacaggctttaggagatcaaacggaatgagaacatctaaaaagaaaaggctcaagaaaacttttcttgaaaatacagatatcaagctaatttcacatgtaactttaaagataaaagcctaaataatagaaaatagaaaaaaaaaaaaacttccatgccttgaaagcttactttaacacacacacaccctaaaaataccaagaaacctcagaaaaccccttaggggtcactttggcctatgggcctcaacaataataatgagtttatttcccaatggcatagccattacacgtttttcaccttaaatctgcttgaaagcaaatatcatctcatttaactaatacattagcaaagatacatagtttgtcttggggaaatacagaaaacaactcacagcaagcacgtggactttaggcatatctttcaaagtaagaaacagtagcggcttttaaagttttgacttctgaactttctcttaatattctatatacttatttaagtcctacaacttatattttaaaaaaaccatatgtgaagggatcactcagttgctcactttgcagagtgttaacacttgaatagtgactgctctgaacaaaggtaggattatttgcgtcatctgatagtccaggctcattcatcaggccattatctacacaactgaagtttgatctatcaaatgcatctgactgtgaaacaaaaacagaactggagctggtgcccgcggacagactggcaggagacatctgatgtagttgtctcaggtctcttgggcctagcctggcattacatgaggggttttcaagattgatgctcacaagtcttgggttgtcagtgtcccccatgccatcagtgctgggtgccatcacactcagaggccgagtagatagcatgttgacatcagagatactgtataagtcagttggtgacatggatggcgtttccattctagctaggtcatcaggattataaaggcacgaattagatgcactcaagtcgctgacaccaggcccttctaggaatggaaggataccttgtgaattagaggaaagtgttcccgctgagaaagtactcagggtatttgtactgactgggtgtgaggtggggtgagtcactggt

SEQ ID NO: 514 - DNA, 3489 bp, Mus musculus
cccaagctcgtcgctttgaagcgggtcaggctgtcccgcccccccatgtcccgcaaaagcgaaaaggcagggaagcgccgcttttctttctagctcctgcatccgtggggccggcggggcgcccgggggaagaacgggcggtcgtacagccagcagactccagacccgctctgcactcgccccgggccggcagcgggaagcgacgcctccccccaataacggcttcaaccgcctcctgccaagtccccgctctggcctccaaagtcgcggcccaaacacctcacactcactgtatgcttccactgactgaggagaacaagcacgtggcacagctgttgttcagttctggcacctgtccaagatgcatcttaagattctgtggtgtggatcttcccgcaccttacaaacacccatccaaggagttgctcaatgagctacaaaaatttctagaaccggaaaaacctgaattaattttagaagctccaaacccaccattgaagaaaattcgtctacatgaagatgggattgataatttgagtgaagatggaaaggagggagtctctgttactgaagatgaaagcatggctgagaagccttcaaagctgagagtgtgcaatgtttgcttaggaattcttcaggaattctgtgagaaggggtttattacgaaggtgtgccaaaaggttgaagcctctgggtttgaattcaccagcgtggttttatctgtctcctttccaccgcagctgtctgtaagagagcatgctgcatggttgctggtaaaacaggaaatgggaaagcagagtctgtccctgggaagaaatgatgtagtccagctgaaagaagcctacaagtggataactcaccccctgttttcagaggagctgggcgttcccactgatggaaagagcttgttcgaagtgagcgtggtctttgctcatccagaaacagctgaagattgccatttcctaggtgaagtttgccgagattgtttcaaaccagctaaaaataaacagtcggtatttaccagaatggcagttttgaaagctttgagtaagataaaagaagaagacttcctcgggcaatttccttgtcctccaaactcaccgaagactgtatgcactgtccttgaagttgagtgcactcatggtgctgtttttgtcgctggcagatataataaatactccaggaatctaccacaaactccttggataattgatggagaaaggaaaatggaatcttcggtggaagaattaatttcagatcatcttctggcagtattcagagcagagagttttaatttctcatcctcgggacgagaagacgtagacgtgagaacattaggaaatggaaggccctttgcagttgaacttctgaatcctcatcgagtgcatttcacctcacaagaaatgaaggagctccagcaggtaagggctgcacggctccgccaggcctgtgtttgtgcagagctccgactgagcgggactgagtcggtaattgtttttctttctccgatactgcagacaattaataaatcatctgacaaaatccaagtccgtgacttgcagcttgtcaccagggaggcaatagggcatatgaaggaaggtgaggaagaaaagactaagacctacagtgccttgatatggacgaatagagctatccagaagaaggacattgggttcctggacgacttaaaggacttaaagattgaccagaaaacacctctccgagtccttcaccgaaggcctttggctgtgagaactcgggccattcactctatgaagacacactacctggatgagcatcattttcgtctgcatttgaagacccaagctggaacctacattaaagaatttgtacatggagactttgggagaaccaaaccaaaccttggctctttgatgaacgtgactgcagacattcttgagctggatgtggagtctgtagatgttgactggccgcctgctctggatgactagctcccacgtgtgaacacaaaaggctttcctggcatgatgtggacatacaggcagcatatcctggaaaatgactgtttacccaccataacggtgtcttcaaaaccacttggatcatgttgatctgttcctaaagttcactgtaacatctcaggatctatttgtacgcatattttgtgttgtgttgtgttgttctaagaatgtcttatgttttctcattccctgtctcatgaccacaaaaccaaaatagaaggaatgaaaccattttccttctaaagtctgttacttagagagagatgtaatgggaggccctgtcagtcaggagagctgggacttctagcataatctcctgcaggggatgataccttcaaagtaacttgctaaagctttcagatcatctgaataaatgttacaactagactcatgtagaagagtgtcctataatattccaatatgtcaaatgtaaatctgattctaatattttccagttactctcaaacaagcttctattatcaatagaagtactttaaggaacaatttgtcatagtccttatgacctcaagtgactattttgacaatcgaaaattgtcagtatgtgtctcctgcaaagcaagtgacaccttacccctggaggcgtactctagacactgcctacctcttttgtcttttatgtaaagagaaacaagtgccttcagtaacttttgtcccagagttacaaatttgaaaattcgataatgctaaacaaatacaaacatattttggtgtttcaattattttccaatttcaaatgttttctaatttcaagtggtctatctaacatctgattacataaacaaggaaacaaaagttaaatgacacacctagttactcttataacaggtctggagctgatgttgtgtctccaggagcctttctaaaaacccttgtcaggagcacctgcatctcctgtgggtgacagtgtcctaagaaggacagttaggcttacaaagccaggaggttggcttctggaacttggatatcaagtgacgcccccaagaaatggctaatggtatgtcttatatgatctcataattgtcaattgtaatggcatggtgaagagaaatcttaaacatattgaaccagaagaattaatcatcaaaaataccagaagggaagctcaataaaattttgacttaagtaaaattttcatcagctagtgcaacttcttgactttttttgatgcattgatttgaatagcatttgattattcacgtttctcatctttgcacacaattcatactgactctgaaagatgtattatatcaggaagatgtttttgattgcgatgaaagggcagcctgctcctttgaaaccttgtttcatcatgtgtgaataatagcaaagggtttttcattgtcagaaaattgaaaaggagataacagaaactaactgatgaaaagtgaaaagttaaagacttctatgtaatgtttctcagcttctgatgaaattttgctaaaagattaaataatttgggaaaagt

SEQ ID NO: 515 - protein, 555 aa, Mus musculus
MLPLTEENKHVAQLLFSSGTCPRCILRFCGVDLPAPYKHPSKELLNELQKFLEPEKPELIAPNPPLKKIRLHEDGIDNLSEDGKEGVSVTEDESMAEKPSKLRVCNVCLGILQEFCEKGFITKVCQKVEASGFEFTSVVLSVSFPPQLSVREHAAWLLVKQEMGKQSLSLGRNDVVQLKEAYKWITHPLFSEELGVPTDGKSLFEVSVVFAHPETAEDCHFLGEVCRDCFKPAKNKQSVFTRMAVLKALSKIKEEDFLGQFPCPPNSPKTVCTVLEVECTHGAVFVAGRYNKYSRNLPQTPWIIDGERKMESSVEELISDHLLAVFRAESFNFSSSGREDVDVRTLGNGRPFAVELLNPHRVHFTSQEMKELQQVRAARLRQACVCAELRLSGTESVIVFLSPILQTINKSSDKIQVRDLQLVTREAIGHMKEGEEEKTKTYSALIWTNRAIQKKDIGFLDDLKDLKIDQKTPLRVLHRRPLAVRTRAIHSMKTHYLDEHHFRLHLKTQAGTYIKEFVHGDFGRTKPNLGSLMNVTADILDVESVDVDWPPALDD

SEQ ID NO: 516 - DNA, 102299 bp, Homo sapiens
cttcacacagtattactttaggaggcgcatttgtgaagctaaatttgattagttggttaaggaggtgactattagatctttccattaaaatgtatctttccctttgtaattagtatataatctatgggatgacagttttgtaccacaaatattctattcctcagcaactgttcatttgatagtttagcatcgattcatcatccttgcctgaaacaaatattagatgtggaactgcaaaatggtaattttctaatccaggctaaagttttaatttagacttgtatcgtaatattataaacaagctactagaactctatttttttttcttttattggatctgatatttaaaaatggaacaaaacttaaaaggagccagtgaacggccagatagtgcagtgcattcaggctttaatgaaacagttctgctcccaagtataagcaataatagagaaaacagagagacaaacaaacagacattatctagatttaacacaagacagacttatggaagagaaactaaacagaaatgtaaaatggtaaggagggctgaagctacgggcctactcaattctggttctgtaatcaggcagtgacagccaagatgcaggcttcaatgaagtaacaaaaacgaaaagtgctccattaaaatggaaccagttcaatgcttgaggctgggaatgaggatgtgccaccttgactcctacaaagagattataaaatttgctgatgacagtttaatattttgagaaagttacagaactaagagagggagaggactgtgataaggcctccagcccaggaaatgaaacaactgaccgacttgatgtgtgatatccttaatctaactcgctgtttttgtgtgtgtgtgtgtgttttgtttttttttttttttgagacagagtctcactctgtcacccaagctggagttcagtggtgcaatcacggctcactgcaacctcaaactcctaggctcaagcgatccctcccacctcagcttcccaagtagctgggactacaggcgtgcaccaccatgcctgcctttttttttttttttctttttgatattttttgtagaaatgggttctcgctacatcttgagaggctggtttccaactcctgggctcaagcaatcctcctgccttggcctcccaaagagctaagattacaggtgtgagccaccatgcccagtctgacccactgtttttacacctgattcttacctaagtggtaggtagagggaacagggagaggcaacaggacacctattagatagagagaggggaacatggaagagggaaaggagagaaaacagaactccaaaattactactcaaaatgaccatctcaaaaatgccacacacatgaagaaataaaaacactaagaaacaaagccaacaaaaatcagcaagtataaaacccaatttaaaaaaactaattttatataacagctcaggaatgattttagatatgttaaaaattatcagagagagaaatgaaataatatctgtgaaataaaaattgaaattaaataaaaacatttaaatattttaaaaattccattagaaatcttagaaaaggtggccacaggccaggcgtggtggctcatgtctgcaatcccagcactttgggaggctgaggtgggtggatcacaatgtcaggagttcaagaccagcctggccaagatggtgaaatactgtctctactaaaaatacaaaaattagccacgcgtggtggtgggcgcctgtaatctcagctcctcgggtggctgaggcagagaattgcttgaacctgggaagcggacagaggttgaggtgagccgagatagcaccactgcactccggcctgggcgacagagtgagactccgtctcaaaaaaaaaaaaaaaaaagaaaaaagaaaaggtggccacagccactggaaccgtttttcaactaccggtcaagaagaaaattagctgctgtacactaaggagcagaatggaaatacagaacttgggaattctattttaagtaatggttgtcgaggtaattagattaaccctcccaatgaactagaagggaaggaaataggaaggaattctgtttaaagcattagagaacgaggcaccgaagaattctggagacaaaatcaaggaggaaaaaaaaaacccagagagccagatcttttcaggcgtttctctagaaaccagggccaattccagaagagatggttgacaggatgagaagctgggcagagattttaagactccctgggctaaggagccataaactggagttcagaaccctaaagaggaaagccatagggaaccctcacacttcagattgggaccttaaaaagggaaatatgctagtagaaagggtgaaaaggttaacaggaaatggactacctggcaggaatgaaaaccaagttttaaatcagctcaatcctttattggattaaagtgattctagattgttagtggcctaacattctggtcaaaaggaaaagtctttagagaaagatatccttaggcctcaaatcacattaaactgtctatatacaatgtgcagctctcattaaaaaataaacgggcttggctgggcatggtggctcactcctataatcccagcactttgggaggctgaggcaggtgggtcacttgaatccaagagtttgagaccagcctgtccagcatggcgaaaccctgtctctactaaaaatacaaaaattagccaggtgtggtggcgaatgcctgtaatcccagctactcaggtggctgaagcacaagaatcactcgaacctgggtgacaggggttgtagtgagccgagattgtaccactgcactccagcctgggcaacagagcaagactctgtcttaataataataataataatgataataataataataatgatagggcttacataacaaaattatgggtggatcatgaggtcaggagttcaagaccagcctggccaagatggtgaaaccccgtctctattaaaaactataaaaaattagctgggtgcagtggcaggtgcctgtaatcccagctacgggggaggctcaggcaggagaattgcttgaacctgggtggcagaggttgcaatgagccgagatcacgccactgcactccagcctgggcaacagagtgagactgtctcaaaaacaaaacaaacaaacaaaaaaagaaacttcagataatacaaagagctccaaaggggatctagataatagagttattatagacttattaggcagaaactttaaacaactgtgttgaatatattcaaataaaaaaggcaagattgggattttccaaaagaaaataggaactataatataaagcaggaccaaatgaagattctacaactaaaaacaacaccaaaccaaacctgaaattatgaactcaatgactgttttttttgtttttgtttttgttcttagatggagtctcactctgttgcccaggctggactgcagtggcgtgatctcggctcactgcaagctcagcctcctgggttcataccattctccggcctcagcctcctgagtagctgggactacaggcgcccaccaccacgcccagctaattttttgtattttcagtagagacggggcttcaccatgttagccaggatggtctcgatctcctgacctcgtgatccacgcgcctcggcctcccaaagtgctgggattacaggcatgagccactgcacccggcctcaatgactggtttaataccagattagacacagtgaaagaaaaatatcagtgaactaggaaagagatgggaagaaaatacccagaatgaagcataagaaacagaaggataaatacagaaaagagagtaagatacagggagtatagtgacatatggggtatatatgcaagttgagttaaaggagtaaagtgacaatagatagaaaccatatttaaagaaataatggcttaaagttttctggaattaataagaggcatcaaagtcagattcaagtatccctgtgaattccacccaggataatacaaagaagaccacactgaggcctaacaaagcaaactgctgaaaactaaaacagagaaaaaatattgaaagcaaccagatcaggggtggggtaagattctttttaaaggagcaaagaataagacagagatggtgagggagtggtggctcatgcctgtaatcccagcactttgggagacctaggtgggaagatcacttgagcccaggaatttaagatcggccttggcaacatggtaaaaacccatctctacaaaaaatacaaaaattagctgggcgttgtggcacttacctgtggtcccagccactcgggaggctgaggtgggaggactgcttgagccctgggagatggaagctgcagtgaggtgtgattgcgtcaccacactccagcctggtgacagagtgaaacttatttcaaaacaaacaaacaaacaaacaaacaaaacaaaagacagagatggccaaaaagtcaagagagctgacaaaaaaaaaaaaaaaagaagtcaggaaaaacttaggtcccttgatgacaatgttgagaaggcagatctctagacttcttgctaactaaacaataaatgtcttaatagtccaaatcacagtgagtcagataatgttacttatagcagacactagtcccgatataatgcttgacagaagaagagacagtaaagactagtgttcaaacaaaacttaaaataatatttaaaggtataattgatgagcattttcctgaattaaaaaaagaaatgaatcctcagactgaatactgtggatactaagcaggaagaaaaaaaaaatatgtgtgtgtgtgtgtgtgtgtgtgtgtctgtatattcctacctggttacaatataataaagctagaggaccaaacgtatcaaggctactaaggagaaggcagtctgcctataaagaaatgaattaggccaggtgagatggctcatgcctgtaatcccagcattttgggaggctgaggtgagaggattgcttgagcccaggagttcgagaccagcctgggaaacaaggcaaaactccatctctactaaaaatataaaaattagttgggcatggtggcatgcacctgtagtcccagctactcaggaggctgaggcaggaggaccacttaatcccaggatgtagaagctgcagtgagccatgactgcaccactgcactccagcccgggtggcagagtgagacactgtctgaaaaaaaaaaggaaattagactcaacagaaaaacctatctagctataaaactttgatacaaaaccagaatagtacaaagaaaaaaaattcaatttcacctaggaacatgtatgcaacagtctcacaatattagaatagagttctttttctttttggagacagggtcttgctatgtcacccaggctggagtgcagtggtatgatgacagctcactgcagccttgaactcctggactcaaagggatcctcccacctcagcctccctagtggctaggactacaggcacacaccactacacctggccaattttaaaattttttatagacagagtcttgttatgttgctcagactagtcttgaacttctggcctcaagcaatcctcctgccctggccttccaaaatgctaggattacaaatgtgaaccactccaactggtttagaatagaatttggaattgcatatcagaaaaaaatcaagactaatcaaagttcattgagaaatgcaaggatggttcaacaatagaaggttgatacaataaacattttctctaatcttgtcttctcactttatttcatcaatttgatcttcaattactgatatccttttttccacttgattgaatcagctattgaagcttgtgcgtgcatcacgaagttcttgtgccatggttttcagctccatcaggtcatttaaggtcttctctacactgtttattctagtaagccattcatctaaccttttttcaaggtttttagcttctttgcgacgggttagaacatgctcctttagctcggagaagtttgttattgccgaccttctgaagcctacttctgtcaactcgtcaaagtcattctctgtccagctttgttccgttgctggcaaggagctgcgatcctttggaggagatgaggtgctctgatttttagaattttcagcttttctgctctggtttctccccatctttgtggttttatctacctttggtctttgatgttggtaacctacaaatggggttttggtgtggatgtcctttttgttgatgttgaagctattcctttctgtctactagttttccttctaatggtcacgtccctcagctgcaggtctgttggagtttgctggaggtccactgcagaccctgtttgcctgggtatcaccagcagaggctacagaacagcaaatattgctgcctgatccttcctctggaagctttgtcccagagggacacctgcctgtttgaggtgtctgtcagcccctactgggaggtgtttcccagtcaggctacacgggggtcagggacccacttgaggaggccgtctgtccgttctcagagctcaaacaccatgctgggagaaccactgctctcttcagagctatcagacagggacgtttaagtccacagaagtttctgctgccttttgctcagctatgccctgcccacagagctgaagtctatggaggcagtaggccttgctgagctgcagtgggctcctcccagttcaagcttcctgggcgctctgtttacctactcaagcctcagcaatggtggattcccctccccctgccaggctgctgcctcgcagattgatctcagactgctgtgctagcactgagcaaggctccatgggtataggatccgtcaagccaggcatgggagagaatctcctggtctgcttgttgctaagactgtggaaaaagcccactatttgggcagaagtgtcccatttttccaggtatagtctgtcacggcatcccttggttaggaaagggaaatcccccaatcccttgcgcttcctgggtgaggtgatgccccgcctcgatttggctcaccctccatggggtgcgaccagtgttcaaccagtcccagtgagatgaaccaggtacctcagttggaaacacagaaatcacccgtcctgtgcgtcaatcacgctgggagctgcagaccagagctgttcctattcccacattttcatactaaagcgaaaatacatacaatggtctcaacagatgcagaaaagccattcataaaatttaatatttcttcacaataaaaatctgagcaaggtaagggctgggcatagtgactcacacctgtaatctcagcactttgggaggcctaggtgggcagatcacctgaggtcaggagttcaagaccagcctggccaacatagtgaaaccccatctctattaaaaatacaaaaattagctgggcggagtggcacgcgcctgtagtctcaactgtccgggagactgaggcaggagaatcacttgaacccaggaggtagaggttgccatgagccaagattgcgtctctgcactccagcctgggagacacagtgagactccatctcaaacaaaaataaaaatgaaataaaaataaaataaaataaatctgagcaaggtagagagagagaattttgacaagatatctatcaaaaacaaaaagcaaacttcacatttaacagtaaaacttcagaagcactccagtggaagtcaggaccaatacaaggatgctagcttatctgtaaatgacagaactggctacacaaaactaaagagaatttcaaccaaaccatcagaactaattaagagtttgagattatgctgtacataatatttacattaaaaaaaatcaatagcattctgccataccagttaataaccaactggaaaatgtaaaaggaaaaaagaaagcccatttgcaactactacagcaaaaataatctaggaataaaaaataaaatatggaaaaaaatttcatggaggtaattataagttttttgttgttgttgttgtttgagatggagtctccctctgttgcccaggctgcagtgcagtggcgtgatcttggctcactgcaagctccgcctcgtgggttcacgccattctcctgcctcagcctcctgattagctgggactacaggtgcccgccaccgcacccagctaatgtttttttgtatttttagtagagacggggtttctccgagttagccaggatggtctcgatctcctgacctcgtgatctgcccgcccagtctcccaaagtggataattataagatatttaaggcaaaaagataaattcccaccaattgtagcttatacaatattcatggaataaaaacttacttgatccataaattcagctcagttccaataaaaatcccagtaagtctttttataaaggactaagtgtaaagagcgcaattacaaagaacagcaatgtgtggaaactcttgacatactacatatcaagacttataaaattctgtaattaagatagtgtggtgctagtagaaagtcagaaaatgcccaaaacagaactacatatttaggaaaccttgatatgacatagatggcattaaaaactaagaatagactactcaataaatggtgctgcgacaattagttacctatatggaaaaaaaaattagatttttatacaaagtcagttccatgtggattaaatgcaaatgaaaaaaccggaagatttaaaagaaaacatacagaaaaactgtcctgatctaggtagacaggatttcttaaccaagacaaaaagcataaacaataaaatatgacaattttggctgtattaaaatcaaaaacatctgtacaaaaaattgaacataaatataaagaggagaagccacacagtgaaaaatattagcaaaatgtagtaacaaaaaaggattagtttaacaatactcttacaaattggtaagcaaagataaagccaatagaaaattgggcaacagaaaaaacaaaaacagatacaaaaaataatatataaatagtaacatgtaattagatataaaatatatattattgttacattgttaagttttagatataaaatgcatataaatagcacaaacctaagtactaaaatataaaaacattactgggtatgcgaaacaccaaataaggacaatagtcaccactataaagaagaatgggagagtttagccgtcttttattttgaaaaattcgacataagtctggcaaatgttaacactgtttaaagttgagtagtgaatatataggtattatcttactctctactggtctctgtgtttaaaatatttcacgataaagtgggaaaatggttaattttacataaaaagaactttaacagatgcaaaaaataaaacctctctcattcgacaagcagcctaaatggggaaaaaagaacccactcaaaaaaaaggtagcagataatgtcaccgtggcttaccagcctaatcaaacttattacttgttatgtatatatccttattaaactaagtcgttactgtgttaaagcattttagtgtttaaataaaagatttcagaatacagcagaaatacattccaatatgttggggtttttacgcttaggaaaacctacaatagtaggtgatttgacatttgaatcacacctatctgaattaagatgtccagcactaccaaacaaaagccacacgaggccacgaaacactcccaactctgcatgttttagcctttttaaagtcctagaaaccaactgatactgattaaaaaccaaacaaaaaaaaaatacaggcctcagaaaaatacactattttgcacacaaagtccatccataggcctcagatctagaactcctgctttaaagttgcttctccaatctcgatccgaaacactggctgagttatgctggaaaagaatgcaaagtgtacggggcttgagttcctgttgcgtaaaacctttccggctttcagcaacttctcgagaggttaacacctttaaggagagactttgctccctgtcgatgccgtggctggacaaatgccgctctcaactgctacagaccaaagtctacgctttaaagatagagaagccattctgtcaaagtgaaaacagaagcggtaggtaggaagccgcccccctttctttcaagcacagagacccagagagacgcccaggagctcccgaaaaaaacgttgctgattagagctgccgggtcagaaacagctgtgagacactaaagtccccactggtaagcgccccagctccacctcggcccctatccccaaggttgggtattggttaaaggggggaagggaatacctccactaacaaccgctacaaccgcctcctgccaagtccccgctcgggcccactaaactcacagcctgaagaatcccacactcactggaaagtggggcccggtcctggtcccggtccggctcccggaattcggcgggtctcccagggtttggggggaggtggcggctgggacgccatctcctccgcctcctctcggctcccgctcctacccctgactgtccaggcccgcgtagaccagcacctggagcgtaagacacaacgggcagaacaccgagccgtccaccccgcccacccttgcagtcaggacaaggcttgagttactttgccagctgaatccatacagcgggaggatgccactaatttgtaggaagaaacacgctctttgtatttgccccagaaagagctgcctttctaaacctcagggtaaaggctcatcgatatttctggtagcggctacaactccctagacgtcggagtcccaccgaggcttttctgggagtggaccagtcgggctgggagtaaagccgcacgcactccttcgctcgtgggggaggtagggtgaggtggcaaaccaggcagtttttcggatttcctctacaaacaagaagggagaagctcacttagtcctagcgagagcgggctggtacttttgttctaaaacgcacgtttcctcggggaacagaattgctagacgcaataggtgcgttgtctttagtcttccctcttcccttcgagggccggaaggggttaaatctcaggctccggcgtctggggagaaggtgaggcgggtaggtaagaggtgaaggagtgcagactgggtgcaaaagaggtgtggcgggagagagttcgtttctctcctgctggagcggctttgttagcaaaggaggggtgagtgggaagtttgttgcacctgaccgaagggggaagggcttgcttggcgaaaactgaggcttgaggttagatctcgggatgaacttttcaagagtccacagtagattccagagctgaatgtttcagaagcccagtgaagtgtgatcacctctttctccgtaaatccacacccccagccccacgccgcgttacgaatgacacccttcggtagggaaatgagttttaaaagatcttaggatatgagactcagtctggtcatttcgctagtttttcttataccctgccccttttctcgttttcgatgactggtttttgtaatcgtccaagaggtgaaaataaagtccttcctctcctccagtaagccagagactgggctagttatccttgatttggggaggagggattcagtcctcctagggagcctgacacatgaaaggcggctttgtagcaacttgttacagagttatttctataaaacaaacacataaacgaaaagcaaacatcttgagggtaaccaacactggaaaacttacattgtggaatgcctttctcagggcttgctttcaaacataataaatctaatatggacaaccgatttctaatatcttatgaaatcctggcatttaattatctcacgatgaaaaaaccaaatttaagacgtaacgtattttctccttttaatgttaacattcttgagaagttgataaattgttggtaggtgaaaatgatgttgagaggtttgtaaattcatagctcgtttattaacacacattcaaaagaggtcttttttggggtctatttttagacctcttcaaattactcaggactggaagttttgtaattctcatcaatcaggtttgggaacttctcagagccaggagattgtaatgtgtcatttatttactttgcatgatacctttgttcttgtgaacttactggaaaaataaacattgtcttctagccatggaaaataaaataaattttaatatagctatttaagtatcgagggaaatcttcattaagtgtccttttaaagtgcttattgatttattggaagagggtgtatttcttctgtctctttttgagttaaatgttacttctgaattaagtaaaattcttgaccttaactaatggagaaaaaataacttagagtaacaggtgaaacagaaacagtttctctgtgtatgtagtcagagatgcactgtaaatgcttatattcgcccctcacagcatccgatctcttctctgcatcaaagtagattaaatgggctgggaaaagggatccagatcactagtaaatagtaatgacttgaccttgaccacacagatcttatttatttatttattgagatggagtctcgctctgttgcccagactggagtacagtggcacgattttggctctctgcaacctctgcctcctgggttcgggcgattctcctgcctcagcctcctgagtagctgggactacaggtgcgtgccaccacgcatggctaattttttgtatttttagtagagatgggatttcatcgtgttagccaggatggtctcgatctcctgacctcatgatcctcctgcctcagcctcccaaagtcctgggcttactgcaacctccacctactgggttcaagtgattctcctgcctcaacctcccgagtagcagggattacaggtgcacacctccacacgtggctaatttttgtattttagtagagatggagttttaccatgttggccaggctggtcttgaactccagacctcaagtgataacgcctgcctcggcctcccaaagtgctgggattacaggcgtgagccactgggcctggccagatcttcattatttagaggctgttttccacatattctgttttctttcttgaaaataccctggagcccaaatttacttaggcaaccctaactatgcgtttctcaattctggtgtttcaaagttgtcaccttgtcagcttgtatggtgtgtccatacaagcctgattttcttccctctgctgactcacatattcccctgaattagaattcagccagaggcaatctgtttttagtagtcctggctgctgaactgatttttatggtgaagagttctatgtaactatatgcctgtcttcctcattattttgtgcaagaatcttggtaagtggccccaaacatttagcaacttgcaagtaagtaggaagttttagaggtttggaaaacgcagactagaagaatcacgtctttatactaagctgttgggaggagcttcacccttccacaaattttaagcaagttcatttgaattatgaaactgcacaaattaaaagatgccactgtcgttcatctttatgaccacagttacagcatgccataagattgccatgcaatgattattttctaaaatatgggcagttgatcattttaaggtaatatgaactgtttcactaattagaagatcttgttttgctgaacaaattaggttgtttgaatttttagtaccccctccttcccggtaacaggagacagatttgccttcattctctatatagtatttttttgtgagtttatttaaattgcaaaaattggcaatttaagcaaacagttgctctcaaatattttgtacttaatttgtttttgttgaaggtttttttgtttgtttgtttgcttgtttgtttgagatggaatttcgctcttattgcccaggctggagtgaagtggcatgatctcggctcactgcaccctccgcctcctggggttcaagtgattctcttgtctcagcctcctgagtggctgggattataggcacacgccaacacacctggctaatagttttttgtatttttagtagagatagggttttaccgtgttggccaggctggtctcaaactcctgttgtcaggtgatccgcccgcctcggcttcccaaagtgctgggattacaggtgtgagccactgcgcctgaccttttgttggaggttttactcatgaaaggggcagatttttattttgttaacaggtggttgccatttagtcatataatcaaagtaaagttgatgtctttagacctgctgatcaactttgttgttgttgttgttgttgttgtttgtttgtatttttgagacagcatctcactctgttgcccaggctggagtgcaggcgccagccaccacacccaactaatttttgtatttttagtagagacaaggtttcaccatgttggtcaggctggtcttgaactcctgacctcaagtgatctgcccacctcagcctcccaaagtgctgggattacagatgtgagccactgcacccggcctcaatttgttttaaatagttggccgctaagctatcattaagggtagtccagtattatataaggtagactgatcagatttttttgtctagtctgaatgccaaggcccttagccacctagaggttctctgaaaatcactgacatgaggcaaattgattaatgggagaaaaggcatacacgtttatgtaatgtgtatacacaggagccttcagaatgaagacataatgataacaggggaaattgtccatttttatgcttaggttcatcaaagtatggatggcacatagaaatatgattgaacaaaaaggtaatcaactcagtggggaaacccagcaagcctgtctaggttcttggcctctcagagcatgcattccttccttctgggtgtggggcaggacctgccatggaatggggagtcttatgacctacagtcagacaagagaggttagatcatttcttcatcttttttttttttttttctgtttctttttagagacaaggtcttgctctgtcacccaggttggagtacagtggcatgatcttgattcactacaacctctacctcttgggttcaagcgatcctcccacctcggtcttctgagtagctgggaatacaggtgtgtaccaccatgcccagctaatttttcaatttttttgtagagacagggtcttgtgggttgttgcccaggctgatctcaaactcctggcctcaagtgaacctcctacttcggccccacaaccacaaagtggtgagactatagatgtgagccactgcaccttgcctagtttttcatggtcagtttttactcagaaaggtggagggaaaatttgagtaataggcatatgtgtgtgtgtgtatatatatatatatatatatatatattttttttttttttttttttttttttttgagacggagtttctcccttgttgcccaggctggagtgcaatggcgcaatctcggctcactgcaacctccacctcccaggttcaagtgattctcctgcctcagcctcccaagtagccgggattacagttgcttgccaccatgcccggcaaatttttttttttttttgtatttttagtagagacaaggtttcaccatgttagctaggctggtctcaaactcctgaccccaggtgatccaccctcggcctcccaaaatgctgggattacaggcatgagtcactgtgcctgaccaaatttgagtaatatttttagattttatggctggctttggggaaagggggttctggtttctatgactcactttgaggaagagagactgtagtttttctatggctagtctggggaagaatgagacagacaggagggcagaaggtcagagaaaaacttttgcttctgaggctgctgctgaggccttcattttggggtatggctttctgagccccactaccagcaaactcatttttaatttcttacaggaaaagtttaatgaattaactttgtacaatactgaatggtacaaaacaaaaagcaaaatttcaccctgtacctctgttttcattaccctcctcagaagcaaccattcttgattatttttatttcttttgatcaacttagttatattgatgtattttatcataatccaaaatgctacactaaattccttagcaattagaaacctttaccggatccatcttatgaacttccttaaaatttgtattttataatatgtgtgtaatgaaaggggcttggttagagagtacacaatagtgtttttcaaatgaaagctagtttttatccctaaacatgatgacttgtctgtgacagtaaaacgcagaagctgctcattagttttacttcttttctttctagttataattattcaatatgttcccactgactgaggaaaacaagcatgtggcccagttgttgctcaatactggtacttgtccaagatgtatcttcagattctgtggtgtggattttcatgcaccttacaaacttccatacaaggtattttcttttctttttttttttttttcaaattaagagaaggttctctgtattttacaatgaatgcttgtacttttgagggcaggtatctattcataactcttttttaaattaaaaaactataataaaatgagtgatattcataattttggaatagtctcagaaatgtaagttccttcttaagtgattatatctagctttctaacatttagtgtaatgggatctttgtggaggaactccctggtgcatttgaacacttgtatagatgtttcctaaaggatatctaaacagaatatcacaaaatattgcttcctcccaggaggggctaatattccttacatgtcctactatgtggaagcattgtgggtatggttgcctttttctgtttttcccattttctgtattaccagttgtgtttataaataggtatttggaatcctctagaaataaatgcttatcatcattattactgttattaatgacaaaagtaatatacagagatctttgacatttatggtaatatacagagagctttgaggtttaatataacacttttttgcataagatatgtaacatctttatgaaatgtttgattctaaaagtgatattctttttagaagcagatagtaatacatatgtaaatatatacattataaacagtatgtatacaacatatacacacacagtttcttataatttaaaaaattgtccaggagttagtagtatcagttatttttaaaatgttattagttgtttctattattttggcaataataatacacaatattcaattatcattactatatgtcaaggtcttatataattctcataataactgattaggtaagtacatactatgattgtctctattttcagatgaagaaactgagatacagagaggttaagcaacctgcccaaagttacacagctattaagtgagcaagctaggatttgaacagtctgactgaattcaaaacctaggatttggaactagaagacatggatttgaatcccagttccaccactttccagcttcagtttactcctctgtaaatgggaatgatgataatacccacctcacaggactttaagggacaatacctaataaagtacgtggaaacactttgaaaaccagaaattggctgggtgcggtggctcacgcctgtaatcctagcactttgggaggccgaggcgggtggatcacgaggtcaggggttcaagaccagcctggccaagatgatgaaaccctgtctctactaaaaatacaaatattagctgggcgccatggcaggtgcctgtgatcccagctacttgggaggctgaggcaggagaattgcttgaacccaggggtggggggtgcggaggttgcagtgagccgagatcatgccactgcactctagcctgggcaacagtgtgagactccgtctgaaaattaaaaaaacaaaaacaaaaaaccagaaatggtacttgtgctatgatgatttaaatatgtgtatattcatttatacacaatatgactgtaaagtaataagactggttttgtgtaaccctgcttacacatttttttcagacacactgtaacctattatctattatatgttattaggttttaaatttatattatattaagagactgagtgttatcaactttcgtttgtttcattttatgtaaggcaatatacaagaatatttggacagctttttggaaatgttcataaattttgatctgttctattcatgtaactatgtatgtacatgcacatctgtatatgcactatgttatatctatattatagatcttaggtaacaacaaacatatttgtgtgagtcaaaatgtacctgtatatgtatgtatgtatgtatatttctctgttaaagcaggagagctaatttctcaataaaatggatttaaatttgtttgagtgaaagattttttccctttacagtcagtaaattgtcatctgaatgaatttgaaaaatatactttttcaacaatggcataataaaacatgtctaaacaaaacagaggaaaatcctctgagtattttgatgagaggaatatctgaatgagagaaatatgagaatggtttcaaagaaatgcaggtttttaaattctaatacaagacaaattaggcaaactggaatatagtagagcatggctttcaattaatatatggaaatggtttgtaatcatatgctaactttcagcattgtcagcatttgtgtacctttcttagtaaattttctccaaattatttttacttattagactaccctaatgatcagatttcatattaaataaatattgtacttgtgagctttcagtgattgtgaggttattaaataacctagcaaggatggaaattcagtttgtactttttatatgttaatcattagaactaaagtttgtttttactgaaattagcaatgaatgactctcacaacagaactacaaattaataaatttgtattggagcctttctcctcagatttatgacttttgcttcactgatatatggaactcttttgaaaaagtattcacatatataatagagataggtaattctcttttaaattccataaaagccaatgctggctaataactggattgcttcagaattgatatgtcaacattgtaaaatttgtgatatgtcctaattttcactcatgttttcttgtttcatcttacctagaaagccttaaggacattgtcagtgggtcattactttttctttcattaactttccaggagttgctcaatgaactacagaaatttctggaaactgaaaaagatgaattaattttggaagttatgaacccacctcccaagaaaattcgactgcaagaactggaagatagtattgataatctaagtcaaaatggagagggaaggatctctgttagtcatgttggaagcactgcttccaagaactcaaatttaaatgtatgtaatgtatgcctaggaattcttcaagaattctgtgagaaagatttcattaaaaaggtaaataacctgtttttcattataggtgcaattatgtagagattttcagtcttaaaaccaagaattcttttttctttccttttttcaagacaagacaattcttttttgggtctcattctgttgcctaggctgaagtgcagtggtacaatcacagctgactgcagcctccaactcctggggctcaagcaatcctcctacatcagccttctgagtagctaggactacaggcatgcaccaccatgcccacctaattttttttctttttttttgagatggagttttgctcttgttgtccaggctgtagtgcaatggtgtgatcttggctcatcgcagcctccgcctcccaggttcaagcaattgtcctgcctcagcctcatgcctggctaattttgtatttttagtagagacagggtttctccatgttggtcaggttggtctcgaactcccgatctcagatgattcgcctgccttggcctcccaaagtgctgggattacagacatgagccactgtgcccagccctaattttttaatctttttgtagaggcaggatctccctatgttactgtgctggtcttgaactcctggcctcaagtcatcctcctgccttggcctccaaagtactgggattagaggtgtgagtcactgtacccggccaaggccaagaattcttttttttttttttggagacagagtctcgctctgttgcccaggccggagcacagtggcgcaatctctgctcactgtaagctccgcctcccaggttcatgccattctcctacctcagcctcccgagtagctgggactacaggcacccgccacccagctaattttctgtattttcagtagagacggggtttcaccgtgttagccaggatggtcttaatctcttgacctcgtgatccgcccgccttggcccaaagtgctgggattacaggcgtgagccaccgtgcccggccaaattcttttttttttctgtttttttttttttttgagacagagtttggctcttgtcacccaggctggagtgcagtggtgagatctcagctcactacaacctccgcctcccaggttcaaatgattctcttgcctcagcctcctgaatagctgggattacaggcacgtgccaccacgcccagctgatttttgtatttttagtagagacggggtttcaccatgttggccagtctggtctcgaactcctgacctcaggtgatccgcctgacttggcctcccaaagtgttgggattataggcgtgagccaccacgcccgaccttctggtttctgtttttgtcttttttgagacagggtcccactctgtcacccaggctggagtgcagtggcatgatattggctcattgcaacctccacctctgggctcaagtgatcctcacgccttagcctcccaagtagctgggactacaggtgcacgccaccatgcccaggtccaagaatttttatattgaaaggaacactgccgttcatttcaacttgtttcacacaattggatcattaaaatattttcttttttttttttaaaaaaaaacaaaagcctactcttctcaaattactttttaattgacatatctgaaaattaataaaatgtgtattcatgtatttcagtcataagtgctatttaattgaagaaaaatatagcagtttgttttcattttgctgtttaacatagctaagttacagaaaagttcatttctagttgtccttattattgtcctgaaaagactagtggtacagccttgtagaaggtaaatgattgaatgtgggattgccttttgtttgttttttctgtcaagagtgctatatttgggtttattttgtttgaaagttaggggtgacctaatagaaagctattttgacacttaacagtttattctgaagctgttactcctggctgttttggttccttgtggtattagtcttcagggtcatagttaggcaatatttaatctcaagatatttgtgagtgttccactgtcaaatgtgaaagtttggaagttttgccatgtcatctcctggaccagaaattcatgttattaagattagggtaagtaatattttcagcaattcctgggaatttacataattgtaatgctttttcaggtgtgccaaaaggttgaggcctctgggtttgaattcaccagcttggtattttcagtctccttcccaccacaactatctgtaagagaggtaaggtcatttgcatgcataaaactgtatgtgaagtgcatgctaggaatttctcaaaaaatgggaatgtagaaatattccttactctattatattttttacattttgtctacttattgaatgattgaagcaatttatagctgcttaataaatacttgttgagtgagtgaatgacaaaaggaattagttgtgtcctaacaaagcaagttagtttgtcctaggactgccatcttttttaaagtccctcaatcagttgcagacattcattattagctccatgtgaggcatgatggtcagagaaagagatttgactaggtttccagagatcttttgaggtggatatgtgcattttagaatagtcctagaatagggtcatttcaattatgatgagccttcttccctttggagtaaaatataaaaagatggcgtatcttccagtcaatgataaaagggagagaaatggcctcattttttttaaactgttttctttgttaagtgaaaaaaaaagtcactgctgtaatattcttatgtgtcaaaactgacatgaaaacataaagctttgctaatactgttaaatgaagcatagtgagaaacttctgtaatctcaaattacaaccatgggttctaagcatattcgtttatatttatgagatgtctttcccctaagaatcctacagtatcaccagaacattacatcataaaccctcactttctttgggtgagcatgtttattagctccaaataagctgaagattgttgaagctggatagaatgatacagaagagccaggaaacgaaaaagggtagaatgattttatatagtatctgtgttgctgacaagataactgagcaaatggaaaaataaaggggatgatgatgatgatataactgggcttataaacacttagagtcattttctagtcaatcatcaaagcatttctcactgatgtgccatcttctggtccaattttggtagagagaaacagacttccgaaagctgagtgactgtcactttagtgaaagttttgagaaacaaataggaataagaagtatattttctgaatgtggttatatatcttaaaaccaaacccttcctctcaaagcttatgtttatatatttccctaaccctcagagcctgtgaatcaaagtttatatttttacattaagattcatattatccattttatcacttatttgatgattttaacaatattagcttaatgttactatttataaggtatttatattccgtattagaaacagaagatttgtttgtttgtttgtttgtttgttttgagacggagtttcgttcttgttgcccaggctggagtacaatggcgccatctcggctcactgcaacctctgcctcccgggttcaagcgattctcctgcctcagtctcccaagtagctgggcttacaggcatgcgtcaccacgcctggctaatttttatttttgtatttttagtagagacggggtttctccacgttggtcaggctggtctccgacacccgacctcaggtgatccgcccacctcggcctcccagagtgctgggattacaggcatgagtcactgtgcccggccagaagatactgtttttaaaaatagaattattctgcttaaactctactttttataactaattttagccagaaaactatttagcagaaatatgtgactgttctgattattgaagaattaatatgtttccatagtttagtgtgctatgttttattgttttatttgtagtaatgactaatatattttaacctattcatttcctaagaataaaaattcaagaaagtacagttttatatgcagtatactcttttcacatcccaggtttcttcagaaaattatgtttatggttcacttcgtgatttgctgtttttatgttactttctcttttttttttttttttttttttgagacggagtctgtctctgtcacgcaggctggagtgcagtggcacgatctcagctcactgcaagctccgcctcccaggttcatgccgttctcctgcctcagcatttcaagtagcagggactacaggtgcccgccaccatgcccggctaattttttgtagtttttagtagagatggggtttcaccgtgttagccaggatggtcttgatctgtcttctgacctcatgatctgcccgccttggcctcccaaagtgctggaattacaggcgtgagccaccatgcttggccacatgttactttattttattgccgtcttttattatttctttggagttgagatatgctgtgcaagccaggttggatagaaattgctttttaaaccacttatttgttacacatctcagtttaagctagttacgtatatcttcagaatattctgcattttgaatataaattaaattctgtgatttctctagtgccatgttctacattgtggctttcaacttagaccttgtaaatatctctaccttagaacttctttgtctgtttgtagaacgaacgtcaatatactatccataaaattgattgatgtcaattatctcataattcacaccagaatatataattgagtccatttgaatgatttgattttttccacttctaagaagtagattatcacagatctatttaaagcaaacaacactttatcaatatggtagtatttattatattcctgcttacaaaagaaacagagggtggcctcaagtaaagttttttaaaaaattaaatggctagtcacagtagctcatgcctgtaatcccagcactttgggaggctgaggtgggaggatctcttgagtcagttcaagaccagcctgggcaacacagtgagactctgtctctacaaaaaaatttaaaaattagctgggtgtggtgatgcgtatctgtagtcccagctaccctggagaccaaggtggggggattgcttggacctggggggttgaagctgcagtgagccatgatcacaccactgtactctagcctgggtgacagggcaagaccctgtctcaaaaaaaaaaaaaattaagcaataaaatttgcattaacgcatctatattattggttctacgaatccctttctgatgacagcaattttttttttttttttttgagacagggtcttgttctgtcagccaggctggagtgcagtggcgcagtctctgctcactgcagcctccgcctcctgagttcaagcaattttcctgcctcagcctcacgagtagctgggattacaggcatatgccaccacacccagctaatttttgtatttttagtagagacgcggtttcaccatgttggtcaggctggtctcaaactcctgatcgcaagtgatctgcccgcctcggcctcccaaacttctgggattacaggtgtgagccaccgctcccggccccaatagtttttatttatcatcattataaaagcattaatttaaaagcttagaaagaaaagtctatatttttgttcacagttagtataataatcattttccactgagttcaggagaatatggaagcaggatggagtatatctcctaaatgtgttttcttagaaggaactagctaatcaatcagaacagctttaaacttaatactgctaaagaagagaagcataagcagattaactggtgaaacagtgttacagtaagacgtagtaagtagaataaataaaggcggtattcagggtttcacaagagaacaatatggaaagttgtgggacataatgcttagagtctccaaagtctataatggcataaacattttaataataaatttgagattataagagagtaataaataccttacgactgtcatggtgagtttctgggtttggtcttatcatttgaatgtaataatggaaggataattccttcttataaggctcggatttgttaagaggaaagatgtagtagtgtgatatggcaagaaattatgtacctgcactgagatttgagatcctgagagtgatctcatggtggtacctgtggtcccagctccttgggagactgaggtgggaggatcactgtagcccaggaggcggaggttgcggtgagctgagattgcaccactgtgctcccactccagcctggaacaaagtaagatcctgtctcaaaaaacaaaacaaaacaggatagatagagtagtagaagtatactgtataatatctggccaagggaagggttgtttatttacagatacaaaataatcacaaaggctaatgaatacagtagtgtgagggactcccagtgtttcggcacatgatggaaatcatgtttaactaaaagtgtgttatctgacaacttttagattggaactgtttcttttcctaaagtagtggttctctaacatgcatgagactcacttggagagtttcccaggtcccattcccagagatgctaatacagtaggtcaggtgagactcatgaatttgcatttctaacaagctcataggtaatgcttgtgctgttacaatgacaaaactttgagaaccattttcctaaaggatggtgggggaactaatctagtcctaaatgaaaaactgatagccttttaaatgtgtattcctgaaggatgggaggaagaggcataagtagaatatatcctaaacttttgataagtggatttcaaacactacaaagaaaaggcaaagaaaaatggcataggattctgtgctggaagataaattaaaaggattgagagcatcagagaaagtgcaattcacattttaattcaaaccaaactatctcaatgaataaaaaaaagggtgggggaaaatacatctgaatgaagaagtagggatctctttctatctctgcctctgtttttacacaaaggcttgtatttagatatatttatttgactttttagtttggcctatgaactcctgtgtacctgtcatccgacttcagcagttaaattttttgccaacctgggatcagtttcagaagaaatacaggaaaggtgaagtcaaattaatgcaaatgaaagaggatggcttggctgggtgttggctcatgcctataatcccagcactttgtggggctgaggtgggtggatcatctgaggtcaggagttcgagaccagcctagccaacatagtaaaatcccgtctctactaaaaatacaaaaattagacgggtgtggtggtgtgcacctgtagtcccagctatttgggaggctgaggcaggagaatcatttgaacccgggagggggaggctgcagtgagccaagattgtgccactgcactccagcctggggagactacatctaaaaaaaaaaaagaagaggtggcttatggcttatgtctataagaacagcaaccagaaaactaaagctactaatgaatagaagctttcaagaattgctaaggaagatttgtgtacttaaagttatgtttagagcaagaaatagatgaaaagcatggatagatctgctatttggaactgatagtatactgctgatgcatgatatagagaaagcagggctctgaaaaatcctgttttgcttctgtcctttatgtcgaggaaaatgatcttcctgccgaaaagaggtagactggtcattggtaagggagaacgaatgctccacatggtgaagcttttcaagatgggttcaggtgtttagacctgggtgcattacatttcagtatagcttcagaaagaacttgcagctattcttgatttttgagggcttttaacccatttatgctggagattgcaaatttttttggtgaaaaatcagaccttggcgatgacctagagcagtaggatataaatatctcccacaagcttagcgttctaataatggaacactaggaaaatgggttaaaaatagcagattttacaaatgactggagacagataaaggcagttgcaattttccaaaggggaagaaagttggccacaaaggtcagggtaagagggagatgtgattataacataatggtaagagagatgtaatgtttattctgaagatggaggaagggagccatgagccaaggaatgcagatgttcttctgaagctagaaaaggcaaggaaacagatttactacttacagcctccagaagggaacacagccctgctggcaccttgattttaagccagtgagacctgtgtcagacctgggacctaaagataataaattggtgttgttttaaaccactaaatttgtgataatttgttatagaagcaatagaaaatgaatacacatttagaggattaagtgcattcagaatggtggagccatctgaaacctggtcacaggagccactgctgaaggagcttgggttatttaattttgagaatagatgattcagtgggatgagtttgctttccttaaatatttgaggggcttccttataaaagaggaattagattgctgcaaggatagaatcaagagctattaagaatttagaattatccagaacaggatagattgtttccagagatttcacgtcattagggtgtttaagccaaggctggaaaatacagttgtcccttgatatctgtggggggttggttctaggacccccgagcccctcacagataccaaaatccacagatgcttaagtttctcatataaaatggtatactatttgcatataacttacacacatcctcttgtatactttaaatcatctcaagattacttatatactacaatgtgggtgctatgtaaatagttgttatgctacattatttggggaataatcacaggaaaaagcctgtacctgctcagtacagatcctttttcccccctaaatgttttctatccagggttgattgaatccatagatgcaagatccacagatacagagtgccaatgtacttggccaagatacatagaaagaaagtgtgcactatatagttggttagactagagatcttaagccttttcaactctaagattctatataattttaagaaaaatacttattatagtgtttatttatttgagatggggtctctctctgtcacccaggccagagtgcagtgatgtgatcacagctcactgcagcacttgacctcttaggctcaagtaatcctcccgcctcaccttcctgagtaactgggaccacaggtgcatgccactatgcccagataacttattttttatttttttgtagcaatgaggtttccctatgttgccaaggctggtctcgaactcctgggttcaagtgatcctcctggtgtggcctcccaaagtgctagtattacaggctactgcacccggccctatagtggttattttatattcatgattgattcctctaaacttctacatcataatgccacacaaaaactatagaatgaatgtcccagacatatgctaatattaggctaaatttgtatttatgggaaaagagtattccattaagtccttttaaaagctaaatgcttttcagttttagtttttaggttcatctttactagttgagtccagtagagggcaatattgtactatcagtttggcttattggtctcttttcatgggtagtgtatgggaaacagtttgcttagtccattgactttaaatgtatatattgtcttttaagtgttactttggatgaaacacctgcttatcaatttgcaacttgatatggttggagttttgtcaaatcaaaacttttttcctatcatttattatactttatatctgcatactttgcagtaagtactacaaattatacatgaccctagaaaattagctaagaataaaagcactaccatttctacccatccaagtgctaaccaggcctgaccctgcttagcttttgagatcatgtgagatcaggcacattcagggtggtgtggccacagacagcagtacaatttctgtagcagcatttttttatttaagaaattgtcttctttttttttttttaagatgaagtctcactctgtcacccagattggagtgcagtggcgtgatctgggctcactgcaacctctgcctcccaggttcaagcgattctcccgcttcagcctccctgagtagctgggactacaggtgcatgccaccacatccggctaatttttgtatttttagtagagacggggtttcgccatgttggccaggctggtcttgaactcctgacaggtgatgcgtccgcctcggcctcccaaagtgctaggattacaggcatgaaccactgcacccaacctgaaattgtctttttaaattctggaaaatggatattcaaatggctttggatttttacttaaatctgtggattcataactaatttaggattattgatctcattcagaatctgaagaaagcagtgaattcctttgtcctaaaaatgcacatactaaaaattttgtatgtgtttacagaggcctcttaaactctcaggccattagtcctagaatcttttttaattggtaatttcccttctgttattgattgatgttctttttctaaaggactatattttttctaattatgtttagctcataaatagaatgtgtcaaaattctcaactttaagtataggagctatatatatattgtgtgtgcaggcatgagctgtcatctttgttcattaactccgctttctgatttagcatgtgtattttctgctttttgtccatttgtgcatggcttctcgatttttattttgtatgacaggcactcttcctaaatctgtgtgtgttctctctcacccaccatgtaagaccaacccaaggtccacttcattcaataagccttttctgagcttactaaggagttttcagaatttatagccctatttttggttagattagtttagaactcccttcagttcctatatggtccacttatccatgcaaagcaagtttgattcctttaaacttctacagcataatgccacacaaaactattatacaatgaatgtcccagacatatgctaatattaggctaaacttccatttatgggaaaagagcattccactaagtccttttttttttttttttttttgagatggagtcttgctctgtcacccaggctggagtgcagtgatgcgatctcagctcactgcaaaccccgcctcccgggttcacgccattctcctgcctcagcctcccgagtagctgggactacaggtgcctgccacccggcctggctaattttttgtatttttagtacagacgaggtttcactgtgttagccaggatggtctcgatctcctgacctcgtgatccacccacctcggcctctcaaagtgctgggagtacaggcgtgagccaccgcgcctggccccactaagtccttttaaaagttaaatgcttttgagtcttagttcttttagggactaccccttaagcatctttcaatagactttttatgagtgggttggcgagtgtatagtaaccttgctagttttaggcacacaggctgccatttttataaccattcacaggaaatgagtgtgttcatgcagcaatccactctatcttatcaaaggtaactccaagaacttgcttctgtgaatgtaacattggtgtatgaaattctgtgttgttagaatcatggaatcatatatctatatgagaccttggtgatcagctagaacaggactccccagctttttatggcacttattgaaaaacatcaatgtgtatatggttgtgatttgtcagagtcttatccaggccaccacccaagtgtaaacccattgatacctattgggaatgtctgattgacagtccaggagtttccaacctttgtgtataaggcatccccttttaatctctgacagttaatgggtagtatctgtagattggaaagaagatatgctatgggcaatttttttcagcttcacagattgagaccacttcagtagtcatcacacttatgctcacttaaagaggagaaaaccaaggctccaagtctcgtaggggtatgtgatttgcccatgcgtcccgtttattggaatctggatatgcctccctgcttcatgctgctgttgctttttaagtttttttttttttaaaccataccatctctacatcttgtgtattttcatatgttttatttacctgactaccttggctccgtggatattaccttttcttaactactccccttattaagccatacactcatgaacatcactaaaggtcagaagatcaccagagtgatgaatccaggcagagctgctgtgttaaggagaacataagactagacatgggtgcaggtttaggactctgttacgtgatacactactaggatgtgttgcaagggagaaagagtgagtgacatgtgattagtcaaggtctatatagaacccaagccctggttggcatgtacaatcagaagtccaactatcaaagagtcaaagcagatattgaagagatctaataactcgttattggggtgctggcacaagaagcccaacagataaagcacccagtccccgaggtcactgtggcatgcagcaaggaggaacaaatcacattcctgtgaggaggaagccacagtcaagcaggactagaagcaagcctaattctaaagaccaccacaatactataatgtatattggattcaggattgcagttggcaggttattcagacacatatttaaatgcttaaagatgcatctctttatggcattgccttttccttggcctgaacccagctaagtataatggaggaggaagcaaggaagaaaagaagttgctgtggctcatctagcagtgtaggtaattgagggagatcaggtgcattcagaacatgaggtagcctcaaagatttgaagtttcttttaaaaatgtgtatggtcttattcttgtgaattgtcacatttggcctctttaaaatttacaataagaaatggtaatgtaacagaataaaaaaaaatacaagatgaaacacatcctttttctttaaaatgatttccctgtgaaattgaacgtattagcacattgctaccttctaactgtagagatctttattaaactatttttcctccattaatttttaggactgtgtggcgtagttaagttgctgaaaaggggaacttctaattcagactcttgcctatttcaggtctaggtttttcttgttgcgtagaactgtccttttttctgataccaccactgtgttttagacctaataattctagcttactaagatatgattgtttttgaaaaattattcataataataacaaatatatatgtatgtatgcatatgtataaagcaatcatttatatgtaaaacagccacaccaccataatgtgtagttattttttaggaggagcaagataaaacccctttcttaggaaaacaagccaccaacagttattgaatatcttcatggcagagtgtgttgcatgtgctctttcatttaataatcacaaccccttaaagtaggtggtgttatcatctccattttacagatgatgaaattgaagctgaaggtcacattgctgataaatagcagagctaggatttgaactctgatctattaaactccaaagtttacgctttttttttgagacagagtttcactctgtcacccaggctggagtgcagtggtgtgatcttggcttactgcaatttccacctcccgggttctagcgattctcctgcctcaggctcccaggtagctgggactacagacgctcgtcaccttgcccggctgattttttgtatttttagtagagacagggttttgccttgttggccaggctggtctcaaactcctgacctcaggtgatccgcctgcttcagcctcccaaaatgctgggattataggcgtgagccactgcacccggccttggtcagatttcaaaagggttattgtctttctgtgttataagtgggacttagcctaggttttgactttagtattttctttctccaaatggtccagtatcttcaaggttagggaaaggattcttggtaaaaatatgaaaccagaactctcataattatttaacaagtgtgatcatttaaaaagagtaatggtaaaccaccagtttattttgtgattctctaaaatgataactctggaaataaaatttaaattacaattttagcactttcccatcacatttatgttcaggttttgttatcagatgactggaataggtgcaaagatgttttgagtcaaatattttattacagcacctatcttaaaattcaggaatttcaagtcatttttgtgaggagctatttttgacttccttttttttttttgctctgaggaagattgatgcatgtatgtgtgatgatgaattatgatggtgaagtcccttaattggaggtggaagtcccaatgaagtttttagccacatcctttgtcatggatatgtccaaatgtccaagaagagggggctaggtggcaagtgctaccttgaagtcagacacatccaaactcattgtcagaaacctctttcttaaggaatagtactactactttcttccctccaagcagaaggaaggaccagcaaaatagtctttggccaggtttgtcagttacgaagtgtcgatctggccgggcgcggtggctcacgcctgtaatcccagcactgtgggaggccgaggcaggcagatcacgaggtcaggagatcgagaccatcctggctaacagggtgaaaccccatctctactaaaaatacaaaaaatttgccaggcttggtggcaggcgcctgtagtcccagctactcgggaggctgagaaaggagaatggcgtgaacatgggaggcggaacttgcagtgagccgagatcgcgccactgcactccagactgggcaacagagcaagactccatctcaaaaaaaaaagtgtcaatcaattgcagtgctacagctgctcctcctttttaaaattaggttttactgctccaaatattgaaagttatttttacaaatcttcccttttaaataaaactgaatatatttttcctcactgatattaatacaggatcaatactagtggaatctgttttctagactagataccattcaaggccccaggtggaaatgtttagctgggaattttgtcttaaaaaactgagtatctttctccttgccattatgtttattatgcaaagttatccagtttttcttaatgtaatacatattttccagtcaatttggacctttctttttttctttttttttttgagacagagtctcaccctgtctcccaggctggagtgcagtggcatgatctcagctcactgcaacgtccacctcacgggttcaagtgattcttctgcctcagcctgtcaagtagcggggactgcagccatgtgccgccacacctggctaatttttttgtattcttagtagagatggggtttcaccatgttggccaggatggtgtcaatctcctgaccttgtggtctgcctgcctcagccttccaaagtcctcggattacaggtgtgagccactgcgcctggcctggacactttcataatttataaaactctgatgtaaaaaaccctagttgagcactggattgacatttcacagggctacttcctttttattgtgtgtagcttttggtttcacaattagtgcgtcagagatcagctggatatatggcagtctccagagccagggcaagagtgctcagcacgtacttgcagagggctagttttttatctttaaaaattaaatccatggcaaattaaagagccatatatcgtattcattaaattataatttgaaagctacttgtgtaagtaaatgttgcggtatcgagtatgatcaaaacctttgattcttttttctggtggaatctaagtttctctctaaactggttgttaaaatgttattgccagtagctgagtaaagataatgtgaggggaactaacttgtgtggggaaaaaataaaatggattttatttaaatgtggtcatgagccatataaaaggaaatgaaataataaaatagatgcaaaggtattaacataaatagcccttttagtcttatattaagaagcataatatgaagtgatttctatttagaatttagttcacatccaggatttaaattttctgtgaggctggggtgttatgatgtgtattgattatctgatattcctttagtattatcactagaaattcatattagaaatcgtgagttggtgattttagtgagactttcatattctgaaagcatcacagaaattcatgacctgttgtggagtgggcatgtgcactcatgccctattgagtaaatcagtagctagtcatgaatgctaaatttgtattccaaaacatttttttttaaatgtagacatgtattaaggtacttctggctgcgtatagtggcttatgcctataatcccagcactttgggaggctaagacaggggaatcacttgaggctagaagttcacgaccagcttggtcaacatggcgaaaacccgtctctactaaaaatgtaatgtaaaaattagctgggtgtggtggcaggcacctgtagtcccagctacttggaagctgaggcaggagaatcgcttgaacccaggaagtggaggttgcagttagctgagatcgcaccactatactccagcctgggtgacagagcgaaaccctgtctcaaaaaaaaaaaaaaaaagtgcttctgttgagtaacattcaatctgcaacttgtttcttaggtggcatgcagcaactgatatttcagttactgctttattggtctggccccagggaggtgtcccctaccacgttaaattggaggtcatatggtctgtgcacaatgacttttcccctccaattttcgtaatatttatttctttttcttgctttgttgcattggctaagatcgctagtacattgttaaacagaattagggataatgagaattcttttggattatttttctgtttgaattctaccccctcacacatatcattatcttagaagttatgcatttacagtttttcctttactcttaaaagtactaattaaattggtactcccatttctacaaaaaataaaaaattagctggacatggtggtgcatgcctgtagtcccagctattcaagaggctgagataggaggattgtttgagcccaggaagttgaggctgcagtgagccaagattgagccattgcactccatcctggatgacagagtgagactctctctctcaaataaaaataaatacttttatctttcccagagaatgcaaagaccttggaatacttggattccttgtatctcttaatttacatttcattgtgtgtgttttaatttgacacgtttaaatctcatgtgacattattttatacaagtaatattctatacaatcagtcaatattcacagatttacctacatattcatcttgtgtattaccctttatttcagctgtcatctgggattatattcttctgcatgaagaatatcctttagtttagtttttgttttttaaagtataggtcaggccaggtgcagggactcatgcctgtaatcccaacattttaggagactgaggcaggaggattgcctgagcccaggagtttgagaccagcctgggcaacatagagagactccgtctctacaaaaaaataaaatgttaggccaggcatggttgttcacacctgtaatttcagcactttagggggccaactcaggatcatttgagcccaggagttcaagaccagcctgggcagcataacaagacctcatgtcaacaaaaaatgaagaaagttatctgggcttggtggtgtgcacctgtagtcccagctactcaggaggctgaggtgggaggattgcttgaacccagacgtggaggctgcagtgagctgagattatgccactgcactccagcctggacaacagagtgagaccctgtctcaaaagaaaagaaaagaaaagaaaatttggacattgattatgaaaaatataatttgaaactaaaataatgttctcctccagagaggatttttgttttcttctgagttctagctaggggcattagcaattctgaattaccttaatccagccacagggattgcaattaccttaatccagctacagggattgcagtgatttgaagttgatctttaacacctttaaggactgttctcgtccccatttacccctgcttctagggtgtcatgcttcatggtttcagccaaaacatagggcttatcaggattccctctctctcttctgacaacagatgccccttagggaaaagctgctcaaaacgcctggctcatctttggttcccttcttctgaattttggccctgtaactcttcactaccttgttaactttctgatgtcttcatgcaatttttttttagttgtccagcttttctagttgtcctcaggagggttgatccactattaacaaattttctcaactttgttttccaatcttgtttagcttttcataaatagtaatactatgtttttaattccaagaccttttctgttttctaggttttttttcccgtgcgtgcgtgtgagtatgtgtatgggtgttttagaaaaataggatcctattcttgttaaacacaatattttatctttctgagaatatcaatatgtgttgctattgtgtaatttttttgtctctagtttcttaaagttacttttttcagtttattttggtaccttctatgtcaagttgcctgcttattgttggtgagttggtcatattgaagagtacagaataagaagcagttgagcctgggcgtggtggctcatgcctgtaatcttagcactttgggaggccgaggcggatggatcactttaagtcaggagttcgagaccagcctggccaacatggtgaaagcccatctctactaaaaatatatttttaaaaattagccgggcatggtggtgggtgcctgtagtcccagctacttgggaggctgaggcaggagaatagcttgagctcaggaggaggaggttgcagtgagctgagattgcacttgggcaacaagagtgaaactctgtctcagaaaaaaaaaaagaataagcagttggaagctagatatgtgaataaagagggaagattcactgtgagctttaccgaatactgagctatctgtcttcatttaggtcttgggcaggtgacatttctttatagagatgcagtctcctatctagcaatctgccaaggtccaaaaacgggtggggcctggggttatgtgtgtatgtcatcatctttctgcctatgtttactcagtgaagtattaatgcccttaaatgtgactcaaaagactcaatcaaaagaccttcattttaccatctccaggaaataaaactctgttcttttactagggttagagagggacattcacctggctgcatggagtggggtaggggatctgagaatctgcctcttttgcaaacagtcaattttctttattcctaccctttaccttccaccaccacttccagaattccttggtgctgcttatttccagaattccttggtgctgcttaactcctgtttttattgtggagtattcatttcttctgctgccaatttaggattcaacttttgggatgtctgctaagtcctttaccactgttcaatctgctttctagctttcaaattgttgctattccctgcactcctactgtccccatcctagtggattttatgcagttttaacaaacctctgtactgctgttttaggggcttaacaaaagcgcatgcctggccaggtggtggggctcatgcctgtaatcccagcactttgagaagccaaggcaggtggatcacctgaggtcaggagtttgagaccagcctggccaacctggcaaaaccccgtctctactaaaaaaaaaaaaaaaaaaattaacccggtatggtggcgcgcacttgtaatcccagctattcgggaggctgaggcaggagaatcacctgaacccaggaggcagaggttgcagtgagccgagattgcaccgttgcactccagcctgggctacagagcaagactccatctcaaaaaacaaacaaacaaaaaccgcatcctcaaatttgatcttccctttttaccaagaaggccagttatatttgtttacttttaagataaaatttttgcatttgtctaattttaatttgtattatagttacattatttgtatttactgcattaagcaaattactaagaccaaagtgtactatattgtttttttttcatctgtaagatcagaaatactttcttacactaaagcaaccctaatggaaatctaccaatctagtttttattttacaaactaattacagggaggactatgaggagaaaacatgtcaaaattttatttatagtagtttatattctttttggcaattaatattagaatttacacctaacagtgacccttagaatgtttgcagattttaaggttatgtaatggaggagtagttggctaaagagaaatgtagaaaaaattcattactggttattctcataatgtatttaataatcatttttgacatctcgtgagcctaggccttttaaagtttgtttagttatttaattaaatttatttatttatttatttattttagacggagtcttgctctctcacccaggctggagtgcagtggtacgatctcagctcactgcaccctcctcctcccaggttcaagagattctcctgcctcagcctcccaaatagctgggactacaggcgtgtgccaccatgcctggctaattttttttttttttcttgagacagaggctctctgtgtcccccaggctggagtgcagtcgcatgatctaggctcactgccagtttagtatgcctccacctcctgggctcaagcttttctcctacctcagccttatgagcagcagagattacaggcaggcccagctaatttttgtgtttttagtagagatggggtttcgtgatgttggccaagcttgtctcgaactcctgacctcaagtgatctgcccgcttcagcatcccaaagtgcggcacgagccactgcactgacctgtttagctattttagcttctatttttatatcatactgtacacaattagtggtgatatatgaatagctcatcacattgccattctccaaaaatttgcttgaaatttcccacacaccaaagctttgtcattagaccttgcctttagacaggttgtcaccaaattattttcaggaatctgtggttccttttttcttcttccttttttttctctctctctcactttctatatttttctccttctctttcttcctccctcccttcctctcttccttgcaaatattacatcaaggtgtcctaataaagatagtggcaggatttaaattggacaggaattaaggtccagggacccctgcctttctcctttcccgtgtcttattgcattttgtcactgggtgtgtggttaaatctgccttggtcattcattacgtcttgcacacctgttaacaagcattcatagctagaaactaacccactgcagatactgttccattctcagattcatggcaaattttgataaatatcatatcatctactttaaacttttagactaaaactagaaaatttggaaagatcaaagcttgaggagatcctttttaatttaatggattttaagaagcaacttaatttatttttcgaattactgaacagagagtcagaagacctgtattataaaaacaacaattaacattctcataaactatctcatttaaacttccaattttacaagaaacctcttttttcctgtcttctagatggggaaagaaacacccaaagggcacagaacttgctctaaatcacttgctggctaagtaggagagagagcttgaacccagttctttctgtctccgaatcccttgctttgtttgggattctttatgacctccttcctatgctgttctgatactacttaggcaagtccctggaaagaaaaggagatggcaggcacactaaactagcagattgaagagttaactgtttatattggaaagattttgtttgaagtttttggtgtattgctttaataaatttagaaagacttaaatatcaacagcttgacatataaccaaacctatttttcacaaaattcatataattttaagaaaagtgcaaaattcactaagtttaggaagatgtttctttaaaaataaaattatgatatatggggcttgtgtgcatttcacagtttacaaagcattcattctatatcataatacctctaaaatttagctgttgcatttatggggaatgaggtttaccttcaaataaatgggtaactcttctctttgaaatgaaaataaaatatagaaaattttaaaacaggtagttttattacattcaaatgcatgtggtaacttaaactaggtcaacatagtccattcattaaatttcagcttgaaagaatccttggagttatcttttaatgaatagataaaaccaaatttgtaattagcatgttaattatatggtctttaaaaatgtatgggagagcactttaaaactgtttttttaaaacatttaaagcattgtccctgaaaatctggtttgtgttattgatctatcaatgaaggaagtacttgctaaagaaaggtaaatcctccccaacccattcaaaaacatcacacattctgaattagtaggtacttttaatgcattttcctttgatttccctgatgcaaaagtagaagtaactttttttttttttttttttttttggtgaagtctggtttctcctataacaagtgttctaatcttacgagcatatttctgaaggattgcagacccaacctagagtaaacccattagatacggccccatccaaataagacactgaggaataaaaaagagaaaaggccgggtgcagtggctaacacctctgtagtcccagaactttaggaagctagatgggtggattgcttgaggccaggagttcaagactaacctggccaacatggcgaaaccccatctctactaaaaatacaaaaattagctggctgtggtggcacatgcctgtaattcccgctactcgggaggctgaggtgttagaatcgcttgaacccaggaatcagaggttgtagtgagctgagatcatgccactgcactccagcttgagcaacacagtgagatcctgtttcaaaaaaaaagagagaaaaaaatatttcatctttagcacaaagtcctcatagaaataataaatttcaaaaaacctataaatttttcaaaagtaaaaatttattctcagcccaaaaatagaaactgttttgtactgttcctctgtttttcattgctgagaggtgatagtgaagcagcaaggatcctataaatatagtacattttaaaataaaatagacctcaacctattagataatatttaaatgaggattcctcaaactaatagtacccaagcaaatatactatgtaacactttaaaattttgtgatctaatattccttttaatttctttttagtaaattgatttgataataaattgagatataattcattttagcaaacttactgttatacaaaagataacttagataattggttgtgagtttttaaaataacctttaaatttctgaaaaggattcacaagtattacatttaatttttttcttttttaaattataaaaacagcacatgcttactgaaagtgccaaacaactcagaagtatgtaaagttaacattagtctctctctttctcttcctcttttctacttcccattttctggagtaacattttggtaatctctttctgagaccttttgctatatacatattaacgtatacctgcatgtactgcacatagtttgggtttgtttgctttagtgaaacatacatgtcctgcaaactttttaccttgcaacaaccattgacaaccttcaactgtgttagaacttacagagctcacatatgcatatatgagctttcccgtacagatggttaaatcagaatttcttaaattaattcatttatccagttgaagaatattcagatcaccttcagttttcagtttttattattataaatggaatttgcaatgaacatacttgtatatggagtctagtatttctatattttggtctgataaattcttagaattggaactgctgaattgatgggaatacagatttagaattgtgataggtatttccaaattgccctcctaaaaggtggtaccagtttacagcagtgtattacaaccccatgtctttttcaaacctgaagttacactcttcggtattttctaacctatatgcaaaagttttcttgttttagttcacacttgtactatttgattttcaggtgaacttttacatctttttatatgtttactagccatctgggtttctattttctggttatttggctttttaaaattgattagtaagtgctctttggacatagtgactattaatctttcatcaattctgtttctcccacccagcctgacatttgccatttacctttgtttgtggtcatttaacaaacataaatttctaattttatggaacttttcatctaggaacaaatttatctgtactttttcaatatttgttttgatctttcaattatattatagtttttcctcacacatttatttattcctatgtgtttttaaatgttttttatttttgattttagttgaaatttgagtggaatctctttttcccataattttttttctttggctattaggaaagtaatatatgcatgtttgtaggtgtgtgtgtttaatgtttgtcttggaactgactaacttgcaggtctctattattaatcctagtggtttttcagttattatctaggtatgcagttaccttatttgcaaataatgatagttttgtcatttcttttttactattttaaaaatatatacagtatatttaggtgtatcatatgtgtatattttaatactaagtatattgttagctctattctgataggtacactttatctaatttttttttttttgagatgcaattttgctcttgttgccaaggctgaagtgcaatgatgcgatctcggctcactgcaacctccgcctccctggttcaagcgattctcctgcctcagctttctgagtagctgggattacatgcgctaccatgctcagctaatttttttgtattttttagtagagaggggtttcaccatgttggtcaggctggtctcaaactcctgacctcaggtgatccacctgcctcagcctcgcaaagtgctgggattacaggcgtgagccaccgcgcccagcctatcctttatttaatgaaatttgcttctattccaagtatagtatgttgtgttaaaaataataaatagatatttgtaataattatatttttctccttttatctattttgtagtcaagtaaactaataatttccttgtgttgaatttgtgttgttttcttgaaataagcatttttcattctgattatagtaacaattagacttaagggctgggtgtggtggcttatgcctgtaatcccagcactttgggagaccaaggcaggaggattgcttaaggccaggattttgaaaccagcatggtcaacgtagtgagacccccatctctaccaagacaaaaaattagctaggtatggtggtgcatgcctgtagtcccagctactcaagactatatttttgtctgataaattcttagaattggaaatgctgaattgaagggaatacaattcagctggctgaggtggaggatcacttgagcctgggagttagaggctgcagtgagtcatgatcgcgccactgagctccagcctgggtgtcagaaagagaccctgtctcaaaaaaaaaaaaattcgacttaatattttatttaggatatttacatacatagatatttggtttaggtattaaatcatgcaattagattttatattagattatgtaaaacttttggaaagaactgtgaggttttcttacgctttgaaaattttaacaacaaagaaattatctgtttttgtttcttgaaatgttgttaaattcacttataaaatgatattagatggttataaaggtaggtctttattactttttcaatttcttctattaaaagttattgttctatctggccaggcatggtggctcacgcctgtaatcccagcactttgggaggctgaggcagatggatcatttgaggtcaggagtttgagaccagcctggccaacattgcaaaaccctgcctctactaaaaatacaaaaattagctgggtgtggtggtgcacacctgtaatcccagctactcgggaggctgagacacaagcattgcatgaacccaggaggtggaagtttcagtaagccaagatcgtgccactgcactgcagcctgggtgacagagcaagactctgtctccaaaaaataaataaataaataaataaaataaataaataaatccagggatcaagataaagacagattttctggagagaggagagaagtaagtatacggagttcctgctggagtcaggcagtcctgtagtcctgggaccaaatacctgcattgtgactaggaggaagttagaggcctctttatttttttattatttttatttttttaatggagatggaaaaagaaaagttattggtcaatctgttttttccctcttcttgagtcaaattttgattaattaaatattagctatttaattaccaaataattaatttgttactttactttccttcaaaattgtttgtttcaaagtgtggtctagcaacccctagaagtccttgcaaggggttcacgaggtcaaaagtatttttatagtttataataatttgcttttttcactctcattcttttaagagtatacagtggagttttccagaggctatgtgattacagcaaattgaatgtagaggcagaatgaaaatccaggtatctcctattaagatgtatattaaagagatttgcaaaaatgtaccacagcatcagttttctcactaaattattttgtttgaaaaatatatttttcaagaaaagttatttatgttaacacataatggatttattactttgtcattaatttttaatgaattaataaatattttttaggccaggcacggtggctcacgccaataatcccagcactttgggaggccaaggcaggcagatcacctgaggtcaggagttcaagactagcctggccaacatggtgaaaccccatctccactaaaatacaaaaattagctagatgtggtggcgggcacctgtaatcccagctacttgggaggctgaggcaggagaatcgcttgaacctgggaggcaaaagttgcagtgagccgaaatcttgctgttgcactccagcctgggtgacagagcgagactcagtctcaaaaaaaataatttaatttatggttttaattgctaatatggtaaatattgatagctataaccaacataaacaaaagctacttgaggttcttaaaaacttaagaatgtaggcttggcgtggtggctcacacctgtaatcccagcactttgcgaggccaaggcaggtggatcacctgaggtcaggagtttgagacaagcctggccaacatggcgaaaccccatctctactaaaaaaatacaaaaattagccaggcatggtggcgcgtgcctgtagtcccagctactcaggaggctgaggcaggagaatcgcttgagcccaggaggagaggttgcagtgagacgagattgtgtcattgcactccagcctgggcaacagagtgagtctctgtctcataaaaaaaagaatgtaatgggtccttaaccaaactgttagagaaccactgatctacatataacaatttaatttttttgaaggtgcctgtactcatcttctataattctttaaatcttctttgaatagaatagtctactgtacgtgtgtatatatcttcatctatatatataattacattttacatgcatttttgtttttacacatttattgtgtgttcatgtgtgtttgtcagcagaactgcaacttaaatggaagcactgacctacttggtgttttggttctttcttgtggctgattttgtccacaggccaagtttctataagtgatttagttatgtgagctagtggatttctgatgatagtgttggatgaaaggcacagagttccgtagccacaggcaggaacagttggtgggagatgggtggtcctccagggaagctgccatcacaggtcagccttatcctctgatggttgtgctggatttcttgcaacttgtattgtgctcaaggcaggaactcagaggtatccttagaatggggcttcactgtacaaagtcctggccactataaatgtttcagagaagatgctggctctctaaaaccaaattcaaagagggagtacatttgcacttctcagccacacccggctgccaacagatgtttgagatccttgtttcactgaggttattaactctagagttacctgaaattcagttgctatgtgtgttctctctcattttcatatgacactaaagaacagtactgagccatatctgtcttcatttatctatcccagagccttttctttattgtaactgttgtgtcttttctgatccccctccctgcttctactcctaccccaccccacttgcagaatttcctcttgttatttccaatcaaatccttcatttctaaacaaacatcagcacctacagtgttggaagatgcaatacaatttccttaaaactcacaacataaaaatagcaattccaggaactggagtaatagagctgtaaaacctaatttggccccacagattcattctatgctgatctgtccttgcttttcccctcttgacttgtccaaaaagaagatcttcaaccttttcaatgctatctaaaagttcttattgccaaagtagagagaaaacctagagttaaatgatctcttcttatgtctcacttcattttcttttttctcaaccatgtagggaaagaaaagaggattttgatgggtttttaaacatggccaacataggttttatttatcagaggagacacctagattcagtctgttacattcatttaatcacacgtctgacatccaagcctttggggaaaagaagaaagttttgagatggggaggtggcgggggtgaggagatggtggtggtgcaagagtcaactaagtggtagatcaaacagtggttataggaaaatattcccccttcctctcttaccttcctcttttttgccaccacgcctgagacacaaggagaggcagatgttcaaggttatagcatgctgccacaaccctgacacacggtgaggcacaggccctgatggagcagaagcttaaggcactagcatgctggggatggggaggaggagaaggaggaaatcttaggcagtggtctggatagagagaaggaagaagaatttctcttgtcactaacctccttattgagcccagtttccaaatggctattacagtgcaagaaaaaattacataaatgtttgtatgtatgtatgcatatgtgtatgtgtatgtgtatgtgtatgtgtatgtgtatgtgtatgtgtatgtgtatgtgttgggagaagagtttggagcagggggtactgctaaatgcctccagctgcccacacaactattgtcatttttctattgtcattattctcagtctatatttattttatctttgttattataaatgagtccaagagatgtgtaagattcaaaagaatatagtttgaagggcattggtggtgatttagaaacctcaacatcactgccaatcagcaagtcctgccaatctgtgttctcaatagttcttaaagttgcctacactttatcatcactagcattgctgtaatatattttttcttgcttgaattactgctttagtttacgacaaatcttccttttctttaattcccatctttttcttctaattcacaatgcaaccagagtgggcattcctgaagacaaatatgatcatgctacttcattccttaaaatccttctgtgggaccatattgccttaaggggaatatctaaaccccttagtatgggtccagtagttctgtgatctaagtcctgcttcctcctttgcatttcccagccacacatcctcagttctttagggaccactgacatagtccccagaaccttcccagtgctctctggcatttgcacctttgggtttcctctgtttggaacatactttccacgtttttcaccctgtgaattcttttttttttttttttttttttaagatggagtctcactctgttgcccaggctggagtacagtggtgcaatctcagctcactgcaacttccgcctcccaggttcaagcgattctcctgcctcagtctccctagtagctgggattacaggtgcgcaccaccacacccggctaatttttgtatttttagtagagatggggtttcaccatgttggccagggtggtcttgaactcctggcctcaggtgatccaccctcctcagcctcccaaagtgctgggattataggcgggagccccaagccggcctgccctgtgaattgtaagtagctgatccttcgaagctcagattaggtgtcacttctcctgcaagactgagccgaggatcctttacatgcccctcctaagtgtgtctctgtctcagcccccaccactctgtattttaattattttcattactgttactattaatagcttaatgtttattatcgttttgtcttagttcatgggtttgctcatgggcagagactgtttttttatctctgcattctcaattgcaatctcaccacataggcagtaccccctaaataaattgaataccttcctcttacggtttgagaaacccagagagagaagccaccttgctagtgatcacataagagaagcagagcctgccttttgatctagtgtttgtttccctccatcaggaattacagactcagatgtctataagagccagatagacaacaaaaatgagaaaagtgggctggacacattctctcatttttctggaaaatatgactttctcacagtatactttcccatgtatgataaagaaatattttagcacaagacatattttcctcttaaactaccacacaagaaaaacaatagtacaaaaatgatggttatattgcaacttgatgaattatagaagattcaaatatcaaatgtttctttgtgctgccgcgagtcttggcctatacataaatgaatcacatctcatgttatggtttcagtctttgggttcatgacctagcttggcaatcaaaaccttctgaactttccagtttcatctttaatcgctgaacccctaacctcacttatgaacacacataacataccccaaagtgtccaactttactgaattgtagttttgcaacacaccatttttaacacctctctctgtctctatcctttctccatcacctctgcttgaatcaacttcaatccctgttcctactgtcacccactctcattatttggtactagatgaacctctaactcagaaagctcaaacaccattcccgggcatagaccttctggtctatggtgtgtgtgttagtgttagcagagtacacaagcactttagcaagcacttattcaactgccccatttaggacttgcctaacattctccaataaagttaaacatagtccaggattaaattgtgttttcttaattttccagaggtgacatactgcctctggtatcaaatttgattaaacctgataactttaatgccatttgcttctgttggggaggaaaaatttttttgtttactctagagaatagatttttttctattcactaagggacagaacatttatcaaaattatcttggtgatttgaaagggagaaatatacttctttttccttgccagaagcaggtccagggcattattagcttgtggtaacaattgaataatccagcaatgctgacttatttgagattcagcctttaagcccctgctgtgtggttagttctgtccaatctgctggcatgctggagcagggagcctgcagaggctttggaaggaaaaaccatttaacaagtctcagatactaaagacatttgatttaatttcatgtgttacacatggttacctggtttcccttggcaacctccagttccgccctactttataattagaggatggtgggatacattgcagacttgatgacatcacctggaagtgacttgtagagaacagagtttgcttcaaaagaagagacacaaaggtcactaagaaaagacggaagagtctgaggttccttaaagaagagacagatagctctctatagctcagatttcattgaagagggaggtttcagaactagctatagcaaagcagtttggaaatatgacggaatgagatcaagtcctgtaaatcttttaaggtataaatctgaattttattatttgtaaagtacagataaggtttcagttcaacaacagtattaattaccatttattcagtatttgccaggaatatgacttgggtctttacaaacacattaaatcatcacaatagtcctgcaagggaagtattaatatttttgtatatataaggacatgtgtttattgatctcttaaagaaggaggctgggccaggagaggtggctcatgcctgtaatcccagcactttgagaggccgaggtaggcagatcacttaaggtcaggagtttcagaccagcctggccaacatgatgaaacccggtctctactaaaaatataaaaattagctggatgtggtggcgggtgcctgtactcccaggtacttaggaggctgaggcaggagaatcgtttgaaacggggaggaggagggtgcagtgagccgagatcgtgctacagcactccagcctgggtgacagagtgagactctgtctcaaaataaaagaaaaaaaacaaagaaaaagaatgaggctgaaggaagggcgggacaaaattaactacaaggtttcagttttaggagaccattattcttttttttttttttttttgaatgctccctaagtcccataggtctcagtcgtctattataaaacagtttaataacagtgcctataaatgatttctttaggcatccagaaaagtttaaattacaatcatcttagtaattctctcattttacacattagaaagttgagtcccagaaattaagtaaaacctaaagttaggttttctgactcatagtaatttgtgtgttataatactatgatactgtctgggtgcagtggctcatgtctataatcgtagcactttgggaggccaaggcgggcggatcacgaggtcaagatactgagaccatcctggccaacaaggtgaaaccctgtctctactaaaaatacaaaaattagctgggtgtggtggcgtgcacctgtagtcccagctactcgggaggcagaggcaggaggattgcttgaacccaggaggtggaggttgcagtgacccgagatcacgccatagcactccagcctgggcgacagagtgaggctccgtctcaaacaaacaaacaaacagaaccatgatactatgcccatgcattttgaaataaggctctaataaatgaaaggaaaaaaggaaggggtcttgtaatactactactataaatgtattaggttgagctagcagagtaaactaacacatcagaaggtactggtgagacattcaggcactggtgttacgggatccttggggtgttgcttcgccagctggaaacctctgtggacagtggcgtctttgcccgagtttttctctagcccgctaggctcgttctgtccactcggcctggcacgctacgcctgggtctgatgcctgccaagggcaagccaggcgtggagcagcgagaggtgtgtgagtgagcatggggtccagccatcgcacacagcaggcacgctggctgcagtggggcaggcagctccacgcgcagtcatggctccctgtgaagctgaggctggaccagaaataccataaacagcttccacagctgaccccggggaatatggtggcacctggaaatttggagacgctagaaaccgcagagccctaaagagggtgtcacgccctggctcagggagctcctaggtctgggttcccggccacagctcttctcttcctctctcttctctccttctcgtcccccgtggtgagcaaggggcgtgtttcagccctgtttgttttacagctcttttagccccaccatttgtcaggtcctgagttcttgtcttgcgtccaggaagaatgaggtatgcaaacaagtggaggatgagcaagatgaaaaggagctttatgggcgtggtggcacgcgcctgtagtcccagctacttgagaggctgaggcaggagaaacacttgaactcgggaggcggaggttgcagtgagctggtatcgcaccactgcactccagcctggtgacagagcaagactccatctccaaaaaaaaaaaaaaaaaaaaaaggagctttatcaagtggtagaacagttcagagaagacccacagtgggtagggtagctcctctgcatagccagggtgtcccgataagtgttcagctctcagcagagagagtagctcctctgtgcaggcaggtcgtcctgtcattcttcagctctcagcagagagggtagctcttctctgcaggcaggtcgtctgtcatttcttcagctctgagcagagaggaaagctcctctctgcaggcaggtcgtcctatcgtttcttcagctctcagcagagagactctggggtggatagctcctctctgctgttggttgtcccctcatctctttgggtctggctgagtccagggctttatatgggcctcagaggggaggaagtgtgtgccaattggtccatgggcagccatgggtgggcctggaaaaaggaccacaagttcctactcctgtcccggggactggcagcccagcccccaggcttcaggccctccctggcttgaaggtggggcttcactgtggacctgccgctttctgcccaggaacctctctgcctcctgctgctgttcatggcgccctggctgttcttgccaaggggcgcctgcaggccagcaccaaactgccctcagcccctccttggcctccctcccgtacttgttggtgcccaaagtctacagggggctgaggcagcatggggctggcgtgtcagcactgccatgagtgtgcacacacctggctgggctgcgacagtgcccaggctcggctccaacccttctccgagattggtgcaggcactgggagcagggagaggtcagggagcgggagcagacccctccaggcctgtggggacaacgggggggccttcccgggtccctgaaagtgcagagatgcttaggtccacagccgcaagttgggtgagactccagggactgcctgcctctttgcgttttccccacagcagaggccgccccagccaaccccgtgcaaattaacccgacactttcagggctggccccacgagtcccggctgtgcctttggccgggtgcttgtggacccctgagatggtgatggggagcgaggttgaggccgggacggaggctttgggcctgagaacaggtcctggccggccatgcgagagcagaggtggcacagttggctgcctcggggatgtggagcacaggggtcccaccgccgccactgctgctcccacaacccctcctgccgccaccgcccacacctcccggctgcagcaggcttgatggcagcagctactccggacggtccacactgccatcactggaaacaggttgtgcccagttagcggttaatttattctacttggctgacgtctgaaagaattaatgcagctaatctttccaagtgatcatcagtctttaggagtccatagagtaccctactggtcatccgaaggaagtcctgttagtttagaaggacaggtctacatacgaaccacagcatatccataaattaagccgtgtcttgaagtggatgtgaatgataatcgttggcctttttttgtgacacgtagaagcagactacatgtggtatttattgacttatacaatgtttccgtcatgtttacaaaatgctgtgtgctgtgggggacatatcgttacctttctttaaggtgaaagctgtgggagtctaacaggaaacagaaatctcagtgtcagtcacttactatgcaaagcatttggcatacatttcttttttttcttttttttttcttgaaacggtgtctcgctctgtcgcccaggctggagggcagtggcgcgatctcggctcactgcaagctccgcctcccgggttcacgccattatcctgcctcagcctctcaagtagctgggactacgggcgcccgcctccacgcccggctaatttttttgtactttttttttcagtagagacggggtttcaccgtgttagccaggatggtctcgatctcctgacgtcgtgatccgcccacctcggcctcccaaagtgctgggattacaggcgtgagccagcgcgcctggcccagattaaatgcgggctgggcgcggtggctcacgcctgtaatcccagcactttgggaggccgaggtgggcggatcacttgatgtcaggagttcgagaccagcctggccaacatggtgaaaacccgtctctactaaaaacacaagttagccgagtgtggtggcaggcatttgtaataccagctactcagaagactgaggcagaagaatatcttgaacctaggaagcagaggttgcagtgagctgagatcctgccagtacactccagcttgggtgacagagcgagactccgtctcaaaaaaaaaaaaaaaaaaaaaaagagaagaaagaaagaaaaagaaacactcatacctcattaatgagaaatagaaatctgtaaggaggagggggataccccggctgaattcctaggccacagtaaaccaccattgcaaaataaaatcttacctcatttttgattttaaatgagactgaggtcactggtaaatttttgaatactaactcgtcacctaaaaaggggagtttgattagcaaatagttaagcacttcagtaatgatattgagacttaatttcactgaacatgtttcccccttttctctttctgggtgtgactaaattgcctacagcatgctgcatggttgctggtaaaacaggaaatggggtaagtaatttaggtagggaatttttactaccattcaaatacaagctacctggttcttaaagcacttttactactacaatctctatttttatagtgcattcactagctactagagaaattagcacaaagaaccaatttttattctatacatttagggtatcaatcttgtttcattagtttatttgcatagcatattagtagtttattaaagcaggttcattttttgtgtgttttaatatgaatgtaaatacatgttttatatgcattaggcacttatgtaatgtagtttgggcagttattttttaaaaataaattttatttattattattattttttttttttgaggtggagtcttgttctgtcacccaggctggagtgcagtggtgtgatctcagctcactgcaacctccacctcgctggttcaagcgattctcctgcctcagcctcccaagtaactgggattacaggagcctgccaccatgcctggctaatttttgtatttttagtagagatggggtttcaccatgttgtccaggctggtcttgaactcctgatctcaggtgattcacccgcctcggcctcccaaagtggtgggattacaggcacgagccacagcatgcagcctaaaaataaattttatattggtcttagaaactaaactataaaactatgtcataaaagataaaaagtaaataactggtggaacaacagtgagtttacacataggtaagacatagaaaacatagattcacaatcctttatctgaaacacttggaggccaaaagtgttttgaaatataaaatttttggatttttaaaatgtgatatgatgttagagatcatgtatatcatttccgtccccccccctgcccaggctctggggtggtactacataatcaaacatattaatatttctgcaacaaaacatatgaatattcatagtaagtttgataaagtctctaaatcgcctccttcaaatcaggatttgattcccaactgaatttaaaaattttttttaattctccagaatattttggcatttgaaactaaaacataccagtaaaaaaaagggccatatgactgttggcagtacctatgtactctggagagaaaaatccaggaagaagcataaatttctgttttagaatctcatacttggttaagtgacttatagaaaaataattaatttggcttttttgtttgttttgtgttatatatctgcattttcaaaagggtaataactacataaggtttgggggtttcgttagatcttattaaattagtctcaaatggtttagattctggtgtaataaaacttgatcctatgtttttagaaatttgctagcatagtcagagcatgcttttttctaaatgttttcaatttatatctatgttgctaatgagttactgtttttatttcgggttttgtttttttttttaaacgtagtttcacccctgttgcccaggcagtggtgcaatctcggctaattgcaacctctgcctcccaggttcaagtgattctcctgcctcagcctcccaactagcttgggattacaggcatgcaccaccatgcctggttaattttttttgtatttttagtagacacagggtttcaccatgttggccacgctggtctcttaactcctgacctcaggtgatccacatgcctcggcctcccaaagtgctgggattacaggcatgagccactgctcccggctttttatttcttatcaaaggattttaaactaagtttagttcttccaaaagattctgactgatatagggataatggaacagaaaaaaacacaggtcattgttcttttccctcagtgtccctagttcattctgggttgaaaagattgtggaggaattgctgttaaagaattgatttagggaacttacaaaaaaaattaattgccttgcatactctggttcatcttttctttagaatggttgttgtgttgtatctacagcaaaagtgattgcaactgacaccctcataagcacttatctgacagagaagagaaagagaagtgtagttactaagtatgaaatggggactgaatttactttaatgagtactagtccctctaaaggacaatcaggtatatgctagggacctctgtgaagatatttagcccaaattgtattaggaaacttattagctgcatttaactttcaggattggaaatctggcattttaagtagtatatttgctttatatataaggatgaggtttccaagctgtctgttaaccttttcctctggctctataatctggagggaaaaaatacctatggttgaagtttttaaactggactcaaatgcactaaatatatttcaaagactgtgaaggatttaaaacactggttttcttaaataatgttttaactcatttttgggattcgcttttgtaacaaccctttggactttccagaatgtaaacagttttaaaaattgtttccattcttgtgttttctgtttcaacgtttattctttaaaatgtattttcatatattatttactttcaactgtgatgctattttgtgcaaatattaaatagttgaactgttgacacagtatcaggatagtcttttaaaatacctaaaatctttctaatattcagagaattaggaacagtttatgaagctcacacagtatttgaataagttcttggatgtagagaaataatttgattatttgtcagatgtagagtttatctgggtatttcaatgttaaatcacaatcccaaaccatatgaaagctctctctgtaacaagttatattctcagctggatacagaatgggtagatcaactacttctttcttttttttatttttttttggatcaactatttcttattttgcatttttagaggaatagtgatctgcatattcttttttttttctgatcaactaaattcagccattagcttaattactttttgtttttaacctgtggttagtagtgtcttttggtcttaaattacaatggatgttgcctataaggagtaatttctatcagtgaaaattgggcattaaaagggatgatgcataagttggcccttacatctctttcattaaaagcagccctataaatcgccataaggctggtttgaagttttaattatttgaatgacgtgggcttgttagtttgttagtaatatcccagtgttctcagcagagtagaggagttttaataataccacaccatgtttttcatcccttttatctcaagttcctttctatcacaattttaggttacaaactaaagctataatttataaaagggacttcccaaaacctatttattgtctcatgagtatattttgggggaatgtcaaatttttattcagctatttatctgataatacattgatgagcatttcagaacattgatactttaggatttaatatttcttcttcagcagtaaagttttttaaaaagtacagcttctttgttgatttcccaaaagtaagccccattttcaacaagaggggaaaagcaagcattaaaatgtggatgtgattattgtaatacacagttttatagtttgtgagcagtaaaccaatcatctctatcccatctttctgtcttctgatgtataaatcctggaatctggcaattctagcttagaaaaacccatagtgtgcttttgactttgaagctttaaaaattgtgttatatgccattaaaaaaagtaattccatgattccactagagtataaggtccatgaggtgaggaatttttgtctgctttgttctctgctttctatttaatgtgtagaatagtgcctggtacatactaggcactcaatcaatattttaaaaataattgcataaattcttgcctttaatagaaaaagtaaagtttttcatgtcagtgaattaatttttatgttattcagaaagcagagtctgtcgctgggaagagatgatatagttcagctaaaagaagcctacaaatggataactcaccccctgttttcagaggaactgggtgttcccattgatggaaaggtattgggtcaacagcattgttaattttattctctgattttactagttttacttaattatatggcagggttttggttagccaaaaaaacttctttttaaataatccagtgaaggattttttaagcttttaaaatgttaaattctgatagtcttaaattgaagtcaaagcatttctttttttctttttcccttagacttctttatgatctaagacacttatgaaggtaccaggtgccctaattgaccttaaaaggttagaaatgaatctttgccttgatgcaaagcatcagacttgatgcaaagcaacatataaataactgcaagcaaatatagagtcaactctggactatttaattttggtttatctgtggctaatcttgttttcaaatgcatggacagaacctattcaactacaatgagtatgggctcaatcctaccttgttggtatctcaaatccccctgtttacttttaggcagtaactgcctttgaaaacagaacatttcccttttccagagcagaccttacctcagtctctgaaatgggttgactttcagggaagactcaacaggcttccaggtgtgaaaacaggaaggtcatcttaaattagattttaatattatggcctcattgcttcatcattttgctagaaggaaattccctgaatatcagatacacccctattcaaataaaatcacaaaaccatctactaaagctaaacagtttttcaaaaccattctgaattatgcagtaatatttccttctgtaagaatatgctctgttctgtaaaccgagtattgagagaatagagaataaaaccacttcacagatagcatgaagaggaaatgaggtaatgaaagtattttggaagttagagaagtcattaatgcaaaatatttttacctcaaatttcagttttgaagcacaaataattttacatgttgtatcagtgagaacagaaaatagaaaacaaaagatgtgggttgagtgaagtttccctgaataaaaggaatgcgttgttcattttaattattgtatagattagaataaggagcgagaaaaaaaaagctattcattattgtgattctagagtagctaataggtctactaactatccaatgaactcagtaaatataaagacaaaattgcaacatagtatggcatttttagctattcctccccctgacccctccccgatatggaattttgtatattctccatggaggtaaaagtataaaatcatgctttttttggtgtacaaggatgttcattatagcattttttttttgttacagaaaaattttctacagcttaaatgtctgacagtccctagagttgaaaagatttccatgatataatattaaagcaattttccaaaagcatgtcttaaaaaataatacatatacatttatattcacaaaaatgcctagaaagaaacatcaaattgttaatggttctgcttcagtggcgtgggattgaaaaactgtcttgtatttgatcattttataatttatgtgtataatttttgtaataaaacaaaaaaaattaagatctggttttaaaactcaaatccattaagacgtttgagcactttaaaaagaagcttcatatggtttttagggatctgaatagtatgttttttgccttgctaataattcaaatcatagtattggcagaataattcttcatttctctctgttattatttattttcaattctgtaaattctcattcatctttatacctaatttacacatttgtccaaaaagtatacacatttattttaaaacttttttggtaggatcactaatgactgagttttagaagttaaaaaaaaaaacaaaactatttcctttacagctgccctgataacaagttgatttgagagcagtagtatttccagtttttctggtcattcttttctgagccaatctttgagaattaatttctatttccattaataagttgttagatgttagtttccttttgctcatttttaaactgtctttataatttttagagcttgtttgaagtgagtgtggtctttgctcacccagaaacagttgaggattgccacttcctgtaagttgccatgtaaacaacgtcaatggtgtaaaattgttaatgctgtttggttttcatgaaaatagtattgcttctcttcctaataagaaagagaagaacttgttatgtcttagtaggtttaaaatgtgccctcaaaaaaataaaatgtgtccttgaacatagttcctgggcaaaccgatatagctcatacagggactcattttgtctgctcctgatgtcctgagtttagcagccattttgtatgaaatatatttgaattatatctaccccaaaataaactcattaaccttttatattaacttgaattttattttagagctgcgatatgcccagattgttttaagccagccaaaaacaaacaggtaaggaaaggttcccgcttcttagtcttgagtgagttttgtctgagctgaatattcaaatttccaacaaaaaggatatgcatcagaaacatggcaactctattatactaagaatcagcttttaaatatttccatttgctacattaatttttgtttttcaactttttcaaccttcacctctggctaggaagttgtagcacacaaacatcctcatgtttgtgtagtgtctagattgttcccctgacgatgttaaatttagaatcagtgtttcagtgatgttactattactcattaaattcgacgtttagattttaatccctcaaattacatcatctgagaaaatcaatggtaagtatcagtagcattccaaactttcagctaatatccattttccagaaatcaatgtttagaatatataattcaaagtaagttgttttatttaggacagtcctgaattaacatgtcctctttctggctacatttgcaaaaagggcatttttattcaaactcttctttatcatcttaatgttagctaatcttcatgttaacggacaagttagttaacatacactcttagctcgtatcatgtcaggatagaatgatgtggtgcgatattggtcatctttcatgcatcagtttcgtaggtggtttggtacgtagacttaggcattcctacagttttactgacattcattttgttgttgtgattgttaaaaagaacataagctcattgtcaaatgtacatctgttggttttgcctcttgctttgactaattgctgggccttttagaactgggggaaagaagtttgtaacatttgcctaatgccctgtgcagaaataattagaaatgcagaccaagccgaaagcagcacctccctacttttcttatatcatggcacatctaaaacattccatgtttgttcagcaccctgagcttaacaggatggagttgcttcagattggtagcaacaggcctggggtttccactgtctgaggccctgcccagcaacccttctgaactaaagagatcaacatcttggcacaaccatagtccactgctttgctatgccagttgggaagctctgcccaaataacctgtaagatgtatctacattgaagacctagttttattttatttacccttaaggaaatataataataggcatcaagtaataggataaggagatttttgttaaagcatcatagacaccacaccattggccagtgggagttgtagagtctgaagtatagttttcttgcctcatggctgggagcaaattgaatgactttttgagatttttttcaagcctaagatttcatatcttatcaaacaggcacttaattttcagttgtaaccctatggtatcttatagaatgccatagtgttccctagaatatggttttgaaaaaattattcctttggtgatatactgttgagctgcctacactgtaatccttttcagtcaaatgtgatttctcctaacagaagaactaattgtgatttatcatggtaagccatgtatatatgcactaattagttctagtgtgtctactgtgcagtttggcttttcttatcttaaaaaatccaagtggaacatttgttgtagatgcccttctgttcagtacagtggatttgcttactctgtggctggtgagtgagactgagttgctagatgccagggctggcaggttggctctgctttatcccttaccctggcagccaactcctaaattacatactgtggcctctgaagggatgtaggaaagaaaaggtagctgaatcaatctaaattcctgttgaagtcaagggaaaaaaaattaaatcacacttcctacagtgtcatcatgttttgtatttgaattataccataatttgagagaagtgggacagtgtggtgaagaagacctgttctgctagatctgcctgttattatagacaaagaccagattgaagagaagggttacagaggtatgccagttgcagaactgacatgaatgcttaagttttatttattttcttgaaatgcttaagtatttctccatgttaagtatatgaaatgatataatgaaatgatacaatttctccagccatgttctgtgtttcacgtctgatgttttcttgtctggataataaaatgtcttttcttctcattttaccctatatagtctgtattcactagaatggcagttatgaaagccttgaataagataaaggaagaggatttccttaagtaagtagaagtttagaaacaaagaagcatcgtgaaattttagaataaagggaatgttagagataagctggattatctctgaaacaagatgatgtatttcaggggccaggattgtgtcttagtcattgttatctctccaacccatggtgcagtacctggcatatgtggtgttcagtaaatgtttgtcaaattaatatcaagtctaacgtcttttttttttaaaaaatacttatttatttatttatttttttgagacagagtttcacttttgttgcccaggctggagtgcagtggagcagtctcggctcactgcaacctctgcctctcgggttctagtgattctcctgcctcagcctcccaagtagctgggattataggcatgcaccaccactgcccggctaattttttgtatttttagtagagacagggtttcgccacgttggccaggctggtcttgaactcctgacctcaggtgatccacccgcctcggcctcccaaagtgctgggattacaggcgtgagccaccgtgcccggccgaatcaagtttaacttcttgatcttttagaagagggtagtgtgtccaaagaaggagttgacttgcctaagctagtaatagagtagacctggagccagatgtcctgaaattctagcccagtgctatgcctattacatccttagtcctgtatttcctagtatcgttcatctccagaaaagggagaggaaggctcatgagtttcctcacttgttaaaatatgctaaaataaaataaatgcaataaaccttacattttaattcttggtacattcattttattaaataaaatattactgtaagttttctttccagaagatccttcaatacatttcaaacgatgatgtgataaggggggtagagtcagcagtaaactgcacatgaccatggacagcaaaatggttaaagagcctgaaggggcttccacttcctatgtatggatttttccctcaaatcttgaggctattggaaagtattaggttggtgcaaaagtaattgcagtttttgcctcggaagataagtcctcccgaaggtgaaaggtagcagcagagcccttatttacttagtgccactctcatatgttaaaattgttactccacaggcctgcaagacctgtattgttgcgaaactaaaagttagagagagacttgggctctgtgtatgtctcagacaatgctgattcatctaagttttgtgattcaatattatgtctggaaaatagctataaaatttattttgttttgcaggcagtttccttgtcctccaaactcaccaaaggctgtatgcgctgttcttgaaattgaatgtgctcatggtgctgtttttgtggctggtaaaatatttagtctagaatatacatacactgtgaacgtactctcctttctaaaaactcagctgactcctgttctattttattcttattgttgttattagattctaataagtttactctcttgagaagtagaatcaatagccaaacttattttaggttttgtgggcattctaaaggatcacttaggagatcagttattttaaatgccatgccaaagggaaatgacacttcctaggttttaatagttctcatcagagatggccaagtagaaatatgggtagatgcagagacccaaaactggtttggagaaaaacagcaggacagaggctattttataacataaaagcaaacttgaaaaaataacttattatctccaaaatgactaaacacttggcttccactggaaagaaattgttcattgactttcctaaaaggtaatctggcagacaaatttttgtttgaaagttacaactgttttatagtaatagctgaagtgaaattgctcttcagccttgactataatatcctatcctagggcaatgaaagctacctgccttactgtagctttactcatcaggtgtaaaagcaagtttggttgcgttttttttttttttttttatccttggtatattcataatattatataacttgtttagtcagccaatcaaattaaatatattgagcattcctttcaaactcatttgatgtaccattcatatcatatatttacccatctattttattgttactttaaacctttttatttaattatctacatgtatatgtcccaggtctccaaattggattgttagttaggtaaaggataggccttgttttatatcgtagcacttaggatattggcccttatagttgttgcttctctttttatcctaccatgttaattactccattccatccaggctatctgattatttctttctcagggagatataataaatactccaggaatctaccacaaactccttggataattgatggagaaaggaagctggaatcttcagtggaagaattaatttcagatcatctgttggcagtatttaaagcagagagtaagtgttacgatcttcatacttttctttctttttttttttttttttgagataggggcttgctttgtcaactaggctagattgcagtagcacgatcacagcttatggcagccttgacttcctgggctcaaacgatctgcccaccttggcctcctaaagtcctgggattataggcatgagccaccccacctgacctaatcttcatattttattctctctctctttttttttttttttttttttgagagagcctgtcacccaggctggagtgcagcctcaatctcccaggctcaagcaaccctcccatttcagtctcctgagtagctgggaccacaggtatgcaccaccatgctcggttattttttaacatatttttagagattggggggtctcactatgttgcccaggctggtctcgaactcctgggctcaagtgatcctcctgcctgggcttcccaaagtgctgggattataggcatgagccactgcacttggccatatatttaatacactgacattcatgaatagatttcttgggggtggcaggaaagatttctatattttgttaatcactaccaagtctgggcctcttggccataggcttcctgtgcctatggcatcatgttctgggtgccgctggcctgggctggatttcagccaaggcactcgagaatatctgcctgtcctctctcaagatgattgctctgccgagtgcagtggtgcgcacctgcaatcccagcactctgggtggctgaggcgggcgaatcacttgcagccaggaattcaagaccagcctgggcaacatggtgagaccctgtgtctactaaaaatacaaaaatcagctgggcatggtggtgcgcaccaatagtcccagctacttggaaggctgaggcacgaatcgcttgaacccaggaggcagaggttgcagtgtgctgagctcgcactactgcactccagcctggacgaaagagtgagactctgcctaaaaaaataaaaaataaatttgaaaaatgactgttctctcctggggaaattcaaaacaactgaaactactttaaatgaatgcacctaagccctgaccttggtacacctcagccttggcctctttgggggaatatgaggaaattaaaacacatcttccacatccagtgcttcttcaagagtaatcactggcaagtgtttggcttctctcttaacctgtaaagtgtcctggaataaagttcaggcctagagaaagtaaatcaacagcagccattttacaaagactgaatggcagctgtaatgtttttgaatttaggtattaacgagcccaggttcatgggatgagtcaggttccatcaggtttatgttttccttgtctcaacaggcctgtcaggtcaaaggcagcataatgtcttgtgatttcaattgcaggaaatggtgttacacgtcaggaaaaactgcagggcatggatgatattactctttggaatgaggctcctagtataattagaaaaccttttttttttgagacagagtcttactttgttgcccaggctctagtgtagtagtgtgatcacggctcactgcagcctttagctcctgggcttaagcaatcctcctgcctcagcctcccaagtagctgggactacaggcatgtgccaccatgcctggctaatttttttgtattttttgtggagatggagttttgccatgttgccaaggctagtctcaaactcccgagctcaagcaatccatctgccttggcctctcaaagcgctgagattacaggcgtgaaccaccacactcagccagaaaacctttttgtgacagaccagctagaaatccatccttctctctgaaagaccttaagataagcatgctttgataatgacaaacacatggtctagatgagacatggctgacccttccagctccctgacttgcaaggaggaaagagaaacacttcaaaccacatccctcttataatttgttgcctatcacagaggtggcccttctttaagggtctttaagaattgtttactgaatggaaaaaagagtataccagcaccctaatattttccaaaatcttagcagtaaagaccctgggctttgccatgagcttttacccgcttaatttggtatttacaaatggattatcacataagacttatgcaggttatgaagggatgaaaataaagcgttagcacaaaaagtttcatttggattctttttggggccacctgtcacgccaagtgtcaggttccagcccaagctgaagaccgagaggagtgggcggatgagtggtgggcagctgaaagaacacttaaggaatcttagggagttttggacatggctttattctctctctctgggcaaaagcccaggcacgagacatatgtacagcatcagcagggtagttataccttttacagacaatagtggctccgagccaagcaaaagttcatgtgagtgatcacctaatgtgcctcacgtggcatggttacataatgtgtggggttgtgcacctgtgcaccaaacctactgagtcatgctgtgctggaagcctgcctcagtctactcctgactaaaacacagccatttcccttatactccaccccctgggctgagggtgtcctctgggcagggacacacggccatagggcagagccctgagtccataactcacaacaacaatacagagagcaacagatcaccactaggatcccagctatgctacttatgtctaccagggcacagcgtaggctagagcctagggatgcccgccatctctgcagggggtcatcagtaaaacccttgactgtcttaatctcccgtgagacccattgcagggctgcttttacgttctgccgattatctgggataaaggtacagcaccgtgttatgtttacacaggccgtgacaggtagccatcccagtggtgttaacccagtgttgctctgggcaccacagtgcctgggctgggggtactacatgttcccccactagccagctccacccatcataaatgctatgagccagccagggggcaggtgtgtcatgggtcttgcagcatcctttgtccaaggcttgtgcatcgcgttccaggcatcagcacacgaggaccactgcagattagctgaaccacttatagttcctgatcattcttgcccttgatactgtttcttagggggatgagacaaggcataatgggagttgaaaaaactcaaccaagttttaagcatgtattttctaatacttaagggagtggcttcttttccttttttgtcagctgctatttataattgcacactaataagttttcaggtttacctcccaggtttctctcactctggagtccaaggatgtttccttaattttcaggtttgaaacatttttctttttttttctttctttttttttttttttttttttttttgagatggagtctcgctctgtcacccgggctggagtgcagtggtgtgatctcggctcactgcaagctcagcctcccaggttcacgccattctcctacctcagcctcccaagtagctgggactacaggcacacgccaccacacccagctaatttttttgtatttttagtagagacaggtttcaccaagttagccaggatggtctcgatcttctgacttcgtgatccacctgccttagcctcccaaagtgctgggattacaggcgtgagccaccgcacccagcctggtttgaaacatttttctaaaagatcagtaaatatggcttctcctttagtctgaatcaaatgcttttgtggccttctcaagggcctagctttctacacctctttcttactgatgggctggaatttgtgggaagttttatggctgacttatgaatttaagatttctgctccttcagtaactagtagacttatttctttgaggcctgttcattcccttcacccctgccagtcacaggttcttgttcagtcactgtggacaccctgttttcctgacggggctgaccgggagacaggggtgggcaggtgtaagacaaatcctagccccaaggagtctgcatcttcagcttcccagatgccctttttgaattcaccattgaactatggccatccatctgttgttagcactacaggttgagtctgttgactctgattagaagataccgatattgctatggatttattagtaacttcacactggagtgtaaacacagaagggagagttttttgggacttagtggttcacagactcctacatcctgcctggcctagttctatatctaaaaaagttgttgtgtaagccccttacattttttttttttttaattttctccttccaatatttgcagcttttagtccgtgacgatcaacttatcgcagagcatacgctggttctgtcatggtcccagctttggtttcatgacatgtataatcatatataatgaatttgcttcttagagtcaaacctttttttccctccttttcctttcatggtgtttaattcttaaataatgactgtttttgctttgttctaaggaaagaaagaaagattatagagttttcaccatacgcttatggccagaggggtggtgggctcttcttccaaacaggactctgccttggcgttcccatgggatggtagttaaggttggattttaacgtcagaaacacctagctctgccatttacttgtgtgaccttgggaacattacctaacttttctgaagcttggtgttcttttattttatacctactttataaggttataataaggattaaatagtacatggtccaggtgcagtggctcacacctataatcccggtgctttggtaggccaaagcaggagaatagcttgaattcaggagttaaagaccagtctgggcaacaaagcaagacctcatctctacaaaaatttaaaaattagccaggtgtgctggtgtgcacttgtgatcccagctacttgggaggctgagacaagaggattgattgggcccaggagtttgaggctgcagtgggccatgatcacgctgctgcactccagcctgggtgacagagtaagatctcatttctaaaaataaataaataaataaataaaatttaaattatatatataacatttttagtccaatgcctggcatataataagttctcaataaatggtgtttactattagcattactatttttagtagagattgacattagaggtgggatgatgactctccctggggattctcctatagattgttcaagaccttcagttgggtttctagcaaaggttgggaatgaatatcttagagctatgatgtctctaatttttttttctttatctgcttttcaaaggttttaatttttcatcctctggaagagaagatgtagatgtgagaacattaggaaatggtaagactgcaacagcatcacctgattagaactaactttctgattatcatcctttctagacagcaggcttagcatagtcactcagtgaaaaacaaagtgagcaaggcccagagcttctccaagggaggaagctttgtggattatggaggcccctttatgaattatatgaaatacaccttaacaggaatcatttcttcagaggccatcctgattgcatacctataggttataagggacttgcatgtgcattaacaaagaggtgcttgattttttttccaaaagtttgattattaattttttcatttaataacatttcagaaggaccagtacagttttcagaatgtacatcttcatttaaaaagtgattctgctgtcttaaccttcatgtctctcattttaccctattgcattaccagaaagatgatgacatttaatcctgaactgtttgaggcttatagttccttcctctcatggaaccaaagcttttccatttcactagtggatcaggctagaaggatggatttcaacagggcattgctgcatgtgacaactttacattagtgtaactaagttaattagtggttatttaaactgtgttttgtaattaacacaggcttgttcatgggcctttggggaagcagtcattttcacatattgcctgtgctggggtttagcagccctgcaaaaagccccttgattcttctcacacattcttccctccctcagatgtagtcatgtcactaaactttcagtcctctagagctcaacccacttttcacacctcctaaccctcttgcattagcccaaatgttaactccatcaacacgtttctgtttcatgacggggtgtgtgctgccaggaaggccctttgcaattgagctggtgaatcctcatagagtacatttcacttcacaagaaattaaggaacttcagcaggtaaaccacttcatgccatggaaatcgtcatgtttctgcaattctgtaactgagctagacttgctaattgtttttctttttctgctactacagaaaattaataactcatctaacaaaatccaagtacgtgacttgcagcttgtcacaaggtaagagtaggctcattggagatgatttcaaaagggacgttttagttgcaggtcacatatcttgataagggaattgcatccagaatatataaagaactcttaacaacacaactacaaatggggaaatgattaagtagacatttctccaaggaggatataggaatagccaattaacatatgaaaaaatgctcaacataattagtcattggggaaatgcaaatcttaaccacttctagatattatatatacaagagaaatgaaaacaaacatccacacaaagacttgtacatgaatatttataatagcattattcacaatagcaaagaagtggaaaactacccaagtgtctatgaataaacaaaatgtgatatatccatacaatggaatattatttggtaatgaaaaggaatgaagtcctgacacatgctgcaagctgggtgagccttgaaaacattatgaaatgaaaggagccagtcaccaagcaccacgtactgtatgatttcattatgtgaaatgttcagaataggtaaatctatagagatacaaagtcagttaatggttgtctagggctgggggagaataataatgagaagtgacactaatgggtacaaagtttctttttcagggtgatgaaagtattctaaaactagattgtggtaatagctgcacaactctgaaaacatactaaaaatcattgaattgtacagttaaaactgggaaattatatgtaaactgtttttaaagaaaggctaattcagggcaaggtttttttgtattttgtttatttggacaaacttctaaaaattgtttttgtttagagaggcaataggacatatgaaagaaggtgaagaagaaaagacaaagacctacagtgccttaatttggacaaataaagcgatacagaagaaagacattgaattcctaaatgacataaaggtagtttaagtgtgcttattctttttatttcatttttctgttgcctatcaaagatcccattgtcttctaatttattactagcaagtcacagggcatgggctttggggtcagcaagacctgggttccaagcctggttctgccactgactagctgaaggactgggcagttcatctaaccccctggagcggcagcgtggccagtggggaagacccccactctgaagacagtttgcctgggtgcaaatgctggatctgcatttctgagctgtgtgactttggacaagttacttaacctctttctgcttcaatttcttcatctataaaattagttaaaataattaaatgagtttaattagataaagcacttagaacagtacctggcacataggaaacacttggcaatgctattattatctttggtcatttgtcaaaaataaatataaaatagcacttatctaatagaactgatgctgagattaaatacatgaataaaacacatgacaatatatgtaaagcacatgcattttgccacatgtgacattttcctatacctgagcatgtcatggtagagtgcctgttcatgtgcatacttcttgccatctgcccccacctcttcttataaaaatagtttactttctttttttcttttttttttttttttttgagacagagtcttgctcttgtcgcccaggctggagtgcaatggcacaatctcagctcactgcaacctccgcctcctgggttcaagcgattctcctgcctcagcctcctgggtagcggagattataggcgcccaccaccacacctggttaatttttgtatttttagtagagatggggttttgccatgttggcctggctggtctcaaactcctgaccttgtcatccgcctgccccagcctcccaaagtgctgggactacaggcatgaggcaccgtgcccggccaaaaatagtttactttcaaatgcaaggaatgagcatacatgggcacagagatgcatatagttaccacattgtttaaataggcaatattttgcaacaacctagatgacctactagaaggaactggtttaatattaatggcttatctgtataatggaccactactattcagccattgaaaattatgtggtagataaatatttattgacacaggaaaaggtttctggtaagtgctaaggaaaaaaataaaagtatagactctatagcggatgatatgttttaatttaagccagtggttcccaaccccctggtggtaccagctggtgacctgttaggaatctagccacatagcagaaaatgagcagcagatgagacagcaaagcttcatctatatttacagctgctccctatcactcacattaccacctgagctctgtcttctgttccctcagtggtggcattagattcttataaaagcacgaaccctcgtggaaatgacacgtgcgagggatctaggttgcatgctccttatgaaaatctaatgcctgatgatccgtcactgggtccctcatcatccccagattggaccctctagttgcaggaaaacaagctcagggctcccactgaatctacattatggtgagctgtaaaattatttcattatatattacagtgtaataatgatagaaataaagtgcacaataaatgtaatgagcttgaatcatcccaaaaccatcccctccttcctcagttcatggaaaaattgtcttcccagaaactggtccctggtgccaaaaaggttggggactgctgatttaagcacacacaaacgcatatatatgtatatgtatacacatatagaggattgtgtagaaaacaaattgtatggcaaaagatacgataaataggatttatacttatcatgaaaaatatgaacacagaacaaataaaaatagacaaaggatatgaaccagttagctgcaaaaagaacagtggccaagaatcatttgaaaaggttgacgtaacactaagacatcactttattccccttagactaataatacctatcagtgggttggagtggaggagagttctcagtagaaatgtagtatttcagcctttttcaaaaacaacatggtaatgactgcaaaaatttaaaatatactgaactgtcctgtagaaataaaactccagtgcataagaatatgtacatggtgtttaagggctttaagtggcaaaatcaacaacaaaaagactgggaacaaaatcagcgtccctcaataaggaaatggtagagtaaactgggatattatacagctattaaaaaaaacaaaatcaggccgggcatggtggcttacacctgtaatcccagcacttcaggaggctgaggtggttggatcacttgaggccaggagtttgagaccagcctggcctacatggtgaaaccccgtatctactgaaaatacaaaaaattagccaggtgtggtggcgcatgcctgtagtcccagctacttgggaagatgaggcatgagaatagcttgaacccagaggtcagaggttgcagtgagctgagatcgcgccacagcactccagcctgggggacagagtgagactctgtctcaaaacaaaagcaaaaacaaaacccagcatatgaccctatttaatttacatgttagtatgtacatatgtgcctaaaaatgctgggaaaaaagatagacgtatgtctatatctatgactcataggagcacttatgacatgagaaaaaaagcaaagtgcagaataatgtttatagtgtgaatattttggtaaaaacacacaaatcattcacctgcttaaagaaagtcatttataaaatgaggagatggactagatcatctccaatggcctctccagttcttagatctgtgattctatagctaagaccctttggcttttggccatactatgtaaggttctttggatggtagttataatatagacagatatctttaagattgcaaaatgaatttttaaatttctttatgcctttcacatgggtcgtacaagtcattgagaatgccatgggaaaaataaactcattaaaaaaataggttcatagtttgagggtagccatagagataattcagaaacaatgctgaggccaggggcagtggctcacgtctgtaatcccaacactttgggaagccaaggcaggaggattgcttgagcccaggaggtcgaggccacagtgagccatcatggcgccattgcactccagcctgggctgaaagatgattttcataggtacagactaagtggtgaaagggtcttttttaatggtccatagcctaagtagactgatgcaactagttgatttcaaataatgtttttagttttccagttggcataaaaattataaaaactgactaaattccccattctgagaaaaagtcatttcaaatttactacttatcccctcttcaggagcatcttatttctaaaaaaaaaaacaaaaacaagcgtatgtgtgtgtttgtgtgcttctgaaagctcagcagtatgggagcagcggagtgcaatgttagaataaatgaagtggtttccttttgtcaactaaaaacaaacaaaccaaaaaagacatgtggctcgtggtatttccattgaccaactgtctcatggtcaaagtactgggaataactctaaaggtaaaggaagcaggggagaggactccatagatagttgttaatttaaaggcctgctgtttctctaaagtggaagccatgtctttatagatttcttcacagttcagccttatcctttatttatgtattttttttttgtctctttgaccagagaaaaatcagatcttatggagacagcttatctcatcaggacaaagtgtttctataataaaatcaaagaatcataaaaaccacagagttaggaggagccattgactcaccactttggtaaaagcagtcacaccctttcaaatgcggtctttgtcagaacttgctcttttcttcttggtggagaacttgatagaggagagaccagacagaaacctttctttcttagcaggccttccggcactcaagaaccatggaaattaggaagagttgttccgacaagaaaatgcagaggattcagttcttatgaatctgaatttctgattacgcccaatttttaaaacttggaattagttgaccttttacagcgttaacctctatttcttaatttttatcttgtgacataaaagaaaatctctaacgaattgtgagaaaaacaagcctgtgtccctaaaaaatctgaaatgtaaaaagacatgcggtattattagttgcaagctgggctaacaaacattgaaaggtcccggtttattatgcacatcgatttgtaattattatattgaaatgtcaccctaaacaagatgtattcataacttttccagacatatccttttgtataacccttttccttcaccaaaaaaaaaccaaaacaacccacccctgacagtaggtatgtggttctccctaaaacacgcaaactcgacggggcgcagtggagcacacctgtaatcccagcactttggaggctgaggagggcagatcacctgaggtcaggagttggagattagcctggcagatatggtgaaaccgcatctctatcaaaaaaatacaaaaatcagccgggcatggcggtgtgaaatgagtaatgatagactgggttatgagaagtcccacagagtttgaacctaaggggacacaattcattttagttctctcaaggaagcatctgtggtgagctatggatggtgagggaagggctaagacaggattcactgggtggcaaagctctgactctgggactgtgtgtcatattctcccctaggacttaaagatcgaccagaaaacacctttgcgcgtccttcaccgaaggcccctggctgtgcgagctcgcgtcattcacttcatggagacacagtacgtggatgagcaccacttccgcctccacttgaaaactcaggctggcacgtatccttccacctgctgcactgccgccatcgaaccagaactctattggaaaagttcatggtcccctagaaaacagggtcagcttggtctgggagggattcgggaaaggattatactgaagaagaatatttttgtttgtttctttgttggatgtggttttttcccacttaattttctttttcttttcttttcttttttttttttttttttttttgaggcagagtctcgctctgtcgcccaggctggagtgcggtggcgccatctcggcttactgcaagctccgcctcctgggttcatgccattctcctgcctcagcctcccgagtagctgggactacaggcgcctgccaccacgcctgactaattttttgtatttttagtaaagacggggtttcaccgtgttagccaggatggtctctatctcctgacctcgtgatccgcccacctcggccttccgaagtgctgtgattacaggcgtgagccaccgcgcctggcctaaatttgtttttcaaaatgattctaaaccctgaggtagcagtcagttcaatgtcagctttaaagttatgtttcctataattgtagtgtcttacacaatgctgagcacatagtactcagaaagatggattcatttgctgtcttgacattttttgcaagtcacgtatttatgaccatatttgggtcttttcaacatttcaagtatttgcctcagatgattaaacacaggtagtagatgggaatagcactactttacatcaggatctttacttggccactggcctagtacaacagagaatatctttgtctacgtgccttgtgaaaaaaaaacaaaaacaaaacgattcagatgacatatcattagttagttagcaccattttcagactgcaaagagctttgactgtgttacagaaaggttgagattcagagttaaaatatctatagtccaaggctgataatttgttcgtaatctaacctgacttgtatgatttttgtatcagaactgagtcgctgattaaaatatatcagggagctccaataggcttagctttagtttactttttgaaggtcttcctagtttttgtttgtttcttggttttatattattctgtgatccaatagcatgaagtgacaaaataccttctaactggtatagaactaatgtactattgtatgtgtgtgtgtgtgtgtctatatatatatatattacacacacacactagatatatatatatgggaaaaaagcaagttttaatcaccaaataccattcttactatattgctgtaactagtctgcctgtccttccccaccagcctgcattcacttcttcccctgccccaccccaggacctggatttactcagctaagccaagtataggttatctactcttaaaatcttctaaattttgtaatttggatcaaaggatgatcaatttagactccagtggacagatctttgtatctttgttgtttggagcatatttgcctatcatggatggaatttcaaatcatgtatatatttttaaaagtcttcttacctaatcctggcctttagttctggtgggccaaggagaaatgtcttttgtagaatttgatgtcttttcaatcctattaaaacatttttaggacaagccatgtacatgtacttaaggtattagccaagaaagactatgtgttaaagctttagatgccacatggttatacacagaagtatattaatttttcacttactaaatttactttatatataccttatatatttacattgatcactgcactgagctagctcatttgacttaaaccttgtccctctggttaggaataagaacctctctggacattttaactggttattctggggctatttggttttctctcctcatcattgctacgcagaaggggattctttaaagaaaatgagagaaaatggataataattgttgggtagttgtgagtttaccaaaaaacacagttactagataattatatgtcttatgctttagtcaaaacatttggcaaaggtagagtgagtaaaacgttcagaaagtgaggacataatatcagcatattataatatagatttttcatcatctggaaacaaatttatttctctattcaagttccattaattattttctactaaatgctggtttgtagaacaaaacataatgctgcatttttaccaaattctggcaaaaacaaatcttttagataaatattgtcaaagctgcagtacagtcctatgtaaggaatgttaatcttaaaaacaaattctagaattagttattgatttcaaaatttgaaatacaattttgagagaaatacaaagttgcccctttaagaaagagagagagaattaacttagttcttttgctaaccatgttagcaaactagacggtaggtctttggtaatccttccgaagagccatcattaagactaaactaatagtctcattattccttccaccctattgcctctgggtcatgttacaaggaatgccatcattgagatcactctctgtgtggctctgtggaaacctaccatctggcaggtgacagttgccattattaaaaaaatgggactaacaagataataacatagaaattgtggcaaagttgttttttaataaaagcattgagctatggttaatttttaaaatccacatccaaaccttggcacttggagatgagctataaagaaaaaagaaagtaatgatttttggtaagtttgatgtaaacacatttcccaggctctgatgttggctgccaggctactagggaccacattgccaaagcttattttttaagacacacaagtcagagctcagaagtaacctttcttttgtaacatttctgctcttattattatttttgcctgtcaaatcttaccaaatagttggtacagcatgctgtcttcattttttccttaaacaaaccccagctacattaaagagtttgtacatggagacttcgggagaaccaagccaaacattgggtccctgatgaatgtgactgcagacattctggagctggatgttgaggtaaaccattttgttgtggaatgcacattggcaaattgaattcaaccaaagttatgctctttggcattaagccattttagtatcacccacctccataggtatttgagaatggtgaaaatctcacagtaacattgtattgaagggagggactgtcttcggatttttttttttaatatgaggtctcatttatgttccttgaaaatatatagctaatttattaactgtgctttacatgtagtatcaaatctaaacccttaaaccaagcaaggaaatagtcatttccatacctgttgcgttttataaagactttaaagcagcatattcagaaacatggattcacaagggtagaaagtgaggtgagccaatggttcttcataaaagcagttctataaggacccctgtgatgtggtccaagttctctgctcttacagtctgaattgaaacaaggttaaattctaaagtaattgtaagaatggttctgtcgggcaagtctccataaatatttcatttgagtatcaataggtgttgagtcacgagtggtgtttcttcatgaaaatctgactaggaatagagtacctcccccgctcctctccccagaatcttaggacttggggatttgtacttgggaataatatcaaagttatagaaagaagtgggcatagttgcccaatgtgaaaacatctatggtaatcaaatgatcactggagtattacttccttaccagcaattctctcaagtgctctgggattagattagctcctgcagtacagccagtgatcgtgccctcaaggttgcagggagcctcttcagtgaaactatcatttggaggaagaaaaccttctgttaaagaaaatctctactcatcatctttttttttttttgagacagggtcttgcactgtcacccaggctggagtgcagtggtgcgatcacgggtcactgcaaccctgacctctcgggctcaagcgatcccctgcctcagtctcccgagtagctgggaccacaggcatgagccactatgcctggcgtttttttgttgttgttgttgttgagatggggtctcaccgtgttgcccaggcttgcattaatctttttttaccttaattctcagaacagttaggagtgtcaaagactcacaggccagtgtttctcaacactgactgcccactggaatcacttgtggagctttttaagcactacaacttgcctcccctccacacacacacacacacacacacacacacaagattgtgatcagtcatgttttattttcagcttgagaaaacactcattaatttacatttgggtgtttggtatatggctatattctgaaacagaacaaaaatatcttcttgagatttgtaaaagacacacacacacatagctatttaggcttttctaataaattttttttgaagccagtacgtgaagtgactcatggattaatgaaaaaattttcagtaaataattttatgttttaaactttaaatgtcaataaaagccacagatagatacggtgggttttttttttttttaactttctcttaaagtagatcccctagcctttgatagacctggtatgtgtttatgtggagacaaatagtctgtttactgtaatttcattctgactcaaagatcaaggttttgtcctagaagaacaaaataaaggtaagtagagatagatgaactggattttaaagaaacagaaattctacagaactgaagcacaaagatccttaatccttttctggttccaggtcatctttcataatcatttatttcacattttgttgctgtgttacaacaagactataggcttatagactacttgaatatttgttaaatgcaagatgagagaataaaaatgatcagaagaataaaagtttctgagacttctgagggaaaattggtggtcacttgaatttgtttgctacttttacccataaatacttttttttttttttttttttctgagatagatagggtctcattctgtcacccaggctggagtgctgtggcgtgatttcggctcactgcaacctctgcctcctgggctcaagctgttctcctgcctcagcttcctgagtagctaggactacaggcgtgtgccaccatgcttggctaaattttgcatttttagtggagacggggttttgccatgttggccaggctggtcttgaactcttgactttgagtggtctgcccaccttgatcatgttgatctatataattgatcggcctcccaaagtgctgggattaaaggtgtgagccaccacacctggccccataaataccatttaaaaaatttaaatgtattctcttatcagtcaaaaagcacagttaataaccaactgagtagccaaatactgctactcaattaattcagaagacctcaggcccaagaatacctagaacagacttgagggttaatttatggtattcaatagctcttttcttcaaatgcagtttcttctgttgcactatattaaaactattaaatttatacagcattaccagcaaatgcttaccacaacagtaatatctgttttaatgacttcttttctcccttctagtctgtagatgttgactggccacctgctctggatgactagctttcaaatttggagacaaagagtatggttttcctggcatgatgtggacatccatggagcacatgccgtaaaatggctgtttacccaccataacggtgtcttgaaaactatttggatcatgttgatctatataattgttaatttgttgtaacatctcaggatctatatatgtgtatattttgtgttaaattgttccaaggatgtcttaggatttttctcattccctctttcacccccacaaaccaaactatgaataatgaaataattctccttaattctttcatttagagaggtgcacaaacaggacacattctctgttaacctaagaagctgtaatttcagcaagatttccctccacaagagatataccacctttaaaatcatgttctaatttttgtaaattatctgaataaaagttatatctagatttatgcagcataatatcctataatagtctaagattgcaaatgcaaatctgacatcattattttccccaggaagcctcaaacaagctattaccaatgaagttcttttggctgtgatttgtcataaatcttaaccaaactatgaataatgaaataattctcattaatactttcattaagaaagaattttgacaatctaaaattgtcaatataggtttcctgtggagggaaagtaaaaccgtaggagccaaggcatgccatggtaggagcctttcataaatcttttaaataaggagaaacaagtgcctttaataacttcaatcccagggttaagaatttgaaaaattgagattgctaaacaaagacgaactggtattatttcagaatgcttcaatatattatccaattataaacattttaataataccttattaaagtagataggatattgtctccattttataaatatggaaaccaaagactagaagttaaatgacttatccaaaattgttagctacttctatattgaggactagaactgaagtttcttggtttctagggtctttctaataagccctattactgagcacctgtttgtgtgaaggggcagctatggatgccatttaaactcatgtaactgataattaacttttggaatgtagttaccaaatcaaagagcttaccaaaaaatagcccaagactatttaatacaatcttatatagttaccatttgttattaagttaaacctcagttggtattatgaagaggaaaaacattaagctaaacctaaaaaaaatgaatgggtcatttaagtttcagaaaggagcctcattacaatttcagatttgagtataatttccatcaccctaattcaactatttgagctttttttaagaatacatgtgacttgactagtattagattactaaccatttcccatctctatattaaacataaatcacagataccaagattcactttagatatgaggaaaatggttttaatggacacaaaggagtcagccacgttggaaccaacatagtttcataccacgttgaaaccatgtgtttgatatgcaaataacagcaaataattttttcactattgtcaatgccaatgcattgaaaggcccagaaaatgagaaaaggataacaaacttttgataaaaaggtaagaatttctgtgtggatgttcctcagtttctgggaaaattttgctacaaaagagatttaaataatttaggaggcagtcttttgcatggtatttttggcttacctttgaatctagtggacctgtaatatgtaagaatgaagaatgtgcttagcaaactgaaatgagaagacttctatttcttaaatttctattcctgagattatataaaatttcacgcaaagagtaagcattagctttaaatacttcttccaaatgttcctagaattttgagacaaagattgttaaaaattaatgtatgtctttgttttaggcagaactggaaatattaagtagtgagagtactatagtttcccttttgcctacataaaagcattttaaaattagttttatgatttctttgtaagctttatttaaattcaaagtctttttcataacacttaagagaaagagccctttgtacttcttagtatctcttatatagtcccaaatatagtctgtggtttattttaggaaaaacatcaactctgaatacctggaaaagtcaaaagaaaataaagttggtaaaatgaaaaatgtccaagtaagaaaaccggttacatttgcaagttatgtgaagtaaatttagaagttaaatttccattttgtaagagaaaaacatcttacttggcaaatcttttcttttggagctaattattctttgatttttaagtccacgtaagagaatgaactttgatatcagcttttctgattttttaacaaaggctacccttgtttattatgaaaaatattacttttatgattctattttgaatttttaaattttgaaataattccaaacttacaggaaaagttaaagtacaaagaacctttttccctgaaccatggagccagtgctgcctcatgatcttaaaggcttcagtgtgtaatttctacaaacaaggacattcttttacttaaccacaacacagtgatcaaaaccaggaaattaacactggtatattaccatctaacccacagaccccgttcaagttgccagttgtcccatcagtgtccttcatagtcaagtgctcacattgcattttgttacgtctctttagtctccaccactcttaaaagaagtttgtctttcttgactttaattactttaacatttttgaacacttcaggtcagttattttgtagactgttcctcaatttgggtttgcctgatgtttcctttttattagattcagattgtacctttttggcaagaacaccacaaaagagagattgtcttcttgcatcttatcaggtgtcacacagttttgatttgtccagttgctggctggggctttggtcaattgattaggtattatcacgaggcttctccacttttatggttattctttttgccccttgtagttaataagtatcttgtagagagatcatccaactttcactcactagttttagcatccattgaagatgttcacctgaatcaatcagtaccacaatgattgccaaatacagattttctaattccatcattccttttacatttgttggttggcattaccctaaaaggtagagctttcccttctctccaatttattcattgatttatatcatgtggacttgtggcttattttatttgagaagttgtaatttgttcgtttggccagtggcgaccccttcaagctggcttctgtgtcctttggtatgtccccatcattcttggagcatgttcttactttctaatacaaaaagacattccatgctcatctttgtatttcctctgcactaactctgcaaggtgctttttctctaagatctggtctcttttagcagaaaatggtatttagaaaccaagatctgggcagtaggtatgctcattgtttggtgccattgctgttcccaagccctctcatggaacagagctagggaacaaacatgaatgcatgtgcatgcacacacacacacaccccactcatacacacacacctatacatctctgtatctacacataccgaaagctgtaggagtttataccagtacttccaattccaaccttattctagttttcaccctttccaaatttgtaattctctgactataagaaatctggctcctgctctttccctgctgccactgaattgtatagaggcggagtctcgggtgcattcaagatccggcttcactcgtaacccactgccatggccgaggaaggcagtgctgctggaggtgtaatggacattaatactgttttacaggaggtgctgaagaccgccctcatccatgatggcctagcatatgaaatttgcaaagctgccaaagcctcagacaagtgccaagcccatctttgtgtgctgtgtgtgcttgcatccaactgtgatgagcctatgtatgtcaagttggtggaggccctttgtgctgaacaccaaatcaacctaattaaggttgatgaccagaaactaggggaatcggtaggcctctgtaaaactgacagagaggggaaaccgtgtaaagtggttggttgaagttgtatagtagttacgaactatggcaaggagtctcaggccaaggatgtcattgaagagtacttcaaatgcaagaaatgaacaagtaaatctttggcacacacacacacacacacacacacaaaagaaagaaaaaataacctcaaaaataaccaatctattgctgcctcaattcacagtcccctccctgctgccctcagacattctcctcaggctccacactgcagcccaggaaagaagcccttcaccaaacgaggccaaatatttctttgtgggcagtgttccttctgacatcactgaggaggaaatgaggaaactgtgagaaatatgggaaggcaatttcacagaaagagagtttaaataaattaacaaaaaggaaaaatgaaaaaattaaaaacgacaacaaaaaagaaatatgggaaggcaggtgaggtcttcataaggatgaaggctttggctttatgcacttggaagcacgaaccctagtggagattgccaaagtgggtctggacagtatgcagctgtgcgcaccctgcctgccatagtgcatcccttacagtctgaaaccttctaacaaacttttggaagaagacttttctttggccaggtggagagggctgtagtcattgtggatgatcaaggaaggcccttagggaaaggcattgttgagttctcaggacagcaagttgctcagaaagctcaggacagatgcagtgagggcttcttcctgttaaccacgtttcctcatcctgttactgtgtagcccataggctaattaggtgacaaagaaggacttccagagaagctggttgtaaagaaccagcaatttcacaaggagtgagaacagccaccccagtgtgcacagcatggcttttgaatataagtatgccatgcactagagggtactcattgagatggagaagcagcagcaggacgaagtggactgcaatatcaaggaggctcatgagaagctggagatggagatggaggttgctcgccttcatcaatgccaggtcatgctaatgaggcaggatttgatgaggtgtcaagaagagctgtggaggatggaaaagctgaacaaccaagagatgcaaaaacgacggcaactggagcccatgcgagaggagtgcaggcactaggaggaagcaatgcactggtaatggcaggaaagattcactggaaccttctctgatatgagacagcaggagatacagatgggccagatggctgtgggaggtgctataggcataacggaggcaccatgccccctgcttctgtgccagctggcagcccagctcctccagaacctgaacctatgatgctagattgaccccaccaacaacggaatgctttggccaagctgctgcaacggaaggaattggggcaattggcggaactcctcctgcattgaattgtgcaactcctggagctgaatttactccaaacacacgttgctgatactaataaagctgcagtgtctagtttctcaaaacctttaaaagggccctttttggactagccagaattctaccctagaaaaatgttaagagattcctcccaatagttaggtctaccctacctatactactgtagggagtattttggaggaagagggcaagggaggagtggtatttaacaaaccagttctgtgtggtatattgtttaactgatgagttctctgtggtgcattactgaggtctcaaatgtgactgttgaagacctgggggaactacagtgaaatgaatccagttagagacccattaatcttgatcgttctttttttctccatcctgtttcatttgctttcttatccatacactccccaaccccagagacactgccacatacaccacaaaacacaacctcctccaatgaccttcgccccactgctccattcactcccaggtgagaattcaggcaaatgtccacagaggtcacaaacaatgtacgtatagttcttttatatccgatatattatcccttcttgtcctaaggaagacattttctcttagagactttcatttcagtgtatcttttttaaaaatcttgtgttaacttgcctcaatctttttcttggataaggacaaccaggaatggccgttttgtgtctatgatgttgctgttcacaacttttcttgataggcctagtacaatcttggaaacagagttgctgtatgctgaaggtctgagagtagctcttagccttgcctatcttagatagtagttatgctgtgcatatttaattgatgtactatgtttgatttgttgctgatactttaaatttgaagtttttctgagaaatggagcagcaatgcagcatcaacttgttaaattacatgttaagccttgaaaaaaaaaggagatcacatcagtaatcccagcacattgggaggccgaggcaggcagatcacgaggtcaagagatcaaaaccatcctgtccaacatgttgaaaccccgtctctactaaaaatacaaaaattagctgggcattgtggcacgtgcctgtagtcccagctacttgggaggctgaggcaagagaatcacttgaacccagaagacagaggttgcagtgagcagagatcgcgccactgcactccagcctggtgagagagcgagactcagtctcaaaaaaaaaaaaaaaaaaaaattccctcatcaaagaaaagaccagaaccagacggcttcactgctgaatgctatcgaacatttaaagaactacggccagacacggtggctcacatctgtaatcccagcactttgggaggtttaggtgggaggattgcttaagtgcaggagttcgagaccagcctgggcaacatagggataacctgtctctacaaaaaataaaaaattagctgggtgtggtgatgcatgtcggcagtccaaactactcgggaggctaaggtggcagaattaattcagcccaggcggtgaaggctgcagtgagccgtgatagtgccactgcactccagcctgggcaacagggcaagacccccatctcaaaaaaagaagaaaaactagtaccagcccttctcaaacacttccaaaaaattgaagaggaaggaatgcttccaaactcattttacaaggccagcattaccctgacaccaaagccagacaaagacactattaaagaagaaaacttgtcaattagactgtggcagatatggaaaaaaaaaaaaaagaaagaaaagaaaaagcaaaaagaaagctacaggccaatatttctgatgaccatagatgcaaaaattcttttttctttttttttttttgagacagggtctccctctgttacccaggatggagtgcagtggtacaatcatggctcactgcaccttgacctttcagactcaggtgatccttccacccctgggacttcaggtgcacaccatcatgcccagctaattaaaaaaatatacatatttatataggcagggtcccattatgttgcccaggctggtctcgaactcctgggtcaaaccatcctcaggccttgacctcctgaagtgctgggattacaagcgtgagccacggtgcctggtcaagatgcaaaaattttcaacaaaatactaataaacaaattcaacagcactctgaaaagattaatcaccatgaccaagtgagatttatgtcagggattcacagatggttcaacatatgccaatctataaatataatacaccacattaacagaatgaaggacaaaaaccacacgatcaagtatttgacaaaatttaacatcctttcatgataaaagctctcaatgaattaggagtagaaggagtgtacttcaaaagtaaaggccatatgtgacaaacccacagctaacaccatactcaacagtgaaaaactgaaagcttttcctctaagatcaggaataatccaaggacttccactttcatttctgtttaacatagtactggaactggaagtcctagccagagcgattaggcaagagaaagaagtaaaaggcatccaaattggaaaggaaggagactgtccctgtttgcaagtgatgattttatatatagaaaagctgaaagaatccaccaaaaagactgttagaactaataaacaaattcagtaaagttgcaggcatatcaatatacaacaagcagtagtgtcacaaaatataaaatacttaggaataaatttaaccaagaaggtaaaatatctctacactgaaaactgtaaaacattgacataagaaattaaagtcacaaataaatgcaaaaatatcccacattcatagattggaagacttaatattgctaaaatgtccatactaaccaaagtgatctaaagattcagtgcaatccctgtcaaaattccaatgatattttccacagaaatcgaaaaaacaatcctaaaattcatatggaaccactaaagaccctgaatagccaaagcaatcttgagcaaaaagaacaaagctagagatatcacaatacctgatttcaaaattactacaaagccatagtaatcaaaacatttttgtactggcataaaaacagacacttaaaccaaaagaataggaaagagagcccaggaataaatccatatatttacagccagctgattttttacaaacgtgtgaagaaacttaatgggaaaagacagtccctttaataaattgtgctgggacaactggatatccacatacagaataatgaagttagacccttatctcacaccatattaaaaactcaactgacagtgacctaaatctaagacccaaaactgtaaactattagaagaaaacgtagagaaaaagctccatgacactggtctgggcaattatttgaatatgaccctaaaagcacaggtaacaacaacaaaaaaaagacaaatcaaatgggactatatcaaacaaaagcttctgcactgcaaaggaaactatcaacagagtgaagagacaacttatggaatggaataaaatatttataagccatacatctaatgaggggttaatatccaaaatatacaacgaactccaacaactcaataccaagaaaacagcctgattaaaagatggggaaaggacctgagtagacatttctcaaaagaagacatacaaatggccaacaggtttaagacatgcaaatgcttaccatcacttaccaggaaaatgcaaatttaaaaccacagtgaggcaccgcctcaaaactattagaatggctattaccaaaaaagatgaaagacaacaagtgttggcaaggatacggagtaaagagaacttctggcacactgttggtgggaatataaacagaaaacaaaatttaaaatagaactaccacatgatccagcaatcctactatttaggtatatgtatcccaaggaaataaaatcagtatgttgaagagatatctgactcccatggtctctgcagcattattcataatagccaagatatggcatcaacctatgcatcaatcaatcaatagataaatgaagaaaatgtggtgtatatgtacaatgaaatattattcacccataagaaaggaaattctgtcatttgaaacaacgtggatgaacctgaagaacattatgttaagtgaaataagtcaggcacagaaagacaactactgcatgatctcacctatatgtggaatctaaaatagttgaactcatagaagtagggtagaatggttgttactagaactgcggaggtgagagtgggataggggttgcggagttggggagatgttggtcaaaggatttaaaatttcagcttgataggaataagtttaagagatctactgtacaacatggtgactatagttaataacaaatatattcttcaaagttgctaagagtagatcttaagtgttcttacaaaataactaagtgaagtaatacatgttcattagctcagtttagccattccacaacgtatgcatatttcaaaacatcatgttgaacaagataaatattaatatatacagttttgtcaattaaaaaaaaaaggatttaagaaaagaggaggccaggccagctatggtgactcacgcttgtaatcccagcactttgggaggccaaggcgggtgaatcacttgagcccaagagtttgagaccagcctgggtaacatgatgaaactctgacaaaaaatacaaaaattggccaggcatggtggcatgcgcctgtagtcccagctacttgggaggctgaggcgggaggatctcttgagcccaggaggcagaagttgcagtgagatgtgattgtgccactgcactccagccttgatgacagagtgagactctgtctcaaaaaagagaagagacaccctagatctccatccttctctctctctaccatgtgaggatgatgggaaggcagccctctgcaagccaggaggagagcctcagcagaaaccgtcctagtacccctgatctcggactttcagcctccaggactctgaaaacagatttttgttggttaagccagaaaaggaaaaaggaaaaaaatcttgtaaaaaggcacttcagtactctacaaaattatttcaaaggacagttacaaatgcaaccatattcagcaacagcattccataaaaatgtctaatgtttctaagcaactaaaactaccttttcctgttaggaagatgctataaatatgaagaaaatctgatattttaaaagttaaatagcaacaaaatttcagcaagtgttttagaatttttccatttattatcaagaaaaaaatcactatatacaaagatattgcaaatgtaataaaatattctgtataataaacagcattttggcattttaaaaacaactgtatcttgatactaaacttaacattaaataattgaacagtacctgagaactttaaaaaaatcactttcatcagtgcctccaaattcatttcagtcattaagcatctacaaatactcagtcaaaaaaaataggattttggtattctgctgggatctacattcatcacagccaaaggtattttaagtacatacttttaaaacagaaatcacttctaaagggttcacctggtcaaaaaccatacatttaagaacgctggttacccaaaagctttgtgttttccttgccacatcatcttaaagctacttgaactgtgagacagtgaccaacattattagctaattacccagtaaaaattgagtgtatcaccaatgaagtctcattaaattcagttccacaaatggatcctcaaatattccaaccttatctatattttattacatcttatggaaaactatgtttgattagataataaagtttaagaggaaaaatgggcaagatgaatgtttgatacttttaccaaaaatttatatttcatttacttgctgatttccctgaaaactcaatttgttgaagaagcaacatgctgtactaattactgtgtattactattcacacacaagtgtttaatgaattttacttgtaattctttaaatttttgaaagtccaatagtaaactaaagttgtggaaacaactgataagaatattagaggataataaattctacatctttaaataggtaagtactagctggtggtattttcctaaagccacagacatttagaataaatagagtgattacttttgaaaactttgatctgtattttgtttattaatagggcatgagtggttttgtctgtgctttttgcatgcatgaaaaacattacagacatgattactttcaagattcaatcctacccactgttaactttgtgcttaactaaactctgctaagatgtattagttaaaatattaatttgactacgtcttaggcaaaaaaaaggcataaaactagatacagacaacccatacatttatctctgattagtcacctatttctgggcttataataaatgataagccaaaagaaggctctccaaagctgggcaataactagttaatgctaatgagaagtccatctcaggtttcttactaaagaacctaatccataatgatttttctcactctgctgtgtattagataactagaaggagtatctaaattaaagattaatccgggacataggatatacagatattggtttattaacaatatttgattcgcactatataatttacagtgtttcttcttatgtaccattttatttagtacaacacaacctgttaggtagcaggctgggtattacctgagtaaaaagtccctattctttccatttctccatgctatttaaaagcatgtggtgatccttcaataaattaaagatataacaaattatttgatgccattaggcggcctggatcaccaattctaagtcttttttttttttgagacagggtcttgcccaggctggagtgcagtggcgtaatcactgctcactacagactcaacctcctgggttcaagggatcctcccacctcagcctccctaatagctgggaccacaggcacatgtcaccatgcctggctttctttttcttatttatttatttatttattttttattatactttaagctttagggtacatgtgcacattgtgcaggttacttacatatgtatacatgtgccatgctggtgcactgcacccactaactcgtcatctagcattaggtatatctcccaatgctatccctcccccctccccccaccccacaacagtccccagtgtgatattccccttcctgtgtccatgtgttctcattgttcaattcccacctatgagtgagaatatgtggtgtttggtttcttgttcttgcgatagtttactgagaatgatgttttccaatttcatccatgtccctacaaaggacatgaattcatcattttttatggctgcatagtattccatggtgtatatgtgccacattttcttaatccagtctatcattgttggacatttgggttggttccaagtctttgctattgtgaataatgccgcaataaacatacgtgtgcatgtgtctttatagcagcatgatttatagtcctttgggtatatacccagtaatgggatggctgggtcaaatggtatttccagttctacatccctgaggaatcgccacactgacttccacaatggttgaactagtttacagtcccaccaacagtgtaaaagtgttcctatttctccacatcctctccagcacctgttgtctcctgactttttaatgattgccattctaactggtgtgagatggtatctcattgtggttttgatttgcatttctctgatggccagtcatgatgagcattttttcatgtgttttttggctgcataaatgtcttcttttgagaagtgtctgttcatgtccttcgcccactttttgatggggttgtttttttcttgtaaatttgtttgagttcattgtagattctggatattagccctttgtcagataagtaggttgcgaaaattttctcccattttgtaggttgcctgttcactctgatggtagtttcttttgctgtgcagcagctctttagtttaattagatcccatttgtcaattttggcttttgttgccattgcttttggtgttttagacatgaagtccttgcccatgcctatgtcctgaatggtaatgcctaggttttcttctagggtttttatggttttaggtctaacgtttaagtctttaatccatcttgaattgatttttgtataaggtgtaaggaagggatccagtttcagctttctacatatggctagccagttttcccagcaccatttattaaatagggaatcctttccccattgcttgtttttctcaggtttgtcaaagatcagatagttgtagatatgcggcgttatttctgagggctctgttctgttccagtgatctatatctctgttttggtaccagtaccatgctgttttggttactgtagccttgtagtatagtttgaagtcaggtagtgtgatgcctccagctttgttcttttggcttaggattgacttggcgatatgggctcttttttggttccatatgaactttaaagtagttttttccaattctgtgaagaaaggcattggtagcttgatggggatggcactgaatctgtaaattaccttgggcagtatggccattttcacgatattgattcttcctacccatgagcatggaatgttcttccatttggttgtatcctctttttttttttttttttgcagagacaggttttccttatattacccaggctagtcttgaactcctgggctcaagcaatccccctacctcggcctcccaaagtgctgggattacaggcgtgatccatccaccatgccagtgccctgctccatgtctctcttaacatggaaaccatcatgagttttcctgaagtattaggttagacgttgacaacccagctgtttctgttcactatggttgtgagaagcccagttatttaaaaggccattaagattgaaaatagatttagaggtgtaggtacagactgggaaggggcatgaaggaaatttcaggggtgctggaaatgtcctaaacatggtggtgacatgggtgttaacatacataaaaattaattaagctgtacatttaaaattagtcccctttatgcattttactctacatgtgttatccttgcaaagaaaaagactgacatctttgagagcaagagtttttgtcttattcacctctgtataatttccaacatcgtgctttgcacattggacattcaaaaaatgttatacaagattgactgcatcaatactggagtgttgtgtgagggttaggtgctgaggctgagaagtgtatgagggagacctgagattaaacctgccacataaagtggagagaagtagcaaggtcagggctatgaaataatcccaaaaactttagaatttctacataatacagttgacactactattctcaatagagctgctttcagtctcaaagggctgtggtatgtgtgcgtgtgtgtgtggtaaaaaagggaagcagcaggtcaaggaagagaagtgttatttcacaagacttaagtaatcttgtcattgctgcttttcctgccagaaaatcattacctttccctttaaaaatcatttccatatacattttactaactcccatgtcaatttcacccttccttttctaataatagctactatttattcggcaccaactagtatactagggactatgctgggtgctggagtcccaatgacgaaagagacaaacacttaaataagaggatgtccgtaatacaggcatgtacaaagcttcacctcaagtaaggaggcaggaccaaccttcatacagaagcccagccttcaaggatgagtgttctagttccagaagagcagaggcagagtgggtaacatgctaaaggtatggaggcctgagagaattgttttttttcaaggaatgctagctatgtaataaggaatagggagaacatggtattttaactggaacatatggaaaagattattactagggaaaaaagaatgaaggcctttactaagaaggcagcaggaattaagaagggacatattcaagaggagacaagctcaaaaggacttgatgattaagtatgagtgtgatggagaaaaagaatacaatactttgaggttcctagtaagtatcttgggtggcgtggtaaatggtaatgccattatggaaggtaaagaagagagcgagccagtttatcaggacattcaggtagcatgaaagaaaactgaacctgtgggctctgataagatcatcggagggcgggtagggggaaatagcaccaactgaggggaggggtcaagactcatgggaaataaatctcagggaggaatcttgactaccacagaaaacccagaggagtatgcaaagagggaagtataggaggttatacataggtcaagcagtgtgaggactgaaaaaaagacactagatttgacaaggcgggcagtctccgctcatctttcccagaatatcctaagaaaattgtaggagctaaagacagagatggctgggctaaggaataactgggaagggagaaaatggaggctggaggcatttcagaagtcaggatgcaaatgcatccaagtggtaggaaaggttttatttggtctttccttttaggctaatgaagacatttaccatgtttatacaaagaaaggaatcactaagtggtgatgtaaggataaagtaaacacagcctggcagagaaaggaggagggatccagtgcacaagtagagttcagaaaaagtgcctcagatactaaaagcaggtgttaaaagagcaggtgaaagcatgaatatatgtagagacagaggagaaacgttaccaaattcattttaaattaaagtctatacagggtcaaaaaatagcacctgaaaaatgaaaaatccattgggaatattctaaacacagaggtagcagaa

SEQ ID NO: 517 - DNA, 766 bp, Homo sapiens
agaggcggagtctcgggtgcattcaagatccggcttcactcgtaacccactgccatggccgaggaaggcagtgctgctggaggtgtaatggacattaatactgttttacaggaggtgctgaagaccgccctcatccatgatggcctagcatatgaaatttgcaaagctgccaaagcctcagacaagtgccaagcccatctttgtgtgctgtgtgtgcttgcatccaactgtgatgagcctatgtatgtcaagttggtggaggccctttgtgctgaacaccaaatcaacctaattaaggttgatgaccagaaactaggggaatcggtaggcctctgtaaaactgacagagaggggaaaccgtgtaaagtggttggttgaagttgtatagtagttacgaactatggcaaggagtctcaggccaaggatgtcattgaagagtacttcaaatgcaagaaatgaacaagtaaatctttggcacacacacacacacacacacacacaaaagaaagaaaaaataacctcaaaaataaccaatctattgctgcctcaattcacagtcccctccctgctgccctcagacattctcctcaggctccacactgcagcccaggaaagaagcccttcaccaaacgaggccaaatatttctttgtgggcagtgttccttctgacatcactgaggaggaaatgaggaaactgtgagaaatatgggaaggcaatttcacagaaagagagtttaaataaattaacaaaaaggaaaaatgaaaa

SEQ ID NO: 518 - protein, 105 aa, Homo sapiens
MAEEGSAAGGVMDINTVLQEVLKTALIHDGLAYEICKAAKASDKCQAHLCVLCVLNCDEPMYVKLVEALCAEHQINLIKVDDQKLGESVGLCKTDREGKPCKVVG

SEQ ID NO: 519 - DNA, 825 bp, Homo sapiens
tctttgtgggcagtgttccttctgacatcactgaggaggaaatgaggaaactgctttggctttatgcacttggaagcacgaaccctagtggagattgccaaagtgggtctggacaaaggacttccagagaagctggttgtaaagaaccagcaatttcacaaggagtgagaacagccaccccagtgtgcacagcatggcttttgaatataagtatgccatgcactagagggtactcattgagatggagaagcagcagcaggacgaagtggactgcaatatcaaggaggctcatgagaagctggagatggagatggaggcaggatttgatgaggtgtcaagaagagctgtggaggatggaaaagctgaacaaccaagagatgcaaaaacgacggcaactggagcccatgcgagaggaacagcaggagatacagatgggccagatggctgtgggaggtgctataggcataacggaggcaccatgccccctgcttctgtgagaattcaggcaaatgtccacagaggtcacaaacaatgtacgtatagttcttttatatccgatatattatcccttcttgtcctaaggaagacattttctcttagagactttcatttcagtgtatcttttttaaaaatcttgaatggccgttttgtgtctatgatgttgctgttcacaacttttcttgataggcctagtacaatcttggaaacagagttgctgtatgctgaaggtctgagagtagctcttagccttgcctatcttagatatttttctgagaaatggagcagcaatgcagcatcaacttgttaaattacatgttaagcctt

SEQ ID NO: 520 - protein, 182 aa, Homo sapiens
MEKQQQDEVDCNIKEAHEKLEMEMEAGFDEVSRRAVEDGKAEQPRDAKTTATGAHRTAGDTDGPDGCGRCYRHNGGTMPPASVRIQANVHRGHKQCTYSSFISDILSLLVLRKTFSLRDFHFSVSFLKILNGRFVSMMLLFTTFLDRPSTITELLYAEGLRVSLAYLRYFSEKWSSNAASTC

SEQ ID NO: 521 - DNA, 4079 bp, Homo sapiens
gtggctggacaaatgccgctctcaactgctacagaccaaagtctacgctttaaagatagagaagccattctgtcaaagtgaaaacagaagcggtaggtaggaagccgcccccctttctttcaagcacagagacccagagagacgcccaggagctcccgaaaaaaacgttgctgattagagctgccgggtcagaaacagctgtgagacactaaagtccccactgttataattattcaatatgttcccactgactgaggaaaacaagcatgtggcccagttgttgctcaatactggtacttgtccaagatgtatcttcagattctgtggtgtggattttcatgcaccttacaaacttccatacaaggagttgctcaatgaactacagaaatttctggaaactgaaaaagatgaattaattttggaagttatgaacccacctcccaagaaaattcgactgcaagaactggaagatagtattgataatctaagtcaaaatggagagggaaggatctctgttagtcatgttggaagcactgcttccaagaactcaaatttaaatgtatgtaatgtatgcctaggaattcttcaagaattctgtgagaaagatttcattaaaaaggtgtgccaaaaggttgaggcctctgggtttgaattcaccagcttggtattttcagtctccttcccaccacaactatctgtaagagagcatgctgcatggttgctggtaaaacaggaaatgggaaagcagagtctgtcgctgggaagagatgatatagttcagctaaaagaagcctacaaatggataactcaccccctgttttcagaggaactgggtgttcccattgatggaaagagcttgtttgaagtgagtgtggtctttgctcacccagaaacagttgaggattgccacttcctagctgcgatatgcccagattgttttaagccagccaaaaacaaacagtctgtattcactagaatggcagttatgaaagccttgaataagataaaggaagaggatttccttaagcagtttccttgtcctccaaactcaccaaaggctgtatgcgctgttcttgaaattgaatgtgctcatggtgctgtttttgtggctgggagatataataaatactccaggaatctaccacaaactccttggataattgatggagaaaggaagctggaatcttcagtggaagaattaatttcagatcatctgttggcagtatttaaagcagagagttttaatttttcatcctctggaagagaagatgtagatgtgagaacattaggaaatggaaggccctttgcaattgagctggtgaatcctcatagagtacatttcacttcacaagaaattaaggaacttcagcagaaaattaataactcatctaacaaaatccaagtacgtgacttgcagcttgtcacaagagaggcaataggacatatgaaagaaggtgaagaagaaaagacaaagacctacagtgccttaatttggacaaataaagcgatacagaagaaagacattgaattcctaaatgacataaaggacttaaagatcgaccagaaaacacctttgcgcgtccttcaccgaaggcccctggctgtgcgagctcgcgtcattcacttcatggagacacagtacgtggatgagcaccacttccgcctccacttgaaaactcaggctggcacctacattaaagagtttgtacatggagacttcgggagaaccaagccaaacattgggtccctgatgaatgtgactgcagacattctggagctggatgttgagtctgtagatgttgactggccacctgctctggatgactagctttcaaatttggagacaaagagtatggttttcctggcatgatgtggacatccatggagcacatgccgtaaaatggctgtttacccaccataacggtgtcttgaaaactatttggatcatgttgatctatataattgttaatttgttgtaacatctcaggatctatatatgtgtatattttgtgttaaattgttccaaggatgtcttaggatttttctcattccctctttcacccccacaaaccaaactatgaataatgaaataattctccttaattctttcatttagagaggtgcacaaacaggacacattctctgttaacctaagaagctgtaatttcagcaagatttccctccacaagagatataccacctttaaaatcatgttctaatttttgtaaattatctgaataaaagttatatctagatttatgcagcataatatcctataatagtctaagattgcaaatgcaaatctgacatcattattttccccaggaagcctcaaacaagctattaccaatgaagttcttttggctgtgatttgtcataaatcttaaccaaactatgaataatgaaataattctcattaatactttcattaagaaagaattttgacaatctaaaattgtcaatataggtttcctgtggagggaaagtaaaaccgtaggagccaaggcatgccatggtaggagcctttcataaatcttttaaataaggagaaacaagtgcctttaataacttcaatcccagggttaagaatttgaaaaattgagattgctaaacaaagacgaactggtattatttcagaatgcttcaatatattatccaattataaacattttaataataccttattaaagtagataggatattgtctccattttataaatatggaaaccaaagactagaagttaaatgacttatccaaaattgttagctacttctatattgaggactagaactgaagtttcttggtttctagggtctttctaataagccctattactgagcacctgtttgtgtgaaggggcagctatggatgccatttaaactcatgtaactgataattaacttttggaatgtagttaccaaatcaaagagcttaccaaaaaatagcccaagactatttaatacaatcttatatagttaccatttgttattaagttaaacctcagttggtattatgaagaggaaaaacattaagctaaacctaaaaaaaatgaatgggtcatttaagtttcagaaaggagcctcattacaatttcagatttgagtataatttccatcaccctaattcaactatttgagctttttttaagaatacatgtgacttgactagtattagattactaaccatttcccatctctatattaaacataaatcacagataccaagattcactttagatatgaggaaaatggttttaatggacacaaaggagtcagccacgttggaaccaacatagtttcataccacgttgaaaccatgtgtttgatatgcaaataacagcaaataattttttcactattgtcaatgccaatgcattgaaaggcccagaaaatgagaaaaggataacaaacttttgataaaaaggaggtgctgaagaccgccctcatccatgatggcctagcatatgaaatttgcaaagctgccaaagcctcagacaagtgccaagcccatctttgtgtgctgtgtgtgcttgcatccaactgtgatgagcctatgtatgtcaagttggtggaggccctttgtgctgaacaccaaatcaacctaattaaggttgatgaccagaaactaggggaatcggtaggcctctgtaaaactgacagagaggggaaaccgtgtaaagtggttggttgaagttgtatagtagttacgaactatggcaaggagtctcaggccaaggatgtcattgaagagtacttcaaatgcaagaaatgaacaagtaaatctttggcacacacacacacacacacacacacaaaagaaagaaaaaataacctcaaaaataaccaatctattgctgcctcaattcacagtcccctccctgctgccctcagacattctcctcaggctccacactgcagcccaggaaagaagcccttcaccaaacgaggccaaatatttctttgtgggcagtgttccttctgacatcactgaggaggaaatgaggaaactgtgagaaatatgggaaggcaatttcacagaaagagagtttaaataaattaacaaaaaggaaaaatgaaaa

SEQ ID NO: 522 - protein, 523 aa, Homo sapiens
MFPLTEENKHVAQLLLNTGTCPRCIFRFCGVDFHAPYKLPYKELLNELQKFLETEKDELIVMNPPPKKIRLQELEDSIDNLSQNGEGRISVSHVGSTASKNSNLNVCNVCLGILQEFCEKDFIKKVCQKVEASGFEFTSLVFSVSFPPQLSVREHAAWLLVKQEMGKQSLSLGRDDIVQLKEAYKWITHPLFSEELGVPIDGKSLFEVSVVFAHPETVEDCHFLAAICPDCFKPAKNKQSVFTRMAVMKALNKIKEEDFLKQFPCPPNSPKAVCAVLEIECAHGAVFVAGRYNKYSRNLPQTPWIIDGERKLESSVEELISDHLLAVFKAESFNFSSSGREDVDVRTLGNGRPFAIELVNPHRVHFTSQEIKELQQKINNSSNKIQVRDLQLVTREAIGHMKEGEEEKTKTYSALIWTNKAIQKKDIEFLNDIKDLKIDQKTPLRVLHRRPLAVRARVIHFMQYVDEHHFRLHLKTQAGTYIKEFVHGDFGRTKPNIGSLMNVTADILDVESVDVDWPPALDD

SEQ ID NO: 523 - DNA, 3434 bp, Homo sapiens
ttcccttcgagggccggaaggggttaaatctcaggctccggcgtctggggagaaggtgaggcggttataattattcaatatgttcccactgactgaggaaaacaagcatgtggcccagttgttgctcaatactggtacttgtccaagatgtatcttcagattctgtggtgtggattttcatgcaccttacaaacttccatacaaggagttgctcaatgaactacagaaatttctggaaactgaaaaagatgaattaattttggaagttatgaacccacctcccaagaaaattcgactgcaagaactggaagatagtattgataatctaagtcaaaatggagagggaaggatctctgttagtcatgttggaagcactgcttccaagaactcaaatttaaatgtatgtaatgtatgcctaggaattcttcaagaattctgtgagaaagatttcattaaaaaggtgtgccaaaaggttgaggcctctgggtttgaattcaccagcttggtattttcagtctccttcccaccacaactatctgtaagagaggtaaggtcatttgcatgcataaaactgtatgtgaaaaagcagagtctgtcgctgggaagagatgatatagttcagctaaaagaagcctacaaatggataactcaccccctgttttcagaggaactgggtgttcccattgatggaaagcttgtttgaagtgagtgtggtctttgctcacccagaaacagttgaggattgccacttcctagctgcgatatgcccagattgttttaagccagccaaaaacaaacagtctgtattcactagaatggcagttatgaaagccttgaataagataaaggaagaggatttccttaagcagtttccttgtcctccaaactcaccaaaggctgtatgcgctgttcttgaaattgaatgtgctcatggtgctgtttttgtggctgggagatataataaatactccaggaatctaccacaaactccttggataattgatggagaaaggaagctggaatcttcagtggaagaattaatttcagatcatctgttggcagtatttaaagcagagagttttaatttttcatcctctggaagagaagatgtagatgtgagaacattaggaaatggaaggccctttgcaattgagctggtgaatcctcatagagtacatttcacttcacaagaaattaaggaacttcagcagaaaattaataactcatctaacaaaatccaagtacgtgacttgcagcttgtcacaagagaggcaataggacatatgaaagaaggtgaagaagaaaagacaaagacctacagtgccttaatttggacaaataaagcgatacagaagaaagacattgaattcctaaatgacataaaggacttaaagatcgaccagaaaacacctttgcgcgtccttcaccgaaggcccctggctgtgcgagctcgcgtcattcacttcatggagacacagtacgtggatgagcaccacttccgcctccacttgaaaactcaggctggcacctacattaaagagtttgtacatggagacttcgggagaaccaagccaaacattgggtccctgatgaatgtgactgcagacattctggagctggatgttgagtctgtagatgttgactggccacctgctctggatgactagctttcaaatttggagacaaagagtatggttttcctggcatgatgtggacatccatggagcacatgccgtaaaatggctgtttacccaccataacggtgtcttgaaaactatttggatcatgttgatctatataattgttaatttgttgtaacatctcaggatctatatatgtgtatattttgtgttaaattgttccaaggatgtcttaggatttttctcattccctctttcacccccacaaaccaaactatgaataatgaaataattctccttaattctttcatttagagaggtgcacaaacaggacacattctctgttaacctaagaagctgtaatttcagcaagatttccctccacaagagatataccacctttaaaatcatgttctaatttttgtaaattatctgaataaaagttatatctagatttatgcagcataatatcctataatagtctaagattgcaaatgcaaatctgacatcattattttccccaggaagcctcaaacaagctattaccaatgaagttcttttggctgtgatttgtcataaatcttaaccaaactatgaataatgaaataattctcattaatactttcattaagaaagaattttgacaatctaaaattgtcaatataggtttcctgtggagggaaagtaaaaccgtaggagccaaggcatgccatggtaggagcctttcataaatcttttaaataaggagaaacaagtgcctttaataacttcaatcccagggttaagaatttgaaaaattgagattgctaaacaaagacgaactggtattatttcagaatgcttcaatatattatccaattataaacattttaataataccttattaaagtagataggatattgtctccattttataaatatggaaaccaaagactagaagttaaatgacttatccaaaattgttagctacttctatattgaggactagaactgaagtttcttggtttctagggtctttctaataagccctattactgagcacctgtttgtgtgaaggggcagctatggatgccatttaaactcatgtaactgataattaacttttggaatgtagttaccaaatcaaagagcttaccaaaaaatagcccaagactatttaatacaatcttatatagttaccatttgttattaagttaaacctcagttggtattatgaagaggaaaaacattaagctaaacctaaaaaaaatgaatgggtcatttaagtttcagaaaggagcctcattacaatttcagatttgagtataatttccatcaccctaattcaactatttgagctttttttaagaatacatgtgacttgactagtattagattactaaccatttcccatctctatattaaacataaatcacagataccaagattcactttagatatgaggaaaatggttttaatggacacaaaggagtcagccacgttggaaccaacatagtttcataccacgttgaaaccatgtgtttgatatgcaaataacagcaaataattttttcactattgtcaatgccaatgcattgaaaggcccagaaaatgagaaaaggataacaaacttttgataaaaaggtaagaatttctgtgtggatgttcctcagtttctgggaaaattttgctacaaaagagatttaaataatttaggaggcagtcttttgcatggtatttttggcttacctttgaatctagtggacctgtaatatgtaagaatgaagaatgtgcttagcaaactgaaatgagaag

SEQ ID NO: 524 - protein, 322 aa, Homo sapiens
MESLFEVSVVFAHPETVEDCHFLAAICPDCFKPAKNKQSVFTRMAVMKALNKIKEEDFLKQFPCPPNSPKAVCAVLEIECAHGAVFVAGRYNKYSRNLPQTPWIIDGERKLESSVEELISDHLLAVFKAESFNFSSSGREDVDVRTLGNGRPFAIELVNPHRVHFTSQEIKELQQKINNSSNKIQVRDLQLVTREAIGHMKEGEEEKTKTYSALIWTNKAIQKKDIEFLNDIKDLKIDQKTPLRVLHRRPLAVRARVIHFMQYVDEHHFRLHLKTQAGTYIKEFVHGDFGRTKPNIGSLMNVTADILDVESVDVDWPPALDD

SEQ ID NO: 525 - DNA, 665 bp, Homo sapiens
atggccgaggaaggcagtgctgctggaggtgtaatggacattaatactgttttacaggaggtgctgaagaccgccctcatccatgatggcctagcatatgaaatttgcaaagctgccaaagcctcagacaagtgccaagcccatctttgtgtgctgtgtgtgcttgcatccaactgtgatgagcctatgtatgtcaagttggtggaggccctttgtgctgaacaccaaatcaacctaattaaggttgatgaccagaaactaggggaatcgagggtactcattgagatggagaagcagcagcaggacgaagtggactgcaatatcaaggaggctcatgagaagctggagatggagatggaggttgctcgccttcatcaatgccaggtcatgctaatgaggcaggatttgatgaggtgtcaagaagagctgtggaggatggaaaagctgaacaaccaagagatgcaaaaacgacggcaactggagcccatgcgagaggagtgcaggcactaggaggaagcaatgcactggtaatggcaggaaagattcactggaaccttctctgatatgagacagcaggagatacagatgggccagatggctgtgggaggtgctataggcataacggaggcaccatgccccctgcttctgtgccagctggcagccca

SEQ ID NO: 526 - protein, 167 aa, Homo sapiens
MAEEGSAAGGVMDINTVLQEVLKTALIHDGLAYEICKAAKASDKCQAHLCVLCVLNCDEPMYVKLVEALCAEHQINLIKVDDQKLGESRVLIEMEKQQQDEVDCNIKEAHEKLEMEMEVARLHQCQVMLMRQDLMRCQEELWRMEKLNNQEMQKRRQLEPMREECRH

SEQ ID NO: 527 - DNA, 42569 bp, Mus musculus
  misc_feature (1)...(42569): n = A, C, G or T/U
ccagtctccatgaaaggagaacgcagaggctatcaaacaccccataagggtgcatattcacttggggacttaacctaagtcagccgtaattccaactctacccaatgtctattgagatttttttaaattaatttttatcattttaaattaaatatatgtgtgtatttctgtggtgggggtatgtggctttcagcttagagtgcctgtataggtgcacctgtttctctctgtttaaagaaatgtgtatttccccttctctgtacatttggaaagatagcaccaatttgtagtaaatggtccctcagtgttctggggagttctggactggactaaacaggagtcttaaatcagtgtctgcttcataaaaagttgtaaaaactggtccagagagatggctcagtggaacagacgacttgctgccaagcctgatcccacataacagaaggaagagaactgaatcttgcaagttgttctctgatctctctacccacatgcgcacacaccaaggatgcagacctttatctgtctagcaaagggtgggactgagttcccacgaacagtgtggaggaagaacgtgggctttcggagttagaccagctttggatgtgtttccagctcaggtcatagaacctgtggtgacagaaacatgaatgacaatggcttaacctccttgggccccaggaattgtgggtaaccacttcaggagactgtggtaattaaatgaaatcagcagccggagctgcctagcatagtgtgagatagagaagacacagttgcaaacagcaagccagctttctgtctgcccaccttcctccttccctggtccttctgcctcccttaatccttcctacacactctcaacctatgggtcctgaccccttggaggggtcggatgacccttttgcaggggttctctaagaccaccagaaaacacagacaattacattatgattcaaaacagtaacaaaaatacagttacaaagtagcaatgaaaataatgttatgggtgggactcacctcaataggaggaactatattaaagggttgcagcattaggaaggttaagaaccactcactactctagactgggattcatggagaattgacatttctgtgtaatatcacaccaaatttattttttccacttgtggttaaatgcacgtaccatgtaacataccatcttaactatgtttgaaggaaccattcaatagccttaaaaagattgttttttcttttaaccatagtatccccaatctggcttcaaacttgatgtgtaactgaggatgcctctgaactcataatcctcctgcctctactttctgaatgctggggttgcagttgggcactatcacacctctttatgtggtagtgagggccacagcactttaccaggcaagccatcccccacccctgttcagtagtcttaaggccattgacccaggagtgaaatctgtcaccagaactcgttttcatcttatgcatctctacccatttaaccacttcctatctccttccctcagcccttggcaaccatcatcaactttctgtccctctgactaacagctccaggtaccttacccaagtgcagtcttgctttcctcatttgcagcttcttgcacccaacagagatgctcaaggttcatctgcattgtagcgtgtgtcaggatttccttcctttgagagactacacacacacacacacacacacacacgcacacgcacacgcacacacacacacacacacacacacacacaaacacacacatcttgtttgtccattcaactccccatggacacttggcttatttccagtctttggccacagtatccaatgcctctatgaacgtggaggttcaggaccttgcttccagttacgttgtgcatctatccagaagtggagtgacagaatcctaagtcgggcttgctgtgaatctttagaggaagcaccttgttctcccgcagcccattagccgctaccttgtttcacattcccaggcagcctgcaccaggctctgacttcttcacagcctagcatttactttgttgttcttttactctaatagtggccatactgataggagtggtccagttttgatttgcacttccatggtgatgaggagtgaaaaggattctattaccaccagtggtatcgtgtatttgtgtggggtcagcttgcccgtgtgtggaggtcagaggacagtgttgtgtagtctgttttctcctacctttatgtaggttttagggattgaactgaggtcacctgcttgtgtgccaactgccttttacctattgagacatctcattggcactgaaaaaccctatcaagtgcttattagccacctgcatattcctctagggaactattccttcaagtccttcatctatctgggcagtgatggcgatggggttggggtgtagtcctttgcctatctggatattagttctttgtcacctgaatgacagggaagacttctgttttgtgggcatttcactcttgactggagcctttgatgcagagttttggctcttagatctaacttagttttggttctgaggtctaatttgtccagatttttcttttgtgccctggattctttggtgtgtggtgctttgaaagagacgtgtccccatagtcttgggcttttgaacacttggttcttggtcgatggcattttggggagtaaacccaaaaatgtgcagccctgagagtggacataggtcagggggtagtttttgagatgatgatgatggtgatggtgatgatgatgatgatgatgatggtgatgatgatgatggtgatggtgatgatgatgatgatgatgatgatgataaagcgcctcctctgcttctagtttgctctgtctgcttgcttgtggttaagatgtgaactctcagcttcctgctccagctactgtgcctgccactccacttgctgtcatcccataccttcaattgcaggctttaaccctctggaactatatgcccaagtaaactcttccttcagagttgccttggtcctggggttttatcccagccacaggtataattagcacaagcgttatcaccgcgaagccatctacaaattcaaggtgaccaagcttcttccacatgtccaaggatttttgcagttttaattaccatgtttttagacttgtgatcctttccacatcacttctgtatcgttctggatctttctgcataatgagaggatgtgggttttcatttgctctcgtcttttctgtctctcaaaagttttattcataaaaattgcttattttaaagtttattatctttatttctcttgatgctattataagtggggccttccccctaggacatatcttaatgtaaagagaaatatggggctggagagatggctcagcagttaaaagcactgactgctcttctgaaggtcctgagttcaagtcccaccaaccacatggtggctcacaaccatatgtaatgatgctctcttctggtgtgtctgaagacagctacagtgtactgacgtataatagtaaactaaatcttaagaaataattgagaaatattaatttctatgttattttttatccaacaacattctctaagtattttcattgttacagccatgtatttttttgttgttgttgttgctgttgttgctaactgcagtttctataatatatcaggaaggggcgaggataaaagccagcagctccgccactgacaacgctgtagtttttgaaagacatatgacttacaagacctcagagcttagccatgcacttggcctgccattactcagaatacccagctgagccagaaatgaactgaaatgaagaacctcagagtacaaagccaagcagtcgtgagcaatgagaccagccagcctttcagctgctgtccacacagtggtatcaccgtagtaactatacctagtgtgagtgtccaaaacaatgatttcagcagcagaagtcggccataaaatgtgtaatacaaacctgaacctgtactttaggcaatagagtgagtgatccaatatgaagagaaggcatatgaccgaccccagaatgattcagaaatcattgaaaaaatgacctgggaattcctgtcctcaccaatacattttgaacttttgataaaccagagttcccgaaatagatatttgagaacctgttccagtaactctgggagaaattagaaaagtaattcaaattaacttgttagcgagagctgaggtgactcacaccatcgggaggatgggagctcccatccaagcaagtgagtctgggctcagacttccactgtctctgagggcaagccttcctcagtaaggtcagccagccctctgcactggctcagaagaggaacttgaaaaggaaaaagccattgtttaatgttttaacactgcccatcaggggagcctgcctggcagcagctggaattttataaaggggactcctcttaataaggggaatcccaggattggacatccgatactgaacggagcaggtcttgcttttcaagcttttgaaaaaggtctcatcccactgtctactgtcaccccttccccagagccaatggggttctgcccacaagtcataaggaatggcagttgtcagtgagtcatcctgacaaagcgaacctcgtgcatggccaagcgtggagcacaagggctgacttcacccacaggctccagatgagcccacccccactctcatctttgtacttcaccgaggggctcccccacgggacctctattgcctccctcaggctcccaggccaagcactcagtaggtcccaactttttttaaaaagtcatctatttgtgtttacgtttatgggtgttttgtctgtacgtatatctgtctgcataccacgtgcatgcctgttgcccaggaggctagaagaggttgttggatccatagaacgagagatacaggtggtgacaaggcacatgtgagagttggcgattgaaacctggtcctttggaaagtaagtactggtaaccgctgagccatctcttcagccccaggtcctaactcttaagagcatggaccaacgcctagatgacagaaatagtatagggagcccagcatatcagtgactctgccctgggcttggaggatatctggctcttgaccttggttgtctccttagagccagggagcaccgaggagtctacaggaggaaggatggaagggcatgcatcagcaggtactggagaagggtgctgctgacactggggaaggctgctagcagcagaccaggacactggactctgatacctgtaaggacaaggcatggcagaagaaaacacggtggctgagaaggctcattcgtgactcacctttgcatcatgacagtgtaaggcaaaggtgactcacactggcctcctagcaagaccagcttgtccatcacttcaggggttgggcagaggggcgacttaacagccagttcacacttctatcctttcctcaggctggagaggcagggcccaggttgccaccatgcacagggtgtcctcttctgaataataagggggtctgttttctggaagaggtaggctggactgggcaactggtgtagatagacatgccagggttcaagattaccagcaaccgggaatgccaacctctttaagaaaaatcccaagaattgagttttcccttggagtgcattggttttctttcctttctaaactgcatctgatttgctgaggggcaatgtgtgcagagttaagaacccagacgtcctgggtttgcattctggctttgctacctgtgatggtttgtatatgctctgcccagggagtggcactattagagggcgtggccctgttggggtaggtgtgtcaccgtgagtgtgggctttaagacccttatcctagatgtcaggaagccagtattctgctagcagccgttagatgaagatgtagaaccatcaactccaccttcatcatgcctgcctagatgctgttatgctcctgccttgatgataatggactgaacctctgaacctatatgccaaccccaattaaatgttgtcctaataagacttgccttggtcatagtgtctgttcacagcagtaaaacccaaactaagatactacctctgagctatgtaaacctgggcaaggtattctactcctctgtgtcactaattgcccatctttttctcctactccactactgtcccacagaggtggtctagcctcctgcctcttactgctgggttgcccaccctgatggttacctactcagagtaacaaaactgttcaagcccagctgtctttctagtgtcctgccacccacacagtggacttgcaagctgtccttctgcctcttccctgttccctgccaatgttcctgatgaattgggtatgatttggtggtatctcacctggtaggagactcatatcctcagacaatgtcttcaggtccctcaagcccttggttttagagagcaggtgcaccttccggaatggtcgatgacccttttcccctttgcagtcttatggtgatgaacacacatacactgctgttccaggtccatgcaaacaccacccaagatagttgcagccactatccaagtgccttccggaactttaaatatttatttaattattcattctgtgtttatgtgtgagtatatatacgtgaacgcaggtacccggagagactagaaatgttgcatccccctggagctggggtgacaggtggttgtgagctgcttggtgtgggtgctgggaactgaactcagatcctccacaagagcagcaagtgctcttaactgctgagctacctctccagggaactttaggatgtagggcattcagcactctgaacttggggtttgggttcagccacagctaggaagaaggaaaagtcctacttgctcccaggctcttgggagaggtatggctttcctatagttctaccgtgctcctggtggcctagagcaggctccgtatccccttcggcttccaaattcctcttgtggaaactgaagggctgttgggcagcaggctatgtgtctgctttgccactgggatgccggagcgttcagggaagcatgcccctcagggaaggcagaatacagcctgcgatgggggggaaggggtggtcccagcctgtgttcttcctgatgagaaacagcaggggctggaatggatgccatggctctcagttttctgtgtacccagacatagctggggtctgagaggatttgaaactagtccccatgccaggcagaaaggggatagttgagctggggatgaggagaatcgggtttggttctggtgagtgccggtagtagagaggggctgaaggccttctctgggagatttagacacagttctatggtctccccccacaactgggatccccccacccaaggatcctgcttcgggtcctccttgtccaaactgctctgctcatggtggatgtgaattcagggtgaagcagggattaaacaccctttgccgaaagggatacctaggaagggaagctcattggctaaacactcgggagtgtatctagatccctcgttagcatggagaaccccaggtttttatgctacctgactagttgtcgtggtcctctcaataggatgtcacagttacgtggtccatccaagagaggtagactctggctggaagccggttccaacacctgctgttctcgattacgagaattctagggagttgggaggtgaacctgtatcaatcttaccaggtctactgtctggtggtatggtctacttgcccacaaaggaccagctggggtgacttcccatctccctcaagaacttggcctaggattgatggaggagcagctatgaggacaaaggctagattttgtctctaaagttgtctatagagaggctttcactgttccagcggcaggtgccgtcagctccaggctgatagacatgatgtataggagctagcgtttggactgtcactgagatcagccgctcatcacaggtgttaaccccatggtcattcaggctcgctgggtaccagcacagcccaagatgaaaaaatagctgagctcaggaaactgcctcatctgcctggggggcagtggattctacgtagtttgaaggcaaatgtggcagccgttctgaaagggcttacagataccttgaggcatctcaacatcaccaagaataacatttaggggcttgatcatgaacagtaaatgagtattcttcttaactcaaatcaccatcccagtatctggggccatggaacccgggtcaggctgtgttccaggcaaaccccgtgtcctgacaccgtgctccagggtctaggtccttggcaagctcattcctacacccagaccttggcaatactagctcctctttctggaatcctcttcccctcacttaaccctaggtgtccctgtctggctttaagtcccctctttgaagactctaaataacctactgtgtggctggccagctctccctctcccagcactatccactcttcatagcctttgtcatctcccaggagtccccctttgtatggttgtcagagtcaatgtcttccacccaggaactcgtgcctgctctgtcctgggcacatagtaggtggtcaggaaatggaagacgatatggttcatgggtgctgctttgccatcccagtttcccgatgtgtcattctctagggacatctgtgggacagctcacaaagggcttacttttcagggggtgcttgttctccatctagatggggagacaggaggatttgcctagattgaggctctgagatctgggcatctgggtctgggagtttatccctctttgcatgtcgtttgcatggctcagtttggaggttctgcttcctcttctggtttcctggttggtcctcagatccacaggactgctccaacacttcctcagtgtcctggatgaccttgcctgaccagcccagggacaatgtccacagtgagataagtcccggagggcaggcaagtgtggcagagatggttgtgtggtatagatctctcagggatgctcaattagggccttgtgtttcctccccacagcctcctgacatctgcaccatcaccatccccacttcacagatgagcaaactgaggtttgggggaagctcaggcatttgccacaaatcttgggactagcgaaaatcagagtccagtttgggtctcgctctggtggaagccacaacctggcttaatcatcatgacaaatgcctgtcttagcttccaaaggacccagaaagctctctccagaaccaagacatggggtttgctctattggagactctcagtttcctacctggtgttaaaaccgctcctgaagtccgctccttgtggccccctagttgggccagctaagcctcaggaaaatgtggaagggcaatgggcaagggctttagatagactgcaaaacactcaaggcagaaaggatctggacatccgagctgaggtggtatgggttgtacagggtgaggcaacgtgtgggaagagacccccacccttgtcctagcccttgcagtggcgttggggtgtccagcatgtggagggagatcctgcagccccacccctgcaggaccaggagacacaggtctggaaattcacaagaaaatctcccacgtggttttgattcctccctggaggtcccttgcccagatgtcagaggtctggccattctctagatatccctggacattttcctcactccctactgcccagtgagtaggcacatcccatttcccgctcctttcccatcctggaactctgtttttctccactccatgcttttctgtcccgtgagtgtcctctcctgccatacggataaaccttccggaagctgctccctccctgtagacagccaggagcctccttctgcagtgcccagagcacccaagtgggttgcgagtgccagttttattactgtcctgctgggctgagggctcccctagcctggtgttctccaggaagggagcccaaccagctgaccaatgtctatccatcccccatgcaggcaatgactcaggatgcagccagcagccacaacgtgcacagaggaccgcatccagcatgctctggagcgatgcttgcatggactgagcctcggacgccgttctgctccctggtcaggtaggtctgggggactgggagacgttccagagcctcagatgaaggtttcatctggaacctctggtcttgcttcttggatctcttccctaagaacccagccccttcttatgctggtctcagctcagatgccgcctctgtggacaactttctctgtcctttggaaccagatagatttggattaagactctcactgactacacagccttgtacaatccacttgtccttgtgagagcccgatggataatggaaatacgaatgactagaagcaggaacctgggcagagagactgtgtaaggaagcctagcaccatagtggcacagagtaatggtcagtgaagaacatttttccttctcccccgccccttcccaggttttgataacagccaagtttacatagtgttggggccaagcatcattaaataagaaataagggaatgtctgacttctgcgccgctgctttgttattgttgttgctgttgggttggtatttttccttctctttttcttgcagtgctaaatgttgaacctaacatctcatgcatgttagacatgaatctagaggcacatgcaaacacttccaggagcttccagggttttgaaaagcacccacacacctgaggaagcatggctcccactccgagaagaccatgtccccttccaccccctgctgtgatcattccctgccccacagatgcagccccccgtccctgtggtcacctcttgaatttttaggggtttgccctggatgatttcagggaagttaggaaccagaaagtcccagtgacaaggaagggctcagagcttttcgacgcagtgagtccagcttccccttccttcctgggctcctctgccaagcagtcttaggaagacacatgactgtctcagacacagggtggagcgcttgtcttgtagcaatttttacctctggcccgacttccttgcatctggtaggaactggcacccactacaggaaagctgggcagggacaactgttgggaccaccgccacccccagaggtgcagggacagagttgcagcaggttctttggcctctaagggattctagctttgatcaacaacctcagtggctaaagagccccctcagacccagggctaagaaatgggttcttatgtcttacggacttttttcttttgctatcatcatcgttattgctactcagtatatttcattatatagcccaggctggccttgaactacatagcctacggtgccccttaactcatgatccaactgccccagcttcccaaatgctggatttcaagacctgtgccaccaggtccggtttcacatgtcctggtggagcttgggggcttttacctgatgccatttctccaagactctatttagaaagaaatattcacatatactcttccatatcagagttccagaataaaccctcttctctacagctctgcctatagctagccagagagagtgaaactaaccactgatctaacttgccccctgtctagccgggctgtgtctgaactgctggagcctacaggagctggtcagcagggacccgggccacttcctcatcctcctggaacagatcctacaaaagacccaagaggtgagggtgaagcagacactgatgagcacagatagaattgacattgtaaaggcaggacttaggtcagctctgtggctcctgtctgctctgctcctgcatggaatgtcctatcctgtcctgtgtaaacacacagcgggtcccgtgtggacctgagttcatagctatagcttagggtagatgatgctcttagtcagggtatagacctgaaggagggaagaggaggcagcgaggaagcttcactgagttcctttcctgagaaggatccacagcaacagagacaaggaagaggactctaattgggaagggaagctggggcctcctctgacagctcagtgtgcgggcttctatttacatacgtaatgctgagtggggctgaggttccaggatgggccaagttcccaaaatgactcaagctgtttcatggaggcttctcttttatgtttcttgtctttctgagttgtaagtgggattcgtcatgtaagtccgttcctgatggcagcactcgcggccaccatcctggtatgagatttacctggtgtgtttgcttgctggtcacaagtaaaccaattcaaaaccatgctcccaatttctcatgaccacgctgtgacacataaaggatccactgccttggaatcacggcgcgggggagggttgtggaaggtctcaagcatgttgggagagaggagaagagaaggaaatgtctgaattgatctactgaggtcagcacagaagcgctgtatgccacctgcccacaagttacacaatggccgaaagaccttgaactccctctcatctccacaggtccaagagaaaggcacctatgacctcctcgccccgctggctctgctcttctattccactgtcctctgtgtaagtacagccaggccagaagctgagagatgagaggggagagtgggctctacctgggccagaggcctcacctctctgaggacaaacaaacttgggagccaggacactcgagatggaacgagaccttctgatagcaccctgggaagcctctggctgatgtagatggctgccatggtacctgctatctcttggcttctatggaggaaccgtgtcatagcgcggtcatgagaagttacactgggagacttttgtgtccagcgcatctttcacccgaggggtcagccttatctgatggggttatccctggcgttcaccagtctgctgaaccaaatgacggctgccgtactgaactcagtccacccaaagaataaaaatatttgcctctcatgagaatatttacatacgaatcgtgtttgcacagaacatagttcctcaaagggagtagaaaccatggcaccatttaccacgacctccgagctgacagcttttcagagagacttcctctctgaaaagtgttggaaaaactgtggtctgtgggctgagtgtgtggctcagtggggagagcacttacctagcaagcatgaggccccaggtttgatcctcggcactgcatgaaatcagcacttaagaggtggtgacaagctcaaggccagcctgggctacttaagaccctatttgatgagaacaaggtccattgccacagagaagctctggatagcatcttgtctgtccatagttcagttttccctgatcttgtcctggggtgtaactgctccctggaagtgcgcgtcctttgtgagatattccagagagggagcagaaactgcctcgggatacaaatgaactcttcctcacctattcacctttttctcttttcttttttcaagacagggtttctatactatacatatatcatatatacatatatcctggaactcactctgtagaccaggctggcctcgaactcacagagatccacttgcctccgcctcttgagtgctgggattaaaggaatgtgccactaacccctggatacctacatactccttactgtccctcttccaccctagacaccacacttcccaccagactccgacctcctgctgaaggcagccagcacctaccactgcttcctgacctggccagttccctactgcagcatctgcagagagatgctcaccttcattgatgctgaactcaaggccccaggtgagtaccaaggggacctggggtcacatgactaggataaccagccccctggaacagttctttacccatgccatccttgcccacaccatggtgaggaatgtggagtgcgctcttcacggtgtgcttagcatcagatggttgtgttcacacacattaaggcagtcaatacggggagttatttaagtgagaattgttcagggaagctagcacaggcctgcctgtaccgctattctgattagctaggacagcagttctcagcctgtggatctcgacccctttggcaaacctccatctccaaaaatacttacatcatgatgcataacagtcatgaagtacaaaaattacagccataaagtagcaatgaaaataatgttatggttggggcaccaggacatgaggaactgtatgaaagggtcacagcattaggaaggttgtgaacctctgataagctacggggtggccagggctgtgcagatcactcagagacgtctccaggataatgacgagatgtgttctctttgccctgggagcaaataggcagttgtaggagtggctttcccagggatagtgcctgctgctaagaatggagactgttaatggctgtcctgacaaatgtggacaaagacttcatgtttccaggttcttcttcttttttttaagaattatttatttattttatgtatatgagtacactgtagctatctgcagacacaccagaagagggcatcagatcccattacagatggttgtgagccaccatgtggttgctgggaattgaactcaggacttctggaagaacagtcagtgctcttaactgctgagccatctctccagcatgtttccaggttctttcatacttaggatctgaaaagtaagagttcttgagaaattgtgactgctgttttaagccacacttatgcactttgtgtaggggtggcagtacgtgtgtgtgtgtgtgtgtgtgtgtgtgtgtgtgtgtgtgtgtgtgtgtgtgcctgccttggtgtgtcagagaacagcttggtgacagttctctacttccactgtgtgggtcctggggatcaacttcaggtcaccagacttggcagcgtgaacccttttctactgaggcaaatggtgtaaatgctgtttttagatgagaatcctaagaaagccatgcttcagcaagaggaagaacaaccaggtctgattccctgaaaggctgcccagaacagagcgattcaccacggttctatttcagggaagttatctctttagattcctctaaagcatttgcttagcatcaacactctctcttgatattcaaaacccctcagtatatggaaactattgctacagaagtgtttttaatatggcaactgcccaagggaactgctgcaagcatttccattgaacttgagcatcgttctggctttccctgtatgtattttgcctatgcaaagggtatttcttcatctggaggggataaattttaattttataacacccaattgcttatctaagtgtgagagactcatgcgcatgagtaactcggagccagcaaaggcagactaaacttcccagtttaccagccccatctaggaggaaaagatccaggactcagggcagaggaaagaggagcattgttacaagtctgagagccagcctgagctacagagtgagagcctgcttaaagaagaaagagatagaggcagagagggaaggaagacaggagaaaggaaaggagggaggcacagaaggaggggggaatacaacagagataaaaacctaaaaaaaaaaatctaaaataagaaatgtgagtaacccacacagagatgtcagcattaactaaaggactgttaattgaagaaagacattgtggaactgaaccagtatcataataacatcaggtattatggaaataatgtgtcccaatcaaagtaccaaggtcatttaaactggaacaactatagcctacttgaaattataaacagactacagaagcatttgatttattcatttgctatgtgtttatttatatgctcttagaagagactaagaaggaggtatttgcatcactaggtctttcataatgctaaagttattaaaatagcacctattagtgtagaaatagatcggtagagccaaaggcaatatctagaaacagattaaatacacaaaagctatgccatggtaaagaggcaccctcaaaccagcaacaaaaaagctcagtcacttaataagtaccatcaggatagctggcagatcactttagaaatgagttaaaattctaatcctgcagagcactggcagttcacacctttgacctctgcattctagaggcagaagcaggtggacttctgtgagtttgaggccggcctggtctataataatgagttccaggccagccaggactacatagagagactgtgtctcaatttaaaaaaaattaaacgaagttccatcttaaacataaaataacttgcagataagtaaaagatttaagcatcgaaaacaagagaataaaaatagtggaagaaaaaaataggagatgtgaacctggtctgcaaaaaaagtggagtggccaaggccattcctaagataaagctacagagagctatgaggatcgggaagtgtagaactgaacacccaaacatggaacacaaatgacaaatgtgtgtgtgtgtgtgtgtgtgtgtgtgaaattatttcagacctatggaaggttcttttgagtcagttttaaaaattgtcagacacaccagtgaaaatataaatatttttatattgactttatatatcaattatatattgaataaatatgattcacatgcttcagaaaggacccagagaataatggtctctaggaccgaagcagatgcagaattggaaggagctattgccttccttttcaaagtagctgacttttaaaaagactgaaaataccagtattgatgggaaaatgatgagggctggctccagcatcacccttttacaccactattccattcctgaaactcaatccggaagactaaccacagctgtgcaaagatttagcagagagaaaatgtccatcaattgtacccttcctaggcgttaaccaatgcagaaccctgattaatgaccatagcagtcatttggtacgggtgctcttcagttttctaaaatggaggctggcgaaatggctcagcaattaagagcaaacactgctctcacaaaggatccaaatttagttcccagcacccacatgggacagtgcacagccatcttaactccaattccatggaatctgtcaccctcttctggccacctggagcacctgcatgcatatacgcactttcccacataccatatacgcacatcataaaaataaataaataaaatctctcaaaatggtatttaaaaagcagcacttagattattagatgttgattagctaattgactgaaacccccatacatgatacattgtaatccttttgctttcccattgtaacgtttacttactctatgttgtgtttagcatccggggcatttagctgttgtcatgtaaacacaagctgactgaagcattacattctataccccaactcaggagccctcaaaagttcaggactggattttcacttgtgaattcttttgcaagggtttacacctcacatctccagccgatccgctgatctgtctgctcatcttaaatgagcagtcagtgtaaggtcagtctctttcatggacctgccttgacttgtggctgttgacccgggttccctttccgggagacaaagcttttctttccttttgcaatttcgaggaaaaggatttaaactccggacgccttgacggtgcctctgcgcacacagaactgagtggctccttgatttgaagcagtccagggagatcgctgtacaggggaggggcatcacctaaggagagagactgcttcctactttcaagcagaaccatgtggctagccttagctgggtgcacgcaatgctttgagatgatgcttttgtgggttgttggtcagaagcgctgttctcagcagcccagcaaacaggtgtggagaggcaggaacttgggatgatggcatgctaaacttgggagtgacgagccagacagagcagccactgatggtggaaatgaaggacgggcccttcatcaaaggagggagggcccagcggtggctactcactgctgagggtccttggtatgagactatgagaggtgtcagatacacacactaaggatctgggagaggtcagatgctgggagcactcacagagctgcccatccctctttgagggtaagcagaactgaactaggaaaccatgacctctcctggcggcggagaatcacttccaaatagctcaaagtctcccacagctctatactgagcctgtattgaagttagagtccattcattactaagcagtagcaaggtagagctggcttcaagaaaggcagagaagtatctaggcatggtggtgcatgcctttgaccccagtgcttgggaagctgaggcaggtggatctctttaaactcaaggccagcctggtcaacacattgagttccaggataaccagagctgcattgtgagaccctgtctcaaaaaaaaaaaaaaaaaaaaaaaaaaaaaaaaaaaaaagcagaagaaatggatgtaaatttctcacataagctagaataaaattcaaactgagggcatgaggtgcaaactgacaagattaggtagaaactaaaagacattagaggcaaactgagctggcatcattcagacacttctaatggggccagagctttgggcatgactttttctatggaacaacaacagcaacaacacaaaagcttgtgactttcctcactccgtaggtaggtaatttcacagaagatacgctctagtcctcagcaagtagtgggttaaagttaccctcttctacgtgaccagcaggtaggcttattggagagcatcttagtggggtttttggtgggacttacttctgcatgacccccttccatctgtagtgagcctggccaagagaagctgtaggagaaggctggaacagaggccagggaacttgagccattgaaggagaaccaaagagctctgtggttcctttagcttcatgccaggccattgattccaaatcctgggtcagagtctgacactcattggctgggaggccctttgataggactcggagcgtacataagcctcagtttccccatctgaacaataggagcacagtgtagcctctctctgtctgtctgtctttgtctctctgtctctctgtctgtttctctgtctctctgtctctccctctgtctctgtctgtctgtctctgtctctgtctctctgtctctgtctctgtctgtctctgtctctgtctgtctctctgtctgtctctctctctgtctctgtctctctgtctctctctgtctgtctgtctgtctctctctgtctnnnnnnnnnnnnnnnnnnnnnnnnnnnnnnnnnnnnnnnnnnnnnnnnnnnnnnnnnnnnnnnnnnnnnnnnnnnnnnnnnnnnnnnnnnnnnnnnnnnnnnnnnnnnnnnnnnnnnnnnnnnnnnnnnnnnnnnnnnnnnnnnnnnnnnnnnnnnnnnnnnnnnnnnnnnnnnnnnnnnnnacaggtgctgattctatcgatttcgatcttgcagggggcagtaagcactgggatgctgatactttcagagataggtcctgtcaagtcaaaaagatgacaagggacctggggatctgggcctcccccagtaaagtttcagagactccgttgctatgaaaacaagagctggtagtctccttaagtatggaggaagtgggctggttatcaaagtagggccttcccttttttcctgactccacccccagtggcatcaacaacaccccctccccgagaacagccctttgagctgcagaccatgtgtttatcgaatgttgattctgtgctcacatggtgatacagaatatcatacttgcctgctaaggactgctctgcaatcctggtcggtggcacgggcactttacatgtgaggcattcggcaattttgaaagcacacaaacctcaaggctgtgtctcagcaggccacacgcagttctacagggggaggaaatgatacaacacccccaacagatgcataagtgagaaatctacttcccctgtccaaacaatacggtcaagtgtgggagaagggacatggactttgtgtgacaaggacctcggttttggcacgtactagctagtgaccttagacaggtttctccatcaaagcaggacttctgctgataataatggtgcaggtgtcattattgtgtgctcacaataaggcaagtgtgggtcccatgctgcctcagaacagctcttggcgtagtaacgagcgtgctcattgtttagataatgaaaccggagttagatggaaaacccacatctacttaattccaaaagtcatggtgaagtcctcttccatttacttgatgccttattcctaccaagacaggtgacccctatacttgggagaccccaatgtacttctttggaggaactttcccgtataggaaaagtctgattcctgtgtcagtcggttctagtatgttcccaggtcaggccctagcccgtcgacaaacttcataaatcccataacctcacaataagcagtggaggccatcaccaagagaggtcaaaggacactgagggttgtcctcagattagctgtttgatcaaatggttgtgtctctgcttggaattgggggcgtcttgactgttcagacaagccattagctcaaatcacagcttcctctgggtcagtgtgtgtcaggttgtcctcccgaatattccccctcctgctgctttcaagttaagcagacaagtacaagagagaacgacggaagcagcccccacactaaactgtaccacagcccaagatgaggggatggcaatatccctacatggagacataaggaaaacacgacagagggtagtcctcattgtgaatgccacagaagagtaactacagggactgcagttgccaacactctcccagagtcaaaagacaccttatacagccaagtggcaaaaagctgggcagttgggcttggggccaggacaaaagattgcagcagaatgcagggggctgggtagtccgtagcctagcattttggagaatttacatgcagggacagagacttcatggcttggtgtgtggctggctggctgtccatcctagatcaacaaaggccacagggagcagcccccactctaactgcaccacattgggggtgtgtaattaggggcgaagaacccctggggagtgggctgctgattttaaaagcactgaaggagctgttgctcagtgagtaaagcacttaccatctaagtatgaagacctgagctctgattcccaacaccaggtaactctgggcgggagtgacagcctgcctgaaatcccagtgcttggaaagccaaacccagggtgtgtcaaggcaagctgcctggcgagtctagcagaaccagcaagctctgagttcaagtgagagatcctggttccctttataaggtggagaacaattgagaaagataacatgtgccaacctctggcccccacatacactgaatgcacattcatacatacatatggggccatagaccttcagacaagcatatacacatacatgtgcaaaattaagtagaactggagaaaatagatagagattcaaggcgtgggattctacccagcaaagcacacacacacacacacacacacacacacacacacacacacacacacacgcaaataaagtcaagagaagatttgcttatctatgttgcttgcacgggtgtggtacaggcagagggtgtggtgggattgagtttatctttgcaatgtatgtgaatggccactagatggcatcccaactcctaagagtaacagctactattttaaggatgctattagcaaagaagacctaacattagcgtctgtggcaattatagaaagccaacatcacacaaaaggccaacaattaaaccaattatgtcccaagttagaggaacatgaattggtaatttcctgtcgtttaccaaacaaaattcatggcctttgtgtttacagctttcttggttttcctgcatccacggggaattccctccagccaccccagctcagtcccagccagggatgccatgtgcccagaagggacttccttgcgcctatttctgaacattgtttcctttcggtgtgtttaaagtcacaggggaggaagggagacaggctggggactgtcagagaaaacaggcactaggcaagacttaggtcgctaaggtgagaagccagacagagaagtggagagtggaacagggtgctgcctggccaactgaggctgagcatggagattgatgggtgcctggcacacacccctcccccactgcagggagacaccaggcgttagtgacactatgatctaggaactagttggcagcctcctgggcctgcattctccctctcatgaagttctgtctaccaggaaggccaagctggtgcatcggaggtgggccagggactaagctatgagcagccacagagttgtctcctctagctgtctcttcaggggggactgaggaccagggtaaatgacctgtctgcccaaggccaggtgggaaaacccagaataggacatgggggatcgaacaacacatccctttgtctcctgctgcctgttcccaatctagggacaggacctggacaaaatggtcaagaaaagacagagggcagcagagaggctcaggatggctttgaggtgaagatcgaagtgttacgggtgaagtgaccattccacagaagcaaagcacttagccaagggccaaatagcaactgtcttcccaatgtttgtctggagcctcctggggcactcccagcttgatggttcagaacctggcttgtaagaggccagggatgacattgcctgggccctaaaccgacctaccctctcctctttgttgtttgttggtccacaggaatctcctaccagcggctggtgagggctgagcagggcctgcccgtcaggagccaccgaagttccactgtgtgagtgttcttgggggagggagaaacaggggaaggagcttccaccctttcccaccccctgcctcctgcactcacctaaaaccacacattctagtcaccgaccaacggggaaccccgggagctgaggctgctgctgctgctgtggtgtttagtgcctgaataactctttctaatcttccctcagattcatgttttaatttttaataaagtgttttgtatgcatgtatatctgttcccacagaggttggaagaagacatcagaggtcctgggactggagttgtagatggttgtgagctgccatgtgggtgctgggaatcaaacctgggtcttctggaagaacagccagtgctcttaaccactgagccagctcagctctccagtcccattcatctctctccaacccccttccttcagattctcaaatgggtcgtccagcacacatgactttgtttatatgtgaatttcaggtggagaaactggagatgagagagacaaagtatgagcatgagcacacagttagcaagtgtctgtctgagtcaggatttgaaccttaggcttactcaaggacccctaccctttccatggtgtctttctcctgttgctaaaacaaaagctttctacgttctttttgatctggacttatactaaaaatatgctttaatgggcatggtggcacacacctgcaattctcacatggaaggcagaagattgtgagttaaaggccagtctgaactacatagtaaaaccctatttttttttaattatttgacagtgtggcataggtgtgggggcagagtttcatgataaaaccaaccctatcacatataatgagttctgtaccgtccttacttatttgcctattcacttagttattaccctaacaaagaccagccttgaactcttgttcccctgcctccgtgtgtcaagtgctgggatggcaaacaagaaccagccactgtgtctgagtcctgggctgtagtgtgtatctgtgtgtgtgtgtgtgtgtgtgtgtgtgtgtgtgtgtgtgtgtgtgtgtgtgtgattgtttaaagaactttagagtgacagggtcttacaccatagctcaggctagcccaaagcttactgtgtagccccatccggcttgcattttgtgtgatttcccctgccttagtctgctgagcgctgaggttcccgacatgagtccacacccctagccttttccagtctgcagctggaaaatccctagagaagggacccacggggaggactgccggtcgtctgagtctgagttgtcagaaaccagggagccaagacctcatacacacactcatgcccatcacaccattgagcacccgctgcctaggtgcttgaaacacttctaagttaaaaacgagtcaacaaaaaagcctgtggtgaaggctaagaaacagaaaagacttagaaagtttaggcagtcagtccccttacctttcgtggatacggtccaagatacacagtaggcacctatggctatggatagcatcaaaccctctctacatgccaagaaatttcacttcaaagaactttcggtgtctccttggcatagccaaacaggccagcgtgtgccttgattaaatcattgaccacaaacactgtagtgcctggatggttcatctggtcattaggtcacagacaggccatgtatagggtgatgtaccagtgaacggacctgtattgcctaaggcttaagagttatgaaatatttatttctgggattttttattttatatatttggagctcgcaggccactgaggccttggataaggagggctatgtgcaatagtttagtaaagtcaacaagggctttccagagagctgaagaggtgagtcactgaacaaccggcagtgccttttcattgtgtactgcagctcagagcattattctcttatcaaattaaaatgtttggtcttattctaaatataggggtgttttgcctgcatgtctgtctgtgccgtgtttgtgttgctggtgcctgcagaggtcagaagagggcgtctgatcccctaggactggggctgcagatggttagtgagccaccatatgagcagtcagtgctcataaccactgaaccatctctctagcccctcagcactattccaagcatacacacacacacacacacacgtatatgcatatatatatatatatatatgtatgtatgtatacacacacaggtatatgcatatatatatgtatatacacacacgcaaatgcatatatatatatatatgtatacacacacacatatggatttatttaagccccatattaaccctgtgagagagggctttctccaataaggataccgaagaaccaagataagaagaatgctctcatcttcattgtgtacagcagagagatcaaggtggacaggccaagggctcagttagccttgtcttgcatacggtgtggatcagcacagatccatggaaggaatgaccaagactctgcaggggcccagccaggcaccgttcaagatcctgcctccttttaattctgaatagggaaattaaaaaaataatagtaatttaaaaactcagtctctctgacagatagggacagccctgtccttgtgctctgaaggcagacctgcagagcctggcaggaactctacctgctcgacaatgcctatttgccctgaggtctgatgtgggactgtgagagtgagggaggttctgactgtttctgctacagcctcctgggtcctgaatcccacagagtgggggttagcacagagaagcgagagagaaagctgcttgttgtcaactgcctcacacagctctggctccactgattctcttagtatttgaatgtgtttgaaagtctccataacaaagacatttgaaccctgacaccacaagggtcccaggtggcccagcccacactgtcccagccccagactggagtggaggataagggcctgacttggggcagatgtcagtccctcaggccacagtaaatgacaacccatgacaggctgctctctctcccctgaaaaatgatcagtgagcttcaagttaccttggtgaacagtggtccttctgtgagtaactcgtatccattcagacttctcatgggaataagtgattatgtaaaagtcaaggcagcctcagtagactaagggcagagaactgtgggccacactggaatacgaagagtgaccctgtcttaacataaaacttcaggagaaatccacggtgaaaagtcaggctcacacttttgttgttgtttgttttgaggaagactctcttacattcctagctggcctagaaacttctatgaaacaaggattgcattgaacttctaactctcttgcctccccctcccaaatgctaggatgatagacgtgcattctcataccaggtttatgtagggatcaaacccagagcttgtgcactaactgagctatacccccagctccttaagatcagttaaaaaaaaacatttcttttatttttaattatttatatgtgtaggtgggggtggaggagttaggtatgggtttgtgcagaagcctgcaagggccagaggtggctgacttacaggtagttgtgaaccaccatgtggatgctgagaactcagggtctctgcaggagcagtgtatctgatcactgccaagcctaatgttcagcccttcaggtttggttctgaaaaagtctttgaacactctgcttgaaaagcacctcagaataatcataagcatgccccatggaaatgctctcccaacatcccaagccccttccgggagactgcgtcacttgtgttgaggtgacctgtgtggatttgagcccctgggcacagagggtgcagcgcccacacagtccatcctctgtgtccccagcactgtgctgttgctgaacccggtagaggtacaggctgaattccttgctgtggcagacaagctgagcacgcctggacagtcaccccacggcacctacaccaccctgctcctgcatgccttccaggccacctttggggcccactgcgaccttcctaaactacaccgcaaacttcaggtaaaggctagggagcctaggtctatgaagaagtattttgctacagagagggtgagaggggtcaggaggctgggagcccttggtctggtactgcaaactgggagaggcgggccaggaacatacttgtctcctggactttcagtccaagacaatagaagagctggaggacatcttcaccgagacgacagaagcccaggagctggcgtctggcattggggatgtagcagaggcccgagagtggctccggaccaagctgcaggcagtgggagaaaaagcgggcttccctggcatcttaggtaaggcttgagggagggacaatagctctgtccatttccctaccatctattctggcatgcagagggtgtacaccagccagcctggcagctctgttccacagagccttccaggggccaggttcttcagcatctgtgtgctccctgagtccccaggcagagttcctgtgggcagatccaaggctgggttgtttgccttcatgttagcaagaggaagagagagctcactgagagaatggtgccacttgcattactttggtatacgtttctgaacccacttacatcatggtcacatcttgctccaaaagaagttagagatgcccccctgccactcttgtcaccatagaggcgggtggcataatgtctgagcgccagtgggcagcttcaggtactgttcctcagacaacctcttaaggagcctagcatggtggcatgcacctgcagtctcagcactggggaggctaaggcaggaagtttatgggtttgaggccagctagatagggagaccttgtctcaaaacaaacacccaagccagaaggtggtggtaagcacctttaatcccagcacttgggaggcagagggaggcggatctcctagttcaaggccagcctggtctacagagcaagttctaggacagccagagctacacagagaaactgtctcacaaagtcaaaaaccaaacctaacaaaaacaaaaacatgcaaacaagacttttaaattagtgtttctatttctattcttttcctgattgtcagtaaaagaagggcttagaggctgtgacttggccactcccacagagtttgtagggggattgggggctgccgtctacatggtgccgtaaagaaaggtgcagtagctgagagtcgggtatcccagcccatccagttctgtggctcctacctgtactgctccaactctggcctcttctgtaaggccaggagactgagctggccattctgcaaggccccttcccagtcccctcttcctgtcctccctgctcttatagacactgcaagccctgggaaactccacaccatccccatccctgtcgccagatgctacacctacagctggaaccaggacagctttggtaaggggaagctggttccagactccagctgtctgtctgaccctgcatctatgaatgccttgcattcctgtgggatctcccactacacaggccatacataggcctagtgggtgaggggcactatagccctggagcaaacgcctcctactctttcagatcccatcaccctctgcaggggctcaaaggacaccgacctaaacactgcttctgtctccctatagacatcctacaggaagtccttctcaaggaacaggagctgctgcagccagggatcttgggagatgatgaagaggaggaagaggaggacttggagatggacaggcattgcgctgagagggactctctcctctccaccagctccctggtgtctcacgactccacactgttgctcacctcctctcaggcctcagaaccggtgctgtcccgccagatgctgaccacctttgtctcaggcctctcggatggcatggacagtggctacgtggaggacagcgaggaaaactcagagtggccccaaaagcccggcagccagaaacgccagggtcatcgcaggcctgggcagaagttcaacaggttctataaactcttaaagagcaccagccagttagtcctgaggagggactctcggagcctggagagcagtgtagacccaaccctgcctctgcgaagggctgggagcctctgcagccccttggactgtcccgctcagctcccctcccgggctcagcgctcacggtccttgcctcaggccaagctcaccacccaactccccagatggcttctggcaccaccctcacaccaccagcgccgccgtcccttcctcagtggggatgaggaccccaaagcttccacactacgggttgtggtctttggctctgatcggatttcagggaaggtggctagggcctatagcaagctcaggtaagaatggggacagggtgtgtcactttcccttgtgcatcaggactgtggtgttgatagaatttagagcccacctggagtcctgacgtcaccgtgggttcaccattcatcaccccctcaccaggaggctggagaccagtcaccctatcctcacacgcttcttcaagcttcagttcttctatgtgcctgtgaagagaagccacggaaccagccccagtgcctgcccatcctctctgagccaagcatctccactccctgcagactccctgaagtaccccagccctacagtatgtcccaaatctccagccgactgggatgggaaagaggaatagatgagagtgggttctgggtattggtttaaaaaaaatcattcagagccatctcccgtgtctgtaagcatcttcccctgcctggccctcacttccaggtccctgccctgtacctgggtaggacattctgccacatgacaaagatggaataccatcatatttctctagaggcgtagagaagctcaacttggggtttcagatatagccctgtgctctgtagctttctatgtggctggggataattcttgtcccttaccccaggaccttggcatggccccatgggaggacagtaccaatgacatctctcactacctcggtatgcttgacccctggtacgaacgcaatgtgttgggcctcatgcacctgcctcctgaagtcctttgtcaggtaaatggacttcgaggtaagggttggagcccactggctgctggcattccaccttactttgaggagtctggctttggggaaatctatggagggccaggtctggcttagaaaagggggggcagaatatgtgaggagcaagatgaagtctgagcccagggcactaggaatgagagctggggccactgtgctaaatggggaagggcagatcctcagaagggtaaaaaggactttagatgtaagttccctttcttatctcctggctcgtttcccaggaggcctgagtgaggcaaggtggggtacaaatgatacattgggctccctgcccaacactgtgtccagacccggtctcacgttcgctctccctcttgctctgtctgcctccaaactgttctctctgcctctccgtgtgtccttacctcccttcctctgatggcttcctttgccctgtcacctctcccacctgacatggctgtcccatctaccacagcagtccctgaaggcagactctcggcccctggagggatcggccacccagctgcccatcctggccgatatgttactctactactgccgctttgcggcccgccccgtgttgctgcaggtttaccagacagaggtgaggcatgccgctgttctgtttctcccagactccctggttagctatggccatcatggcccggtcccagcctgtgacctgctggacctacagcactccatcctcacccctggaagtccctatcctggtcccacggggtcccacactgactttcgtgctctacttgtgccccctccagctgacctttgtcaccggggagaagaccacagagatcttcatccagtctctggagctgggtcactctgcgaccactcgggctatcaaggcttcaggtgggcaccgagggaacccttacagggatgggcaggaggcggagtcagaaagaagagggagcaaggggggggggggtcctgcgaggagagcgggactacggagaggtagaagcggggtgcaggagtcctggctttggggagttggagccttgaggagctgagaccagagggagggggtacccagggaagtgggaacattgagtgaacagtgtatctgtgtgacccaggtcggggtaggaagaggctgggcattgatgacgaccgggaggccgtccctctaacactacagattatttacagcaaggtaagagaagctagtgctgccgggcgtggtggcacacacctttgaacccagcactcgggaggccagggatatacagagaaaccctgtctcgaaaaaccaaaaataaaataaggggggggggcaggccagtgctgggccccttcccagccggggcctgctgctgagccctcctcaccagagctggggccccgagctgaatctagtagactcccagacttcccttggtaccaagaggtggccctttaacatccggaccctcccaaggcatcaggctctggggctctgggctgaagggcgtggctgcactgccttccagggagccatcagtgggcgaagccgctggagcaacctggagaaggtctgcacctctgttaacctcagcaaggcctgccagaagccggaggagctaggtgagtgggctggagaggatagcgggggagatgtggcaggggagtcccaagcctggtctgagctacccttgacctccagactccagcatggaggcgctaacgctaaccctgacagaagtggtgaagaggcagaaccctaaatccaaaaagggctttaaccaggtaagagcttgtttctctcatcttccaccctgagccctggcaggagtggggcgtggcttgtatgcgaaggtggccttgtgttgtaagagagagacagagaaaggattgctgggaaaggagaggcagatgaagggtgtggttgcgggtatacccaggtgtggattgtgaggatgtatgtatgtggaaaggttgtggtcattcagggtcattaggtctgagccagtgtgggtgccacatcagagaaccctggggtctcggagttggagtgggcagtgcattgatccctcgagactcggtaagaggctgcggaggagacagggcctggcatagttctcatgattcctcctctgactccatctcaagagctgccaggcagtcctgtctcaaactctcccagtccctatgggcaaagaagcacccagggctggcagatgtatgaccggggctctggggcctgaactagggcttcccttccagatcagtacatcctacatcaaagtggacaaggtgcagatcatcggctctagcagctgcccctttgccgtgtgtctagaccaggatgagagaaagatcctgcagagtgtggtcaggtgaggatgggggcctggggaggggggtctttcttttctgtcctctgaagcctgcagagccaccttcttacatcaccctgttctataggtgtgaagtgtcaccctgctacaagccagagaagagcagcttgccacccgagaggtccttcagccagccagcagagactgggtccgacctgtgctcccttctctgccttcccatcatgacattcagtggggctctgccctagtgcagctaggtacgaggctgggcaggaagagtacacagcttctcctggactactcttcggggcagccgctctctacggagaacagaattgccctgcactgcatcaggatccctctgtaagccctgccatgggccagggatgtggccagtggtatctggagcccctgagagctgatgaagaaacaagcactggagaaagaaggacctgggatgtccagtcttacagatgcctctaagcagagggagagggatgggcgagtggccccaaagaaaggtgtgaggcttgtctgtggtttaggcctcctttccaagccctgagctgaggtccatctttggtttgtccaagactcagggtccctaactagaggtcattctctctaaggcacagataggagagagatgggtgagacatttctttcctggtctcagataccatctctctaccctaccactaccatcatgagcacacatgcacacacacacagacacacacacacagatacacagacacacagacacacacagacacacacagacacacacacacacacacacacacacacacacacacacaggctttctctctcaagttccctggatcccttgaaaaacagcactaatacttggtcctttgctaggacctggtacattttctctcccaagccccttgctgggtctcagatgctggggagatgggacagacatggttcctttttagctaaatgcccagaggaagttaaggcacttctttgagcctctgtttcctcagtgctgaagtgcacgggaagtgggtcctcaaagggagtgcccttgaaccttgcccagtgcctggctcccagcagctgccctggaaagacagcatcttgccctccgctactgatgccctcctttgttcttgaacactctcaggatagtccttgcttggccttgccccacctagggatgaggcggaactcaggcaggctaagcagcagtcaggaagggcctcctaggtacggatcctcccccacttccctagcaggtcggttcccatatgctcacttcctctcagctggaggactggtgcacattgtgtgctctggacacaagctctctggacaagatctcagaggagcagagggcagattgctgagtatctaacggtagagacatgcatggaacccaatacagcaagagcctgaagtttaaatctgtcagaccggagggctggacaagtggacaagatgtggctggagcgataaggtggtgggctggctcaggccttggcctggcaccagtgagtaaggaaccttggaaacataacaagttgccacagagttcttaccatcatgttctgcaccaaagacctcggtttgtagaagcccaaggaaactgcagagggctcctgacttgagagaccagatggagccactatgttgtcacccccagtcctagctgacggtatatctgccaggttccggagcagtgtccagccatatataccggtgtgctttaacctgctgtgtgagcatattgttctactgtatgatcaatatgaatcagtgaatgcgattttaatattattatcaaataaaattgatttattgtatatttggtcatctatagttatgttggagcatgtcagagtttacatgtatcacttcagggctggagggataagtcagtggccctcgctgctcttccagaggacccaggttcagttccctgtacccacatagggtggctcacaactgcctgtcctccaacttgaatctgatgcccttttctggcctctgaaggcattcacgcacacacagacagacacacacacaaacaatacaataaaaataaattttagcataagtaaggcttttggagattatatagtttatttgtaattttccactctgcacaatatatatctgtgctaaaatttcattgatactcctccatttcagcctcatcatacacacggactcccagaacaaacaaacaacaacaaaatcctatacatctctacagtttcctgtattacttcacttgagaaacataagcctgtatatcctgatgtccccatgggcctgaggctcctgtcactgacaagagatagaggacctgggcccatcatactagggagagcaagggaagaggtaatggccatacacacctgagggcggcctttacactcggcatacaagggggaagaggaggtgttggacactggcggacaccaactccaacatcccagaatagctgcattggatggagggggaaggctctaaggaggttgcagcttggcatcagtaggctgccgtgcatgtcattcttccccacgcagccacagacacttagggttcatctagtctcagctgagcttggcacggtatggtcgcaagctgtaggctgagtccgggtgtttcccgtgggtctctcggacaccttgaacttgcgtgattggccacctcaccacatctgcaagcttctccctacccctaaaaggggaggcagttctattcccaggggtgttgcggggtgtctgagaggaagtgtgtagcaggcatcatgctactaagacggtagtctaagaaacctgcctgtcccctggggtgcactgagcggaaaaagccagagttgtggttaactctggcctgctgagttaaatggggaccttcaaactctcctggaaaggggacacccccagaaacaatgcctgagcctcctttgctcttaggcagctggggcctgaaaccaagtggtccattacctctccctaagaaccaaatggcgactccatcaatggctaagagctccagggcaaggatgctcccaactcccctgcttgctcagagttgagagagaagggggtggggatggggggttccgcccaggcatacaggaaatgccaggcactggttaggtttttgtcaatgtgatacaaactagagtcatttggaggagggaacatcaactgggggattttcttcagcagactgtcctgtgggcatgtctgcagtattgtcttgatgaatgggtgacatgagaggcccgtcccactgtgagcgggtgccacccctgagcaggtgatcctgctctgttgccaccactggccaggctgaagctaagtgaccatgggtagtgagccagtgagtggcttacctggtcttccctcagtgatgggctgggacctgggagtcatgtggtgaaataaactcctcccaccaagctgggtcttagccagggttttaccacagcgacagagaaaccctgtggactggaagatacgcagatccttgggaagagaacttcctgtttctatgtgtttatgcgtgtgtnnnnnnnnnnnnnnnnnnnntttctgaatctctctcttcacctctttcagtaaagtccaagtacagaaagctgcctctccaggcacaaaccatcctctgcctcctgcctgaggcacaggaagtttcttccgtgttctacctgcaggcacacttgaggctctgaatagcccctggaaaggtagttgtggccacagctgcttcagtgaatgccagctgggttaaacccacctcaaccacacttaactctgcactggtcaggtgttctcgaccctcgtgttcctgttagcttctgtgtgcctcttctgaccctgtgaggttggcattgttatacccattctacaggtagggaaactgagacacagaagggttgaagaatatacttatggtccctcaaggccagataatggcctccaaaagcgccatacttaacaaagccatctcaatacatcacaagtggtggggtaaactgaggcccagaaaagcaaaattcacggttgtatctgaggctgtcttcgttgtgatggaattgaagaggagagctccggtctcctgatggaagggatactctgttccccctcaggaatgatgggagcaggctgggggaggagccaaaggagggaagctttggtagagatggtttgtcctgctccaagcaagtctgggctgcctgagctcaggggatggtggccgggaaggaagcgtgagtgtagcttcgggcctcagtgggcacctggactcacgtgtacatgctgatacgcagacacgcataggcattaagagaacttgttaaaagtttatgcataatccagttagacggcttagtgggtgaaggcgcttgcagctaaacctgatgacctgagttcaattcccacatgatgactcagaagctggcttaacctagtccccctgatgcctttggaagggtagaggacagggtgtgggtggctcagggcagccctaccccatccatccacacccctgagggaaggggcttagatggtcagagaacagaggtctcaggctggaactgggctcctctggagagctgagaagctggggggccttcacaaccaagctctccaacacctcagggtgtagatgactgaggcccaaagacagccagaggtgtgttagcaggagtgtgtgtgtgtgtgtgtgtgtgtgtgtgtgtgtgtgtgtgtgtatacacttgaacagtcccctgagagtacctttgttgtcatgaaccgccctgggaccctctgtgctgttgctggagaattattgtaggtccaggggaggtgggtggggctagacagccggtctgtgtctacaccctacctgaagatgggcggggctgtgcaaaggcacaggtgtggggacagatctttctcatcaccgcctccttccctcctagtcctccgtggaagggatgggtctgggactgtcctcagtcagtcaccgggctgccccgctatatggttaccacacccacaccagctgcagaaacgctgctgataagagcggtgcggccacaagagcagaggccagcttgtgatttccgattcagttaggccgagactgataagcggggctgcccgtggaggctgcacgggttcatgctctcagctattacacactgggtttattcatttccaccactccccccacccccacgtctgtcactcgtgtgctcactttccacttgctttactgaaggagccaatctttctcttcacatggatgtggtgactaaaatctgaggaccattactatcccaaaacttactgggcaggagaaggcgggtcgggcaggcaggcaatggcctcagaacaccagcgaagagggaagagacgctagagagaattaaccccgggtatgtgggagagtctggaaaaaaagtagggggagggaggcagagccagagaagaaatgacactcatccctggactgtgtttttctaaaggctttctcttaaaaaatgaaggcaagactagaacctagtgagggccttacaaggatgtcaaacaaataaaaaccagtacttccaaagctgcaagcgatagaagcccacattaaaaaaaaaaaaatcaaaactttaatctttaaaaggcagggaaatttggatcacatagatgagctgactagaagtagattaggcaacagggttttaggcatgactggatctaggtgcttcaaagacagtatcactattgatctgcctgacactctccagagccaatttaccaataggatgtgaccatagagtctgtgactttttaaaagaggcctaaaaagtgtgttggagatgttcctgtgttttttatttcaagtctgagatagaggaggaggggaagagggaggtggaatgagaggaggccaaggaggtggagcttcctctcagtgcccaaactgtccttccctagccttgacatttgccaccactgaccactggtcccttcttgacattcctgcccagcttttcctcttgcccctttgccctgtttcctattcttccccgagaagagagatgacccaagaaaaacattggaaggagagtcccatggcctcgatggtttttgtttgtctgtttagagacaggctagcaatatgcagccctggctggtctggatctggatatgtagacaaggctggccttgaactcacagatctgcctctgcctctgcctctgcctctgcctctgcctctgcctctgcctctgcctctgcctctgcctctgcctctgcctctgcctctgcctctgcctctgcctctgcctctgcctctgcctctgcctctgcctctgcctctgcctctgcctctgcctctgcctctgcctctgcctctgcctctgcctctgcccctgcctctgcttctgcctccaaagcatctggatcaaaggcatggaccaccacacctggcagcctgggtagttaagaaccttcactagggtgcggagaggctgcagtgaggagctactcaggggtgagattaaggaagtggctcaaggacaggctttgtcacagctcaggacagagcccacaggctggggaggcagtgctgagcagacttgatgtggtctaagatgcaaatgtgggggacagatgctgggatgacacagggtttctgttctgaggtgacagagatgctggtttggtgtgaaatagttcagcctgtgcatgtcagatgtcaggaggttaacagacatctggtccctcatgcccaccgtaggatgggacataagtggggtacctggacctttggaaaggctagatttctgcttcagaacctcatcagcatgagagtggacatatccatcccttgtggaaatgttcatccctccagacaggtcacttgcattaggccagaataaggaacccccagggacagtgagtgaccacacccacttctttgaaaaaaaaaaaaaagcctcagcaggatatgcctgggaggggctttgtgggccatgaggaaggggaaggggaaggaaggggagggacaggactagctgtgtgaggaagaactttttctgcagatctctagagtggacagtcaggacgacaagctctctttggctcctttgggacatctggtccttggggttgctggcctcctgaacaggacctcaggagctcattggctggagggtctggggacgtggacaactgtggtccagctaaggtaggttctgactggggcagagtgtctgaggagggagttgggagagacagggctggacccagatgaggttcaacatggaagcggctggtggatgaagagccctaaggagcccacgtctcagaaggctggtcctgctgtgacagtaagagcacctgccagctatttctgttcaacctattttccaatgaggagaggacccaagatcttgtgaggagacctttcttgttttacccctcgaactctgtgcctgttagcgataatagggtaaggccaatgctgtatagctgtgattctttcaggaactagaggttgggtgggtaagtgcttcaatgcccatcttgggtcaggaatagaccaagactcagcgcagggaagtaaatcgcagcaggtcacagaataaatgagcgagcagggagaatcctgaatccctgtctatgttgcttccaagacgtcatctgtccatctctcttctgggtatttagtgactgtcagggctggctggtgtggtgtgtatgtgtgtgtgtgcgtgcactcacactctcacagagagaccaggagggggtacagggaggggcatctgtgctcttaggttgttggcctcctgctccaggggctgagacaaggccttggttgtctgatacagtaatataaggcaaaaaattgctggtgagccgggacttggagacagatatagggaaagtgaggtgagatcaggatgaagcttcagagatcgggagggcttatatgcagaggtgaggctggccctggagcacccctggaggagagagcccagagtgcaaatctcagaggcaggtcagtagatatatgattgaggatgagggagcagagacctagagactttgtgtggcaaaagatgcagtgtgggactatcctcattcattgatttagctccgggcaggtctcatgtcttaccaggcacagttctcctgcccatcctatgtgacaagggctgcaatggtgtttcctttaaagctgaggagggctggggctgttgctcagtggcacagcaccgtgcctagcatgcaaaaagcccacaggtttgtaaataggtatggagtaagaaagaggagagagggagggagagagagagagagagagagagagagagagagagagagagagagagattgagagagagagagagagaagccgttcagacttacaatagcctcagtataggctaggttagaccccagtcagtgtgggctaggatgcagggcctcatcacctgtcacaggcctactgcaatgccctcatgctgtttccaaggccatgatgcctgaaaggcacacaaaggccaggcttcagttcctgtggcccctcagcatccaggaccctcggatcctctcagcctccctgggaacaatgttgttgctcttactgctctgtcctattcaggtgtttcctttaagcaccgctagacaccccaaggaagttggcccgaagccctttacagagcctgcaaggaggcaaggtctttaggaatctttaaaatcctgattggccctgggggctgaggagggtcccagaaactcagagctctgcctgcatttccgcttgcccactaatcacttgctatggtttgaagatctgcccaatagtcatatgctgttgtttaatttaaagaaaaaaaagttatattgtctgttaagtgtggtctgcccctgaactccggcagtgagaatggatactccggtgggagaggcaggcggggaggctacatggagaggtgagaggtggtgaacgtgggtgacagaggctccgcaggctgtttccatctctgcgtatctctgtctctctggggggggggggtgactgcaggtcatagggaagcagaaagactacctgcaagttctctgctgttgctccagggtttggccttgcaagaggggctgtatcaggccggacatgcatacagtgtccgtctgtttggacggctgggcgcagggatgctgttggaatgcgtgcagcaaaggacagggctgtgaggctctttcagagcttcagccccaatcccagcccagcagctctgagcttcctccagcaaggctgctgacaggatcacacagaggctacaagggcccagggctcccattcactcttcccacctgttacactcaaggctgtagcctgcctcacacacctgccccaagagctgatccttgctaatgttctgaacttaagagaaagctctctgggtcccccccagtccctcctcccttttttctttcccttgtttatttatttatgtacttattttgtctctgatctcatctttctgtcaaaaaataatgaggggtcttctgtttaattatttaagtgtttgtgtgtgtgtgtgtgtgtgtgtgtgtgtgtgtgtgtgtgtgtgtgtagcaaacacccagatggaggtcagaggataatctgtaggagttgcttctcccttccacctgtgagtcccaaggaccaaactcaggtcgtcaggcttggctgcaagcacctttccccacagagtcatcttactggtcccaagaatggtgaaggaatttttggtctttcttacaagttagtctgccacttgagggtgctgcataaaccatgagacctaacgacagagaaagaagaaaagaaaagaagaaactcattaagagaaaaaaatgtatttcagcacaggaaacactaaggataagatagggtcaattctcttgatctcatcaccccacatttcacacacatatgacgtcactttgtgactggtaagtgttcattattgcaaactgtctatctatctctgactaaagactaaaaatgaaatatattgaatcatacaccaagcctccaagcctctctttaactccgcgacctctcgttttttctttctagcctcactttattgcatttatcaaataatacacaatttaattacttagtttgttgcccaagccctccaccctcacttcacattctattgcctttccgtgcacacacagtgttccgtgaatagctgagtgaatgggtggatccatctacctattccatttcaatgcgacattctttcccctgctagtgtttgggttgaacttagggcctca

SEQ ID NO: 528 - DNA, 2615 bp, Mus musculus
caatgactcaggatgcagccagcagccacaacgtgcacagaggaccgcatccagcatgctctggagcgatgcttgcatggactgagcctcggacgccgttctgctccctggtcagccgggctgtgtctgaactgctggagcctacaggagctggtcagcagggacccgggccacttcctcatcctcctggaacagatcctacaaaagacccaagaggtccaagagaaaggcacctatgacctcctcgccccgctggctctgctcttctattccactgtcctctgtacaccacacttcccaccagactccgacctcctgctgaaggcagccagcacctaccactgcttcctgacctggccagttccctactgcagcatctgcagagagatgctcaccttcattgatgctgaactcaaggccccaggaatctcctaccagcggctggtgagggctgagcagggcctgcccgtcaggagccaccgaagttccactgtcactgtgctgttgctgaacccggtagaggtacaggctgaattccttgctgtggcagacaagctgagcacgcctggacagtcaccccacggcacctacaccaccctgctcctgcatgccttccaggccacctttggggcccactgcgaccttcctaaactacaccgcaaacttcagtccaagacaatagaagagctggaggacatcttcaccgagacgacagaagcccaggagctggcgtctggcattggggatgtagcagaggcccgagagtggctccggaccaagctgcaggcagtgggagaaaaagcgggcttccctggcatcttagacactgcaagccctgggaaactccacaccatccccatccctgtcgccagatgctacacctacagctggaaccaggacagctttgacatcctacaggaagtccttctcaaggaacaggagctgctgcagccagggatcttgggagatgatgaagaggaggaagaggaggacttggagatggacaggcattgcgctgagagggactctctcctctccaccagctccctggtgtctcacgactccacactgttgctcacctcctctcaggcctcagaaccggtgctgtcccgccagatgctgaccacctttgtctcaggcctctcggatggcatggacagtggctacgtggaggacagcgaggaaaactcagagtggccccaaaagcccggcagccagaaacgccagggtcatcgcaggcctgggcagaagttcaacaggttctataaactcttaaagagcaccagccatggggatgaggaccccaaagcttccacactacgggttgtggtctttggctctgatcggatttcagggaaggtggctagggcctatagcaagctcaggaggctggagaccagtcaccctatcctcacacgcttcttcaagcttcagttcttctatgtgcctgtgaagagaagccacggaaccagccccagtgcctgcccatcctctctgagccaagcatctccactccctgcagactccctgaagtaccccagccctacagaccttggcatggccccatgggaggacagtaccaatgacatctctcactacctcggtatgcttgacccctggtacgaacgcaatgtgttgggcctcatgcacctgcctcctgaagtcctttgtcagcagtccctgaaggcagactctcggcccctggagggatcggccacccagctgcccatcctggccgatatgttactctactactgccgctttgcggcccgccccgtgttgctgcaggtttaccagacagagactccctggttagctatggccatcatggcccggtcccagcctgtgacctgctggacctacagcactccatcctcacccctggaagtccctatcctggtcccacggggtcccacactgactttcgtgctctacttgtgccccctccagctgacctttgtcaccggggagaagaccacagagatcttcatccagtctctggagctgggtcactctgcgaccactcgggctatcaaggcttcaggtcggggtaggaagaggctgggcattgatgacgaccgggaggccgtccctctaacactacagattatttacagcaagggagccatcagtgggcgaagccgctggagcaacctggagaaggtctgcacctctgttaacctcagcaaggcctgccagaagccggaggagctagactccagcatggaggcgctaacgctaaccctgacagaagtggtgaagaggcagaaccctaaatccaaaaagggctttaaccagatcagtacatcctacatcaaagtggacaaggtgcagatcatcggctctagcagctgcccctttgccgtgtgtctagaccaggatgagagaaagatcctgcagagtgtggtcaggtgtgaagtgtcaccctgctacaagccagagaagagcagcttgccacccgagaggtccttcagccagccagcagagactgggtccgacctgtgctcccttctctgccttcccatcatgacattcagtggggctctgccctagtgcagctaggtacgaggctgggcaggaagagtacacagcttctcctggactactcttcgggg

SEQ ID NO: 529 - protein, 842 aa, Mus musculus
MQPAATTCTEDRIQHALERCLHGLSLGRRSAPWSAGLCLNCWSLQELVSRDPGHFLILLEQILQKTQEVQEKGTYDLLAPLALLFYSTVLCTPHFPPDSDLLLKAASTYHCFLTWPVPYCSICREMLTFIDAELKAPGISYQRLVRAEQGLPVRSHRSSTVTVLLLNPVEVQAEFLAVADKLSTPGQSPHGTYTTLLLHAFQATFGAHCDLPKLHRKLQSKTIEELEDIFTETTEAQELASGIGDVAEAREWLRTKLQAVGEKAGFPGILDTDGKLHTIPIPVARCYTYSWNQDSFDILQEVLLKEQELLQPGILGDDEEEEEEDLEMDRHCAERDSLLSTSSLVSHDSTLLLTSSQASEPVLSRQMLTTFVSGLSDGMDSGYVEDSEENSEWPQKPGSQKRQGHRRPGQKFNRFYKLLKSTSHGDEDPKASTLRVVVFGSDRISGKVARAYSKLRRLETSHPILTRFFKLQFFYVPVKRSHGTSPSACPSSLSQDLPADSLKYPSPTDLGMAPWEDSTNDISHYLGMLDPWYERNVLGLMHLPPEVLCQQSLKADSRPLEGSATQLPILADMLLYYCRFAARPVLLQVYQTETPWLAMAIMARSQPVTCWTYSTPSSPLEVPILVPRGPTLTFVLYLCPLQLTFVTGEKTTEIFIQSLELGHSATTRAIKASGRGRKRLGIDDDREAVPLTLQIIYSKGAISGRSRWSNLEKVCTSVNLSKACQKPEELDSSMEALTLTLTEVVKRQNPKSKKGFNQISTSYIKVDKVQIIGSSSCPFAVCLDQDERKILQSVVRCEVSPCYKPEKSSLPPERSFSQPAETGSDLCSLLCLPIMTFSGALP

SEQ ID NO: 530 - DNA, 106607 bp, Homo sapiens
gtgtagtttggcctgtaagacattttagaatactgttttgaattagttgctaacatttaaaaatcagaagatttctcttatgaattccaatttccagtttctcttttaaaatcataagatctagccacaccaatcctgcatttccacatggccaccgtgggttggagctgagccccaggggctccttttagtggtctcttcatttacctcattagcatcccatcataccgtattgtcaccataccctgttgtttcccacacatcagagtcaaggttcagttgccaatttttgcatttgtgcaatttttaaaaataatgaaatattgtttgtaatcatgtccagtaaatgtagaaaaaaatgaaagaggccaagagggccaggtgcttctaagagaaaagggggaaagcatatttctaggtagaagtaaagaatattgctatatgtttaatatgcaaaatgtgtctgctgaaagaataagacataaggggctaccagaaataaaatctaagactatggaaaagctgtgttgggaaagaggaccttgttgcactggggggagaaaaggactgaccttttaacagggtttatttcagaaggcacagagtataaacaatgctgttatggaatgtcagaatatattaagtgaacaccatctcaccccttctatcgctgagtttgacctgcctggcccttgggggtgtttgaatttctgatccctgctccaggtcctccagcttccttcaaagcctcctcagttatccctgtggttccccaggtctgtcttacagtggtgactgtgctggggtcagtctccttgtgttccccaaggtacaaggcttagtgatttcaaagcaatgcttttccacaggcctacaggggccagagccatggcatgttcttgcccctttcacttggtttctcggcccttaatgaaaaggtctttttgcttcttcctgaagctttttctccataaagttcaacctgtgagggggacctgggatagagatcacactcccattggtagcaacagcaagggactggcttgggagagatgtgggtgcaggttggccctatctccttcagctcctccccaaacatccaatctaaattttgcaatggggacgcatcagtcagactctacccatctcctatggtgacatgctggaatttccactagaggtcactccccatctcacaccccagggcccacccataaacgcctccgtgcaggcccctgacttttaaccaggtcaatgttcacagtggattcttgtgggcgaccagtccagtctgcattcctttgggctcatccaggatgttggcattccttgaacaaaccctactttgtcacagtatattgctattttaattaaaggctggatataacttgcatttacttttaaaaattattttatttatttatttatttatttatttatttatttatttatttttgagatggagttttgctctttcactcaggctggagtgaagtggcacgatctcgggtcactgcaacctccacccccccgggttcaagtgattttcctgcctcagccttccaagtagctgagattataggcgcctgccactacatccggctaatttttgtatttttagtagagatggggtttcgccatgttggccaggctagtcttgaactcctgacctcaggcaatccacccgcctcggcctcccaaagtgctaggattacaggcatgagccaccgcgcccagccaaacttgcacttattctatttcagattttatatctgtatcatagagaagaattcacctgtagttttctttttgtgttttagtatcaggtgaaaacaaaatgggaagtttttccaaagtttgtaagatttgcaactttcaagttttgcttttttaagtttgtattttgaaataattttggatttacaaacaaaggtgcaaacgtaagagtccccatagacctttgacccagcttccctaaatattagcgttgtatataacatagtctgattcttgaaatcaaaaaattaacactgatacaaaactattaactagtctacagaccttattcaaattttgccgatagtacaactaaatgtactgtttctggcccaggatccaagttcaaatccctcattgcatttaagtgttgtgtgacaatctgtgacagccctttagcctttgtttcctgagcttgacactgttgaagattttgtagaatgtccctcaatttgagtgagtctgatgttttcctttttctttcttttctttttagagacaggttgtcatctaggctctgtcacctaggctagactgcactgcaacctcaacctcctggactcaagcgatcttcccacctcagcatgcttagtagttgggactacaggcccatgccactgcacccagctaatatacatatttattttttggtagaaatgggtcttgctatgttgcccaggctggtcttgaaatcctggtctcaagcaattctcccaccttagcttcccaacatgctggcattacaggtgtgagcaaccaacaccaagccctgatgttttctctgatgagattgatgtaagacatttttggcaagaataccacagaaatgatgtgcctgtctcagcatcaaatcacgagatgaatgttattgctgtgtctccttatgataatgttaactttgttcacttggttaagggggtgtccgtctggcttctttgctgtaaggtttctattttccctttgtaactagaaagtatcttgctgtgcatggtggctcatgcctgtaatcccagcactttgggaggccgaggtgggcagatcacttgaggccaggagtttgagatcagcctagccaacatggtgaaatctcgtctctactaaaaatacaaaaattagccgggtatggtggcacaagcctgtagtcccagctactcgggaggctgaggcaggagaatcacttgaaccagggaggcagacgttgccgtgagtcgagatcgtgccactgcactccagcctgggcgacagagcaagaatctgtctgaaaaacaaaaataccttgttgggtgctactttaagcaaatgtctcatttgtcttagtctgatcaggctgctataaacaaaaaatcatacactgggtggcttataaacaacaaacatttatgtctcacagttctggaagctgggaagtccaagatcaagttactggcagatttgatgtctgacaagggcccttcctcacaggcagcaccttctgactgtgtcctcacgtggtgcaacacacggtaaggggcagttcccttaggcttttttttttttttttgagatggagtcttgctctgtcgcccaggctggagtgcagcagcgtgatctcggctcactgcaacctccgcctcccaagttcaagcaattcccctgcctcagcttcccgagtagctgggactacaggcacgtgccacgatacccggctaattttttgtattttagtagggacggggtttcaccatgttggccaggatggtctcaatctcctgacctcatgatccacctgcctcagcctcccaaagtgctgggattacaggcataagccaccacacctggccccttaggcttctttttttggagcactaattctaatcatgagggctccaccctcatcacctagacctaatcacctccccaaatgccacaccttctaataccatcaccttgggggttaggcttcaatgtgtgaataggtggggggacacattcagaccacagcaccatttatcatcatatttttgctcactgcatttagcatccattgatgattttttttttttttgaaacagagtcttgttctgtcacccaggctggagtgcaatggcatggttggctcactgcaacctctgcttcccaggttcaagagattctcctgcctcagtctcccaagtagctgggattacaggcacgcgccaccacacctggctaatttttgtatttttagtagagacggggtttcaccatgttgggcaggctggtctcgaactcctgacctcaggtgatccacctgccttggcctcacaaagtgctgggattacaggcgtgagccactgtgcccaacccattgatgatcctcgcctgcaaaaattattactgtgatgtttaccaaatggtgatttttctgcttccatcttccttctacatgtattcactggcattccactgtaagaaagggttgtcaattctcccccatgtatttatccaatttttttatgtcattatggactcttggctacttattttattctataagctataacccataactatcgttattgtgttactcagcttgttctggatttggtcactgggagccccttcaagttggttattgcattcttttgacaaacattaatcattttttgagcactttattattttctagtaccacaagatgttctagattcatcttgttctttccctgtcatggcccttcaatcagacattcctccaaggagctctggttccttttattgaaggatgatatttagaaaccaagatctggaagctaggtgtgctcatccctagtgggatatcattacctctaggctccatcatcagagctgggaaatatacatacatctatatctctttatctatatatttatctatgtatctaactattaaaaaccatgagtatatactgatacctccaattctcatctaacaccaccacattcattctagccttccacctttccttgtttgtaacttccttcctcaacaccgaaaaacttggctctcattattcacaatatatttacttatttgttcaatcttcacatatatatataaaagagtttcagaatttctaacccatatacctgtgagatatagatttgctcatcagaaaacagaccccttaagcagtaataccaacacaatgtggtacaagttgtgtttttttttgtttttttttttttttcatctttagcttttgtattagtctgttctcacatagctatagagaaacacctgagactgggtaatttttataaagaaaagaggtttaatcggctcatggttttgcaggctgtgcaggaagcgtagtggcttctgcttctggggaggcctctggaagctcacaattgcggtggaatgcaaagttggggcttgcatgtcacatggccagagaaggagcaagagagaccaaggtgggaggtactacacaattttttttttttttagatggagtctcactctgtcgccaggctggagtgcagtggtgcgatcttggctcattgccacctctgactccctggttcaagcgattctcctgcctcagcctcccaagtagctgggattacaggcatgtaccaccacacctagctaatttttgtatttttagttgagacggaatttcaccatgttggccaagatggtctcaatctcctgacctcatgatccgcctgccttggcctcccaaagtgctgggattacaggcatgagccactgcgcctgcccagtactacacacttttaaatgaccagatctcatgagaactcactctcaagaggacagtaccaagagggatggtgaaaaaccattcatgagaaatctgcccccatgatccaatcaccttccaacaggccccacctccagcactggggattacatttcagtatgagatttggacagggcacatacttatagtatgtagtcaaaatatggttttctatgttacttggttagttccttttgtcttctccttcctcagtatgattatatcattcatttgtaataggttcatttgttactgttcatattcagttttgggttcccatcacatcctgattgatgtaaacttactactttagggtgagatgaggatatatgtagcattatcatggtcctcaaagtaagaactgtacaaacagcatactcagagaattgtcatttctcccatcccttctatccttacccccaatctcccattctttccagactatccctacctatccactgtaggtaaccaatctcatcagtttctggttgatccttcctatacttgtttttctacaaatgagaagatacatgcatattttcttatttctctttcttttttacatgaaaggttagcatactatatttttcatggtagtattttttaaaagcatggtagaattctgtcctttaaaatttgatagaagtcatctatgtaactaccaagacatggagactttcaagagagatgttctttgataatttatacaattccatggttattggtctattcagagtgtatctcttcttaagtcaatttttggtaattcatgtcttaccaggaaagttaagatattgagtagaagatgcaaatctttctttagttcagagaaaatttcttctgccatatattttattttctcctctctctccttgtggaattactgttatacacatattagacctctatagtctagctatcacagatcatcttttctcttctgaattccaggataaattttcaagcttgagttctgggtcacacattcagctttcttcggttcccaatcttctgttcattgtttccattgaggtttaaatttagcaagctaaaaatgtttcctaatttcagtttgtaatttcttaatgattccttgtaatttcagtttgtaattacataatccactacacttgcaaatacaatatcctcccaaatattattaaaaacataaaagagaaagatgtttaattttttttcctcttcttcttgtggaaatttcatttcaaaggaaactaattttctctgaccatgttccgttctgttgaaagtctgaatctttttgtgttttcatatcattactttttctctctctgtttatttttaccaggagggagtctatatttattctggaatagaagttgaggtggttctcctgattatcatgaatagtcagtaagcattcagtcaaataaataagtggagagaggtattttaagcagagaggacagagagaggaagggcatgaagatataaaagcccaatgtcagccaggcacagtggcttgcacctgtaatcccagcactttgggaggcccgggtgggagtattgtttaagcctaggagtttgagacctacctgggcaacacagcaagactccatttctaccaaattaataataataataataataataataataataataataataattagctaggcatgcctgaggcaggaggatggcttgagcccaggaatttgaggctgcagggagcattgatcatgccactgcactgggtgacaggaagaccaatgtggattttcttttctcacatattttatgtactgggatataatttacaaagagcagaatatgtaacttttaagtgaagatctcactaacttgtgcatatgcagaaaccatttaaccaccatcaagataaaaacaccaccccagaaagttcactcatgtccactttctggctaaattgttcccttcccccaagataaccatcattctgactcctatcactataagttagtttgctggttcttgaacttcatataaatggaatcatgcactatattttcttttgtgtctggcttcttttgctcagcatcatttttgtgagattcacctatgtggacaaatgcatcagtcatttattcctttttactgctgagtagcattccagtgtacgaatatcccacaatttaacaaaaaatgcattctactattaatgatatttagggtgtttccagtttggggctattataaataaagttgctacagtcattcatatatatgtttctgtggggatatatacattcatttatcttggatatatacctaggagtggaatttctaggtcacaagtagatgtatatttaactttattagatactgccaatcagtttcccaaacttgttgtgccgtgttacactcctacaagcaatatatgagtgtttcagttgctccacatccttgccaacatttggtgttttcagtatgaattttagctattctaatgactgtaaagtggtaactcatggtttaagtttgcatttccccaaagactcatcatgttagcaccttttcgtgtgtttattggccatgcgcatatcttttttttgttgaagtgtctgttcaagtcttttgcccatttttaaattggattctttgtctttactacttttgagttgtgggagttctttatatattctggctataagttactagaaatcttactatccactggtggatagtaatgatgtcaactgagatagggaaggcaggagaaggagtttgggagaagatgaggaatttattttaggtcatggagtaattaaaaggcttttggattgattatctaggtatgggtgtacagaaaacacttggaattacagatctggagctcaagagagaactctgggcgatagtttgggagggatcagtatgatgggaatggatgagattgcccagggagaagagaagcagccttatctgaaatctcaagcattgtaatgtttaagagatgatgaagaaatgaagccagaagaagaaaacagaaatcatggtgagaggtggaggagaagccaaggaggggattttcaagaaggagtggtgccaaatgctgtagtgaggtaagaaaatgaaaccattggagttgacatttggggtttccctggtggtctctgttcagagaattgaggaataaatgtaagatgaggaagtggaggcaggggtagactcctctttgaaaacattaggcagtgaaaggaaggagagtgatttcaaagagccatagattttaaaacaaagcaacaaaggagttgtagaaagaggtacataatcagatgcttaatgagtgacagaggtacctttcagagtttttccagcagctttggggaggtgggaaatggagaatggataggtgtcaggtgctgatcagatctgtgacagggagacgcagacagaactcagtgttgacggcgtggcataacatgcaggctccacatctgggtcacagctgtaggtggagaggagaatgcctacttctgaggggatgtacgatgggaccaagttggcttcttgggatgctcagagccctaggagtgagcaccaatgagccactcttttgcagttttcctccattttcagaaggcaggcatcccataatttctctggcagattatttgcctttccaagtgctctcctaatccaacatttccatctggcacacagtgtcattcttgctcctgaattcctgattccagagcatttctgccattttcttcctttgcacagtgtgtaccttccctcttctcctcttcttccaaatgtccatatttttgtggtggaaaaagtggggacaggggagacagaagactggaatccttatcaagtcctctctcagcccttggtggctctggttccttctctgtgaaagggtgacgtgtggggaaggggttggggatgaggtaggagagggggtctgagttccttcccacgtctaacgatggctggaaccaggcctctgtgttcaaccaagggtactttctgtttctgtccatttggggaagttgctttttcttggtatttcgggagtcaggaaaagaaaagtcattggtgttcatatctctcaaagcctcaggtagggctgcggcttttgaccaacaataacgtatgaccatgaccttgtggccgagtttgcacgcctctaacagatattatgacacagttccattcaatagtggaagtggagatttcagcgttgccctttgttaacccacaaatgaagtgctactcttccattgtgagggctgtcggagcagtagccaaccttcttatccccattttttaaacgagggaaaggaggcataggaagcgcagtgtcttgtgggattccctggggagtccttccaactcttggtagagcatcatctgcaacgtcgtctgggggagaaaagggggaggcaagaagagggccttgaccctggaggcaggaactcccgcacaccctcactcccttccccaggggctggggaaaccactcaggtgacagtagccttggtgccggccagggagggcgggaagtccagccagaggctggaacagcagtgctgaacgccgggactggctggtatttctatgaaggttcctgcagaaggatgcgggtcaaggtgcccgtctgcacagcagtagtgcaggcattttaagggttaagggcacccaaagaaaatagaagtaggggccgggcgcagtggctcacgcctgtaatcccagcactttgggaagccgaggcgggcggatcacgaggtcaagagatcgagaccatcctggccaacatggtgaaaccccgtctctagtaaaaatacaaaaaattgggcgtggtggcgcgcgcctgtagtcccagctacccgggaggctgaggcaggagaatcgcttgaacccgggaggcggaggttgtggggagtcaagatcgtgccactgcactccagcctggcgacagagcgagactccatctcaaaaaaaaaaaaaaaaaaaagaaagaaaatagaagtaggaagaggaagtgggtcgcagtgagagaaggaagcagctcgtcggagcttcctctttctcgtctttcccctaagcccctaccccagacctgcccccctgctccgcccagccctcctgcggggccaaagccgcgcttccgacgcgggggcctaacctccccttactccttgggggtcgctggtgctccgcgctggtgcccctcgggccactgccatggaccggccagggtctgcttcttccgagggctggcgggtcagagccggggctgcttctcagacgccttgcggcctcgggggcgtgacccagaggatgtggggccgggcgcgcacctggctgacgctgccgggccgccaggtggctggagaggccggctccgcggtcagccccgccccattaggccccgccccctgacaggctccgccccgcccgccggaggagcccaggctgggcagatgctgcggctcgccgcgcggctccagctggggcgcggtggtcccgacggtcacccgaatcgcagggagtcgccgctggagaggggctcggcgcccggcggggactgcaggtgtgtgactgggcggccagggcggatgcggagggcacgcatgggagctccaggcagagctggagcaagctggggaccgtcggggagagtgggctccgcgagcagccgccgcagcccgagggctggacagatcctgctatcttccggccccgtggacctggcccaccgcgggggcagcgggtctgcaaacctgcgctccagataaccccagagacttaaggggcgtcgcggggaccacttatcgttatccgggtaacctctgctgggcggctctgcgcagctgtgtcctcagcctcctgcctctgacacaggacgccctgtgtcgtagggtcaggtcccctgcccgctccagcggggaactgtccgtgagcgtgggcatcagggctcttgtgccgtcagaacctgggagtcatggaagtgcccgcgtaaggcgccctccgtcgagcctcactcagcctgctagttagccagccttgggcccagacgcggctgctgtcctagagaactgcacgctttctgctctcagaggatctgtgtttacacactggacatccccgcgtgactcgtgtgtgtgtgtgtgtgtgtgtgtgtgtgtgtgggcatgcgcatgtgcgcgtgctggcccatcccggcctggggtaaatacacaaaaagttcaggtcagtaggaggaaggagattgttcagaaggaaaaggaaggcgaggttaaagcagcaggatgtggtataaagcgagttaacaagactcggagtagagaggaggggtgggtttaggcagaataagggctaaaagtaggccaagcctgcctccaaggtcctctctggactgacaccctcgttttccttctgtgtcttctcatccaccccacactttccttcctgccctcaggaccacctgtaaggcactggctcccagagctgactgcaggtagggctctcttggagccaaccctacaacgtggctttccagggatgggatctggaatctgtagttttcaaaactttgaatgagctccttaagtgatgatgctgaagccgttgcttgggaaccatgcatgatgtggaaaagagacccaagttccaaccggatccagctgtgtgacctgcagcatcacactgtcccccaacccagcctcagtctcctgattcataaaatgggctgtcatactgacccatagagctgtgtggaattattattattattattattgagacagggtcttgctctgtcactcaggctggagtgcagtggcgtgatcatggctcactgcagccttaaattcccaggctcaagcaatcctccgcctccgcctcccaagtagctgggattacaggtcagcaccacggcgcccagctaatttttgtattttttgtagaggcagggttttgccatgttgcccaggttggtcccaaattccttgagctcaagcgatccgtctaccttggccttccaaagtgctgggattatagacatgagccactgtgcctggcccagtgtggaaaattaagtgaggcatgtatgatgagaacggctgcacgtgggagatgctccgtggatgtttgtagaacgctggcttccgtgtttcctcgttgtggctgtggtggtgtgggtctttgcctgtggacccgtggaagacaaagaagacagttttggatggtcaagctactttcttgcttcagggctccctcccctgctttttgaagcctcacaaaccaggactgtgagggcaggaaggcttggggtctttgtgtgctgagcctcattagggttttaagaacctccctcctttcatctctagcttacgagagggatgattcattatcttccctcctcaggctgcagtagaagcagacagtctctgcctccctgcttgcctttcctccctcccattcactgttgattattgccctcaagaataacaggttgcccagctactcgagaagcttaagtgggaggattgcttgaccccaggagttcgaggctgcagtgagctatgatcgcttcactgcgctatagcctggcagacacagagagaccctatctcaagcaaacagacaaacaaaaaaaaaaaagaagaagaagaagaagaataggttggatgctaactggtggcactgggtgacaagagcatttggggttgatgttggcatgaggatgagaaggcaggggtgcaggctgctccatacccctgtgttagccatccatcaggggcctgctggctgaggagtgggagaggaggagagccaggatcctttttgcctgggtagcctagagtttggaagccccagcttgggttccgctgagcactcaagctgtgctgacttggcctttcttcaaagatgctcatcccaagggactgagctgcgtggccctgtgggacctctgagaaccagaatgcctgtttggcctcagctggtgagctaaaagcctgaaccaatgtgttaagaaagaaagctggccaggcatagtggttcatgcctataatcccagcactttgggaagccaaggctttgaggccaggagttcgaggctgcagtgagctacgatcgtgtcactgcattccagcctgggcaacagagtgagaccctgtctttacaaaaacaaaaaataaaatttaaaaaacagagaaagctcctggaagaagaagatagagtgatccttaacaagtcaagggagaggtgtttaatttgatttttgagcctcagatatagatggggtgggaggagagaaaggaaagagtacatctgacttctgcccaaagggaagatgataccctcccgtagcaaacatatattacatagtaaaatatttcatcaatttgaagatgtacatattttcacattttagcactgaatgtgctaattgtatgaatttcactgaaatcaaggtgcattttactgtttatggcatcttccaattataataggcaacaatatttcttccttattgccacacaaaataacggtgcatcttacaattgatggcatcttagattctattaaatacagtgcactttttatagatttgggggatgtgttagcgatacacaggtccacacagaattatgttgttctcatagctttcatacattaatttttccagtagctctaccttctaagtatcagaacttttcattgtattatgttttaaaagaaatctttgtaaagtatgttgcttgcatttataaatgtagcatgttggatatgattgaataatttcttgaaattttcatcaaatggttctggcctgccattctcttttgtaccctgtgtctttttgtacattcatgcttcgttctctttcatctttctccctgtccttttctcctttggctatgacttcatggtgttgggcactgtgctgagtatgtcatgtcctttaatcttcacagtcacactctgaggtagctacaattattgcccccatttcacatatgagaaaaccgagggccaaggccacacatttaggtggtgccagagctgggctgactctggcgtctgctcttaaccagaattgaccaagcctaagtggtggcctaggtgttcctgtgggtgtcaagcgcatgccccatacaacacaatttgggggcatgaattgtggccacgaggtgcttttgtttggttgcttgcttgtaggatagcagctaggttctggatagttgaggttatcggttaagtgacttccagataagtgagtcacagctacagcaagttacacccaaaagggggttgggggctgatgaatgggaagaaatggatgactttcatggcacagagaagatcctgggtccttcttgagtcttctgagtctatcaagtggcttgctagactttgggccctagagttcggcatccacaggagactcctgcttccatggagcttctctcctgctgccatggtgatgtaagattacacatctgcgtgagtcacttttattttcatttttttttaaattattattttttagacagagtttcgctcttgtcacacgggacggaatgcagtgccgtgatctcggctcactgcaacctccgcctcctgggttcaagcaattctcctgtctcagcctcccgagtagctggagttacaggcgcccgcttccacgcctggctaatttttgtatttttagtagagatggggtttcgccaagttggccaggctggtctcgaactccagaccgcaggtgttctgcccgccttggcctcccaaagtgctgggattacaggcgtgagcaaccgcgcccggcctgcgtgagtcacttttcagctgaaaacgctgcagagctgcatgactttccagagacggtccacacccaccacccatcccaggtccacccctccttcttcctctcctgtagcctgaggagacctctgcacctttgcgtgtgctgttgcttctccccagattgctcttccctgcctctgcctgcctggtgaactgccagttcctcctagaagcccagctcaagcctcatcttctgaatccttccctgatgctcttcctttgcccttcagcactgaccgccccctccttcttcattgtgctttctatgtcttcgcaccatagcactgaccgcccaggcctacagggggaccagtgacctggcacagctatggcctgctcaccctagccacttgatgttcagcatggcgtcaggctgtcactctgaaactccctgggatctcacaagcaaggcgtccatgcacagcaacagcagaagttgccagatcacaggatggggtggggggctgggggtggggcccggagggagtggtgtgcttttcattttcatgtcctcaggagtcttgttgttgttgttgacctaggcaaatgagcttgtgtggtttccttgttagagtgcagggctggggtgtgagggctgaaggtggctcacatggagcccagttcctgccaggctccccaactcctagccacgtgatctttgctaagtccatgtacctctctgcatgtcagtttccccatctgtgggatggaaatctggcactcaatgctttatgtggcccctgcctaatcgctaacatttcacttgttcattcaacacttctgcatggagcgcaccttctgtgagccaggcatgtgccaagctctgaggacactgagcaagacaggcaatgttcctgccccgtggaactcacagtctcatagacaagacatgcaacacacatattgttcaattacaattgtgagaattatgggatactatgagattatggaaagggaactcaatatagttgaggggttaaggaaaggtttctctgaagaagtcatatttgagttgagacttgaaagatataaagtaaaagagaatcataacaatcataatactaatacctaccatgtagtgaatacttgctaagggctttttgagtgcattctctccagcattcttttcaacatctcatgtgtggggtatgtgggctccctctcctgtgaggatcagatgatagcactactggcaagcacccttctcagtgtctgacacagaccagggactcgttcccaccttcctcacccctccccgtattccaaggtccagcttatggacgctgaggtcatcaatactaatgggggggcctctcttctcctttccactgaccatcaccagatagcgtgtcccgctcaggagccctctgcatttgtgcatctccatcaacagctcagggagttgagtccccaaccacagaaaactccaccgtattttttgccaggccttcattctgttcctcttaggagccgctgttctgggagggttcagaagccctgatctggattgtctgtctcatctaggaagtcacttgtccagctcccatatccttcttccaccaaagctttctccccagaaccatgaagtctgtgcagacgtatcactgggtttttggcctgagcatttgttcctgcatggcttggtggtttggcccttttcaggcaaatctccatacagccacttccacccaacctggccgagccagccagcctcctgggggagcgttctgcaaccagatcacatctacactgacaactcttcgaggagagtctcaaactctctctagatagttggcccctttgaaaaactgatgaaagcgaaagatcatctctctcgtcacccataagcacacatgtacatgtgaatgcatgtgcacacacacacacacacacacagtctctctcgctcaaagttttgcataaaattctaaggtcttcttggatctctgcagttcaccaagggacccaggttaataactcctgttctagaaaacatgactttctgtgtgctgatttctttggattatccccagcacagctccctgtgggaggaagctgttgtcagaagcaagctgggggtagtgatggataatgaaaactgtgtagaggacactggtagcgactcactggtgagaaccctgaagcggcgtgctgggggccatctcatgactgcacactgggccactgctctgttgttggatttctcaccaagttttgaattcagcccatttccaagatgattaaagagtgaaagagaaggccctgcgtggtggctcacacctgtaatcccagcactttgggaggccgaggcgggcagatcacctgaggtcaggagttcaagaccagcctgaccaacatggagaaacctcatctctactaaaaatacaaatattagccgggcgtgatggcacatgcctgtaatcccagctacttgggaggctgaggcaagagaatcgattgaacacggaggcggaggttgtggtgagccgagatcgcgccattgcactccagcccaagcaacaagagggaaacttcatctcagaaaaaaaaaaaaagagagagagaaaaaaaaaggtgtctgtggccacacacatgaatataaacagtctacggatcagagaggcatgcatgactgttcctttgccacaaaagtctgcaacctcccaagttcccagggacaggcatgagcttggggctttgtttctctgatgtggtcatagttctttagaaccagtgccttgatgtaaagtgccatgtgtgaaggacgttttcttcaattcctcctttgtaaggatttttaaaagcatgaatggatgttacatttgtccaatacttttttaaagcatctgcaaggaaactcttgtactctttcaccttgtgatagatttatgtgacacattagatcattagcttccacatattgagccctctgcatttctggagtaaactcaattgggtcaaggtgctttattccttcagtactgtgctaggtttgatttgctgtgattttctttaggattttttttttttttttgagacagtctcactctggagtgcagtggtgcgaacctccacctgccaggttcaaacaattctcatgcctcagcccctgagtacctgggattacaggcacccactaccacgcctggctaatttttgtatttttagtagagacggggattcaccatgttggccaggctgctctcgaactcctggcctcaagtgatccaccagccttggcctcccaaagtgctgggattataggagtgagccaccgcatcccacctttctttaggatttttgcatgaaatgaatttgacctctattttccttttctgtgctgccgttgtcagtttttgatatactgactttgcaaatgattttggaagcacgttaccttctcccacgccctgtgacagcttatagagcggggaatgagctgctccttggaagctgggagaacggctccagtcttgaggtcttccactgtgggattcttggcttcccactccccaagcttccttctcttctctcttcctcagtcctcccaggtacaaatctgtaaacctcagagctcccaggctcatgcccgagagccatctttgattcttggcttccaatgttcagccactaggtcccatgggtccttactttatatgcccttcagctaacaagcatgcctatttccacactgaactgggcatatccaccttgagtgaattccaggtgctgcatttggaggatgctgagcaaccacttcatatccagagataggtgaccaggatagcgatgacagaatatgaagtaattaagaagtagcgaggtttttctccaagaagagaagacagaggagaagtagtatctgtcttcagatgtttgacgagcagtgtcctttgaaaaaggtgaagacttctcaactgggtgtcattctctggaatggaaaagggatgacagaaggaaaattgtaagaaaatagactccagctcactagaaggaagatctcagagaaattcagagcaggtcaacagtggaatgggaggcttcgtggtggctagtttcccgttggggaagtatgcagggaaaatacatgttatatattatggaaatgatagccgtgagaaaggagaccaatatagctcatttttaaagagcctgtagttctctaaatcatggtggccatgtctgactggttgtgtaaacgctggttgttctgagaacatgatttgagtttgagtagttcagtgaccttgaataaacaggtcccaaagctgggcagtttgctcagaaaccccacagccctgcttcacagcccgttctccgcagcagaagcaccttggctgtgagaaaaccatagccattcatggatactgggatcctcgcccacatcctctgctgggagcatgggcttttcttgaggtctcttgttcttggctccttctgatacttggtaaaataaactaattgaacaccatttcaaaattgccttcctccgtgagtgtcccagataagatcttggggccaacctatctcacctccaggttgagctgggaattgatgtcctcttgttcttggggttttcacgtcaatgtttcataggtctttgcactgtgcattcacttctgtaccatgttgagagtttcattttgagaaaacgaaaagctctgcgctctccttggcctgttattgtgcttaagagaacacagggggctgtgatgtgatgtacgggctacaggatgggaataggagatgtaatctctagtcctggcccctaattacttcctcatcttgctgagtctgtttcctcctggaccaactggactctatgattctgaccacctgggagttttcaaagcctgctctccaagagttttcttgtgggagctgctctgatgggctgagcagagaggggacctgctccttccctcatggtgccaccttatgacaggactcccagtgactatgagtccctcttcagacctcaatggcagaaacccaccctctagcccatgcttctgctggaaggcttcctttcaggtcactggtggctctggaatggcaagttccaatagtctcttcccaacctgcatcttttttttttttgaagtctccataaagtctgatgcccgacaaatttttgttttattttttatttttgagaaagggtctcactctgtcacccagactggagtacagtggcacgatcacagatcactgtagtgtcaacctccccaggctcagatgatcctcctgcctcagtctcctgagtagctgggactacaggtgtatgccaccacgcccagctaattttttgtgtgtgttttttgtagagacagggtctcactatgttgcccaggctgttctcaaactcctgggctcaagtgatctacctgcttcggcctccaagtacatgcgggttattttcacttgatgccctatttcaacttgagcaatatccagagcccaactctgcatccacaaagcaggcttcctgtgcagacttccccatttctgtctctgctgaaaccagactcccagccttgaaaccttggactcatctccgagtcctccctccatcttccttgttccccactccccagcccgttttgatggtgcttcctttctccatggctcttgtttctctcacttccccattgttctctctcctacccaatttggctttatttaccatatgcctctggtgggccttttggaccacaggctcttcctctcttcaccaggagattcttcttatgaaaacttctatgtcactgtgttcagatactttgatggcaccccactgcttagggagagtccagagtccttagtcttctgttcaggtttcgaagttgagtcccactcctttctccacgaatcatcacgctctcctccagccagactgcctgactcagttttcccaagacctaacgtgtgttcttgcctcactcatccccttcccaatgagggaagctttccaatcattttgttcagtgctgactctccagtgccttgcaggggccagcacttgtcattcaatcagtgcttgctgaatgagtgattgcctggtcgagcagccagcatggaagaggcccgggcctcagccttggatgactgatgatcgggcaggctgggctgctccccatctgagacctctgtggggttcggtcatcctcccctcaaggaccctccagacatatcactggtcttctgtgcacaactgcaagggcttcagacaccagtggctttgtgatccactgtgggacaaggcaggtgtcctcctctgggctgcttcagacccctgagcctctggcaaactccagatgcaaactccaggtgctgagaaccctctgcttgggaatctttttttttttttttttttgagacggagttttgctcctgttgcccagactggagtgcagtggcacaatcttagttcactgcaacctccgcttcctgggttcaagcaattctcttgcctcagtctcctgaatagctggagttacaggtgcccgccactacaccaggctaatttttgtacttttagtagacataggagtttcaccatgttggccaggctggtcttgaactcctgacctcaggtgatctacccgcctcggcctcccgaagtgctgggattaaaggcatgagccaccgcacccggcagggaatcttcttaccaccctcccatttagtcagatttaagatgagcagttagctaagtctgagagcaggggaagccctggggaaccttcccccaacaagccactcccagtctggtgacagcttctgcataagagcctggggaagtgtctgtttgcaacacggtgtttacaaggcagaggggcttcctgtcccgcccgtgccaggctgtggggcaatcagggcaatcaggagctgtgttttcagagggagtaaggcgaagaaactgttgagggatttctggagattcttcgaacatcaccagggggtgcctggcctacttgaccctggaggacaagggagatgtaaaattcaggtttaaaaattgggagcaaattaaagtattactaactgattaatttgcatatggtcctttgcaccttgcaaaaatacaaagcatttttcacaaaagtagccctccctctgagtctaatgtggaaatctctagaacaaaaaacttccttttctcactcccaagccgggggagcttgggtcagagtaagcaaggacaaagttatttctttttcttttttctttttttctttttttctttttttttgcagaggaaagagcactttctgggggaaggggagagcggtggaaattactccccaggagcgataactcccccattccaattcagagctcatgcatgatggagagtgacactctctccgtgcatatctgagaaatgggctgaggaggctgatactggaccctctgcctcctccaaggactgtggcagccctaggacacacacctgccaacctggaaccattgccatggctctcacagaaacacgagcttgtgtccagagcccttgttgtctcttgggcctcagtaaaagtatctggaaaggtcttggaaggtgggttgggctttcttggccctggggacaggaatatagtccacttcccctcttcagtgggtgggtaacccaagagtgggtgatcaaaagatggggctcactcttaccacctgacttctgaagacctgaggttgtttttagtggtgaatccatcctctgaacccatttgatgccaaatgtgagctggccagtggtagggccaaggtgcaaaggctcctgtgagttcaacacattagcctgtgggtcacggtgctatgatagctgttggtgtgaggggatttgctttactgtgcaaaacaagagaaaaataagggtgtggccctttaaagaacttgctaataaaaacctcccacttgagagaggcagagcttggcctaaagggtggggttgaggagggagatgatgggtggagttgaacaaggactagccttatgtaagcatcaagaaaacacatttctgaactagtgaggctaagtagctcaggtccaaggcatgtgagacatttgggagttggttcagaaggctgttctagagggtacttgagttgcctagcagatagatggtggggacttgtggaagttgatggaagcaagccctcaatgctggaccatgtaatgggtgcaatgaataaagaaggaggcgtccaacttcccattccctcattctcccaactgtggtccaaggcactgtgctattacagtccagcactctcctctgagatagatgtagctggtcaagaatgctccttcttggaccatggctcaactctgccaggttcccatcaaggctcctgtccaggggctgttgaagggattgggttgcagccatggtaatcatatgataacggccacagttgcaacttgggtccagagctcagtggcctcagagggtcccatctcccctcctccccctacctttcctgcattttcaaagctgcaggcttacttctcgttggctgtgttactccgaagatctgctcagtagatggaggtgaaaatgttatttttcactaaaatatctgaccttgtttaaggagaaaaaattttgtaataatgcccataatttattctcatggtactttattgaccagtaagagattacccctaattcatttataaaaatattactctctcgacttaagtcgcttcaatactaactggccagcccagtttgctccaatgagtgtctggcctttaaatagctcaatccctgctgctctccctagagtaggacacacagaggtggggactccatgtagaaaacctgtgctccagaagtcatgtctgtaggatgacttcaccttttatgaggtgtctctatcaaggaaattttgggtataccgtgtggtctttaagtcagaccataaaccatattctacaaattcaggggaaatccaccagctgtaactaaatggcatagtaacagaaaaacaaaaacatcatttctcttattaggtaactcagcattcactgaaatattagttggtctactggtttctctgttggattggagagacccaaaataatagtggcttaaacaagatagaggtttatttctgtctcaggtagcaagctgggcataagtgatccagacttcacatgacagctttataggttgggaaccaaggttccttttgtgtcattgctctgccttcttcaacatgtagctctcatctcatggtccataatggctgctctagcaattgccatcgcatctgcattccagctagcaagaaggggaaagggggaagggaagtgcatgcctcttccttctaaaagcatgacttggaaattgcacttatcaatgtctattcatattccagtagccagaatgtagtcatatggtcatacttagttacaagagtctgggaaacgtgatctaaaattcctaaaagttatatccccatagaaggaaggagaatagatatggaagaacaattttgagtctcatccacatttgaactttgtgaatcttcactgttacatagatgttctttatcccttctgttgtggagtaagcttgcctcctaagccctgctgaaaactattaataaaaaacagcatgctacaccaaaaggtcaaactaacccaaatgtccattaatggataaatggataaacaaaatgtgtatatacattcaattgaatattattgatccttaaaaaggaatgaggttcaaacacatgctacgatatgcatgaaccttgaagacattatgctaagtgaagtaagccagacacaaaaggataaatactgtgtgattccacccaaatgaggtagctagagtaaactcatagaaacagaaagtagattagaggttaccagaggctggggggagaagtggcggggagttagtgtttattgggtatggagtttcagtttaggaagacgaaaaagttctgtgaatggatggtggggatggttgcacaacattgtgaatgtacttaatgtcactgaactgtatacttagaactgtacgcacaaaactgtacacacacaacctacagaatgggagaaaatatttgcagactatgcatctgtcaaaggtctaatatccagagtctataaggaacttaaacaaatcaacaagccaaaaccaaataaccccatttaaaaacaggcaaaggacatgaacagacacttctcaaaagaagacgtacaaatggtcaacacacatatcaaagataatgctcattatcactgattatgagggaaatgcaaatcaaaaccttaacaagataccatctcgcaccagtcagaatggccactattgaaaagccaaaaaacaacagatgctggcgaggctgtggagagaagggaacacttacacattgttggtgggagcgtaaattagttcaaccactatagaaagcagtttggagatttctcaaagaacttaaaacagagccaccatttgacccagtgatctcattactgggtatattcccaaaggaaaatagctcattataccaacaagacacatgtactcacatgtgttcatcaccccactattcacaatagcaaagacatggaatcaacctaggtgcccattgatggtagattggataaagaaaatgttctacatataaaccatgaaatactatgcagccgtaaaaaagaatgaagtcatgtcctttgcagcaacatggatggagctggaggccataatcctaagcaaattaatgtaggaatggaaaaccaaataccatatgttctctcttacaagtaggagctaaacactgagcacaagtagacataaacatgggagcaatagacattgtggactctcagtggggagagagggaagggtgaggattgaaaaacctcctattgagtactgtgctcactacctggatgcaatatacccatataacaaacctgcacctgtatctaacataaaagttggaattaaaaaaatacttacaatcgtaaattttatattgcatatattttaccacaatcatgctataaaggaccaaaggcagggttctctggcattttaggagcaatgtccctacagatgaagctactcaacaccctttgggtgaggttatgaagccagtaatgaatccatctatctgtgttatcattcgtattttttacatcatcatgaaactatatagcaagacttgctcaaattcagatatgctgctattgtggctgttcttctattacctctttagtcagtgaatccattgatccctattggctgctggtggttcctggatctttcccttagcattcacaaactgtcttttaataatgtatagagaatgttgccaggggactggtggactcagacatgtactttaaaaaattccacttaaaaaaattgtttttaaatttttattttcatagatttttggggaacaggtagtatttggttacgtgagtaagttctttagaggtgacttgtgagattttggtgcagtgtacgttgtacctaatgtgtagccttttatccctcacccacttcccacctttcccctgctaagtccccaaaatccattgtatcattcttatgcctttgcatccgtatagcttagctcccacttatgagtcagaacatatgatgttcggttttccattcctgagttacttcacttagaataatagtgtccaatcctattcaggttgctgcaaatgccattacagaattctccctttctttttctgttcctcacgatgacgacaacattttctaatctgtctctgtctttctctgtctctgtctcttatacatctttcattttctctgattcttcaaagataatcggtagcagctccctttcacaacctcaagtttctttatgactctgagatgcctttattctcttctgcaatcctaaactcattttcagcagcaagcctccctatttggcatcagatgtttcaatatcggaccctttccccgcaatctacctttcaccctgtggctggtacaaccttccaaatccaaaagctgatgtgtcattcaccagctcgaaatttagcagtggctccacatggcgcttgagtaaacccttaagcacttagcttggcagataaggctgttcacagtctaccatgccagcccatgcagcatcatctcccagcgtgccccatgtcatgcctacccttcagtagggctgaactgccagcatttccctaaaggaaccatgctgtctcccgcctcttgcctcagtttattttcctaccatgagattcatgcctgaatctcacccagggcagctcctccttcctgaaatgttatctcgggagtcacctttttggagaagctttgctaatagacattctccctcctccaagttcctatggcacctgtcccatattagcctccactgggacacctaacccactgggtagtttctagtttgagagttattttggatggtgcttctctgaacttcctgttgcatgtccactgggcatgtagctaggaggcatatacctggggcctggagcatgctgaagttgagctttagggtctgatagagcatcttccactgggtatgttgtcgtaccagcgtacattccccgcagcagccgtgagggtttgcgtggcttcacatcctcacaacagtgcttttttttgcctttttcattttggcccttctgctgggtgtgtagtggtattgccttgtggtgggaatgtgcacttcccttctgactaatgaagcggagcacctctccacatgtttagtggccatttggacaccctcttctgtgaagcgtctattcaagccttttgtccagttttctactgggttgtctttttcatatttttctgttgctccttcacattgtgtagtgacctctcaatcctcctcctggccacgagctctgtgagatttctggacccccagtgcctagtgaagtccctcaaatagtagaccctcaatacatattttctgctgactaaataaaacatctgtgattcatgctttccagtgggttaaccattctccttacaatggtaaagcttatcatggtaaagctttagctcctacttataagtggaggaaaagatggaggcaacataggagcgcatttcggctttctctcatgcgtcggccactgtcttgagttactggcctgatttcttctggtttggactctgaaaatagctttacgggtcctttttgatgtatgctgcatttttctttttcttttcttttcttttctttttttttttttttttttttttaagacggagtctcgctctgtcgcccaggctggagtgcagtggctcaatctttgctcactgcaagctccgcctcccgggttcacaccattctcttgcttcagcctcccaagtagctgggactacaggcgcccgccaccacacctggctaattttttgtgtttttagtagagatggggtttcaccgtgttagccaggatggtctggatctcctgaccttgtgatccaccggcctcggcctcccaaagtgctgggattacaggcatgagccaccgcacccagctgctgcatttttcttaaggcttgctttcatgatacgctcattctctctctttcgtatcaccttaacttggggaccttgattccatcttgacgtatgccccaggaagtcacactggctccttcacatttccgcctcttttctcccttgtgacactctctgacttgccttcagagcttaattttccattttctttccctgttaagccaccctctctgacttccagcctcttgttgttgttgttgttttaatagactagatacgcacggaaacaattcccagccccttggatagctgctttcataaagtctatgactcgcgtctgactatgtctagcattttcttccgtgattactacaaaccccagtcatgggtccttttctccccattttcctctcactgctatttcacaaagctttcattgttcttggtgagaattaaaggcagaagataggacagtaatcttcctcatcactaacttgaccttccaacagatgagatgaccgaggagcagggattcatttaagagcccggctccaacctaatcagctaccaagctgctatccaggcaaagattctgccagtcctaaaccttggctctaggttcattttttgatgcacacgagaaaagccgcatctgtatctcagtcaggcggggtgtgtgatcccatgcgcttctctctcatcttccttcaaacctcttcatctttcaattcattcattcagcaaattatgtgccaggcactcagctggaccctcatggagctcacattctaacggggctgggagttacagaaatataatgagaacagtacaaaagcaaaatgtatcgtatgtccatgggtgagggagatgtgggaaaaagtaaggcaggaggcagccgagatggggcttgtcaggagtcctccttgagaacagaagaagggaaacaagtgaaggagtgagccaggcagacacctagaagaagagcactcaggcagagagaacggcaggcgcgaaggtcctgaggcaggagaggcaggagtgggctgctgtgctgctgtggtcattcgagtcctcagaacatggcggggcacatgctggcatgtgagcagctcagcatttgaaatgaagtgcagtgtattagtcatctttgcagctaccacaacacgcagcaaagcatcttgtgctcatattcacttggtaagaatttttatttgagtaaacacacttaggttggacagcctctgagggcccttctgcctctgaattgctgtgattatcttggatgccttatggatggtgctgtctcatagtagttttcttaggtgcctggcagacggcgccatctcctagtagttttcataggtgcctggtggatggcaccatctcctagtagttttcttaggtgcctggtggatggtgtcacagtaattttctttctagtagttttctttctagcttttccatctggacttttctgaacacgtggtctagtggcttctgggcatgtgacctgatctcggtaagcggctggcactcacaccagatggacctggtctcggtaaggggctggcagtcacaccagatgtgtatgttccagatacattgctgtgtaactacctacctatcccaaaatgcagcagtgtaagattgcaacggttttattatgcccgtggattctgtgggccaggaatttgggctgggcacaatagggatgacttgcctgtgttcagtgatgtctggggtctcagctgggaagatcaaacggctggtaactgaaactgtaaatgagaatgcctacaaggggcctctccatgtggtttgggcttccttacatcatggcaacgtccagatggataatctaatttctcacttgatggctcagagctccaagttcaaaccttctggcaaacaagacagtagctgcatggtctttagtgacctagccttggaagccacacagcatcacttccgctataatctgttttgattgtggcagtcacaagcccacccaagtttaaggggatgggaatagattccacctcttgatggagaagtggcaaggctgtaatgtaaaggagaggtgggatgggagctattgttgggatcatctttgggacataaaatcttataagtactttctatttttctggggaggagttctcattttgtgttgtttctggactacggtggatttgagatgtctgctttgcctcctgtctagcagaaactcccagtgcaaggtggttgctgtgatgcccagccttcctcttcccactgctgctagcagtcctgtcccaggctctctctgggtcaccagtgaagcctcgcttatgaaggagtagccaaggggctgccaggtggagggaatacagccctgggaccagtttctcattccctgaagggtgtgagtgtgtgtgtgtgtggctggggtgggaggcagacctactgattgtaagggaagaatctcttggagctagtgtcaatcaaatgacccaccccagtggctggtttcctggcacaactcctaggccttagctgtgcctcttgagtgtataggaagccagggcctgccagggagtgagtgttcctgcagctggggaggacgtagatcccctcttcgaagtggggtgaggggccgagccagggtttggctagaagcctgccacagctgaaacaatgagaaagctttgccaggtctctgggctgctccacagcagggcttcctggacccccaagcaccagcatcttcctggagaggaagaacctcttccacaccctgactttctcaagtgtattcatttgctgtggacttgctggacgttcatctgctaacctcagcaggaaattgcggaactaacacattagggcgtaagtgtaggccatttttccccagtcacatgtctcagtgcctaggtgtaggtccctggatatagttacctgtgtgccactatcacaaagttccaggatggctagatataggagggtcccaagaattgcacttgagaaggctgaggaactctccagctccgtgtcctggtacttccgttaggatcacccgtgttcctgccctagccaggtgcctttgaagcctgaagacaggtctggagagtaaagatggatataggagtggtcccatgttcccatttcaccagagggtatgttcccactcttcattccccagggaaggaaaaacacaacctcatcattccagaataaaatcatggaatgctagtgcctgaaggagctttattcataaattaattcatcttgctccctttacagaggatgtgcttctgatgatgggcacacaacagatgctcagcaagtatgttccctgtttgagaaatcaccacaatgcatcattctgcatgaagacacatgcatgcatatgttcattgcagcactattcacacagcaaagacatggaatcaacctaaatgcccatcaacagtagactggataaaggaaatgtggtacatatacaccatggaatattatgtagccatgaaaaagaacaagatcatgtcttttgcagaaatgtggatggagctattattctcagcataatagataacataatagaataacaggatgtctgttattcttagcaaactaatgcaggaacagaagacaaaatacatgctctcacttataagtgggaactaaatgatgagaactcatggacacaaagaaaggaccaacagacactggggcttacttgagagcagagggtgggaagagggagaagatcagaaaaaaataactattgggtactaagcttagtacctgggtgacgaagtaatctgtccaataaacccccgtgacacgagtttaccataacaaaactgcacatgtacccccgcacctaaaataaaagttaaaaaaaaaaaggagtatattccctagggtacagcagacaatgtttcagaattattgtcaatttgccaggtgtggtcaggttggaaggttggagaatgtttcttttatttattttttctttttttagatggagtcttgctctgtcactcaggctggagtgcagtggcacaatctcggctcactgcaacctctgcctcctgggttccagcgattctcctgcctcagcctcctgaacagctgggactgcaggtgcgcgccaccacacccagctaatttttgtactttttagtagagacggggtttcacccatattggccaggctggtctcgaactcctgacctgatgatgcatccgcctcggcctcccaaagtgctgggattacaggcatgagccaccgcgcccagccaagaatgtctcttttcttgagagatgtgtgctcaagtattagattgaaccccacgaaattgctaatatcttctcatgtttaatatgattcaatcaaggccaggcatggtggctcacacctataatctcagcactttgggaggccaaggcaaggcaggaggattgcttgaggccaggagtttgagaccagcctggacaacgtattgagactccatctctacaaaaacaaacaaacaaacaaaattaaaaattagccaggctttgtagtgcacacctgtagccccagctactcaggaggctgaggtgggaggattatttgagcctgggagttcaaggttgcagtgagatgtgattgtgtcactgcactccagcctgtgcaacagagcgagaccctgtctcctgacgaaaaaaaaaagaaaaagaaaaaggttcaagctgatgtttaggagtgatgtgctatgatgtccacagcctgcaactcactttcaaatgttttagcaaagtgtgtgtgtgtgtgtgtgtgtgtgtatgacgtgatctgctttgtccagctggcgcagcagccaaataagaataaggctgacagggccgggtgcagtggttcacacctgtaatcccagcactttgggaggccgaggcgggcggatcatgaggtcaggagatcgagaccatcctggctaacacggtgaaaccccttctctactaaaaaatacaaaaaattagccgggcgtggtggcggacgcctgtagtcccagctactcaggaggctgaggcaggagaatggcgtgaacccgggaggcggagcttgcagtgagcagagatcgcaccactgcactccagcctgggcgacagagcgagactctgtctcaaaaaagaaagaaagaaagaaaaagaataaggctgacaggagatgaaggctgcatagcttccctctgtcttccttcctcccacccaagacacctcaccccctcctgcagactgtcttttgaacctgcccctgtcagggtgttggtggggctgagcagagctcctgcagatggggggttgtggcatgggtgaggtggcaggaatgggtgaggcagcagtgggggcaggagctgcaaggaggctccgactatgggtggaacagagaagaggctgcagggtgggggcagggaggggctctccaggggcagctgtgtatttctggatggggtcaggccggcagaggtcaggtgtggtttcctgggaggtggccaagataggaaggggcacaggtcctggggtcactagactgatttcagccccagctcgagggtctgcccttccctctaggggcttttgaaagaccccaggaccctgtgagaccctctgcaatggaagggagagaagctggagatgggatgggagatgagggccccattgtgaggagctggcagggtgacctcgcctctacctgagctgtcagctccctgtctccaaggaaacccggccccctgagcctccctgaagcccccacgcccatctaacgggaaattctcagagaattcagatggtcatgggaaagtccatacatgtaaatcctcccgaagggtcttctgagtaaatagggggatctttctgttttcccctgtcctactgcctgcatctcgatgcctgcattaatgcagcaggcaggattgagggaggccgtaggatgaactggctgacaggtggtgacaggttgatatccacaggccgcaagcagcagggacaaccacggcaggtgttccctagagggttcctggccacactcctctcgggatcattgccctgcagaccctgccgcctgccccgccacatcctgtgccacggtgccgcgtgggccgctctcgaagcacaggccagatgtgcaaattctgcggctgtgcctgggggcaagcgcagcacagcttgcttttcttggaaatcattggtgatttgttagaaaaacaggaaacattggggctgctggtgtacattttgacttttttgtttttgtttttgaactcctttcatctgtctcagaatcagggtgttttaagggtattattctgttcaacttagtccttcaagccgtctctggtcactcttccctctctgcacatcccctttttttctttctccttcttgtcttctgctgccttcttcccccaacccgaatcactgcgtggggagggggccagatccagagaaccatggaaatgtgctggtgagtcaccttggccacgtgcctctgtggagcctggcctccctgcacctgcctccctactctctgcctccccaccaaccccatatctatcccgctacacccctcagtcatggtggttagacaggaagcaaagtggtctctgcacagtaggacctgctgcaactgggacagctggagtggctcccattgtcctgctgctgacacacagggatgctgtggctgtgatcagaagttgttcttccctgctgggtcacagtggagctggaggggccctcatttctttacccactggaacactgaggctgagagaggagcggggatgccttgaataaagaagaggaaggggtgaggaggtctgggtccacactctggctgtgtcccaactcagctcctccctgcctctctctcaaaaacacagcaggggccaggcacagtggctcgcacctgtaatcccaacactttgggaggacgaggcaggcagatcacctgaggttaggagtttgagaccagcctggccaacgtggtgaaaccctgtctctactaaaaatacaaaaattagccaggcatgatggctcatgcctgtaatcccagctactcggaaggctgaggcaggagaatcacttgaacctgggaggcggaggttgcagagccgagattgcaccagtgcactccagcctgggcaacaagagcaaaactttgtctctaaaaacaaaaacaaaaacaaaaaacaaacaaacaaaaaaaccttagcaggcaggaggctgggaactgtggtcgttttgtgtatgggatcttcaggaaagtgttacaaggctgctgtttgctggcgtcccttcgtgagttttcctgggtcccatcttgtcagggatgagctcttgaggatggccggtggttgctttgggattgttcttaagccttcttgcagcagctctgaacttcataatgtaccacggtggagagactcctctcccattttatggtcaagtaaacaggtccagagaggttctccattccctaaacaggccccagtgaggtgagaagggcagggcctcccacgtgcccagctgcttgccccaggttgggggctcttccctgctgggctctgctcctgggttttcatcaatgcaggaggctctgacaccacaccttcagccaggcccccatctcccaggggaagcaggcttaggggctgcccttgtgaagtcatacaagaagcctgatatgagagattagaaactccccgcagctctctgggggttgtttttaaaaggaattaaactgtcctgagagagatgtgtaagactaagctgagatggggaccaccatgagaactgaaacactctatttggagctttccagaaatacgcagatttgaggaattctggagtagggaaggacattggggcaggaaggtgaccccttctcacaccaggactccagaatacatgaatatcaaaaggcaatgacagtccctgggagagggaggggccacgttcccattcctcttggctgcacagcttctggggagcagagattctcagccaggcatccgtgaacttggatggagaacacgtggcatcgttattttcactcacctgtaactgaagttcgcatttgaacgtaggcaaaaaccacagtcatatcagtagcacctgtgactttgtcaccaacagaaatccagatgttttcgtgtcactttgaggttgcagatacctcaaatgtcattcatgctctttactacgtttaggtgatcacagtgattagactcactgctgggcttttattatttcatgtgttaatgagaagaacgtatactcccatttcataaatctgatgatttaaaaatagtttgaccattgtatttcagtgtaactcatttcctttgcaattctgtgtattttatttcatgcatttaaagcattattctgaagaggggtctgtagatgtcagactgctgaatggtcccatggtgcaaaaaagtttaggaattcctactgctggagcaattgggtagagaattcgaggtgttacctgacagctggggagggctttggtgttcggcaggcctgagttagcatcattgctctcacttgctgcagatcctgagaaagtgactttatctctcagagccatcgtttccttatgtgtaaaacagagatgaagaatgaccacctggaaggattgtcccatgtgaaagtgcctgcctcttccagcagctgacaggtagtaggaactcactgtgggtagtagctgatggcggtggcaccagcttatgtaagcccacaagactcaagcaggattctctttttacagaggaaactccaggctacgttcatttcttactgtccctcatgtagaaaggtaaacttgggtcatacctggatactgtctctcatctttttcttttgctctgagcaagtagctcccatgtatccaatatgaatcttggtccataaattcaagcatttgagaaataaaatttcaaatatatacttgaaatgcttcaagtgtatctgagaaattcttggtatgtccacacagtgaaatattactcagtcataaaaaggagtaagtactgttacatactacgacatggatgaacctagaaaacatgcactaagtgaaacaaaccagatgcaaaagaccacatatcataagacttcatttatatgaattgtccagaataagcaaacccataaagacaaaaagtagatgactggttgccagaggataaggggagggagaatggagagtgattgctaataggtatagggtttctttttggagcgatgaaaatattctgggatcagatagttgtgatggttacatacttagtgagtatagtaaaagccgctgaagggtattctttaaaatgttgagtttacgttacatgaattacagctcaagaaaaaaagtaaaaatcactgccaaacctatggacattgaaaagataataaaggaatattatgaacaactctatgcccaccaatttgctaacttagatgaaatggaataatttcttatttctattaaaactcatacaaatagaagtagattatctgaataggcctatatctattaaataaattgaatcaataatcttccaaaacaaaaaagtttcaggcccagatggtttcactggtgaattctaccaaacatttaaagaaaaaatggccgggtgcggtggctcacatgtggaagcccagcactttaggagactgaggcaggcagatcacctgaggtcaggcgttcaagaccagcctggccaacatggtgaaaccccgtctttactaaaaatacaaaaaattagctgggtgtggtggcaggtgcctgtaatcccagctactcaggaggctgaggcaggagaatcacttgaacccaagaggtggaggttgcaatgagccgagattgtgccattgcactccagcctgggcaacaagagtgaaacacacacacacaaaaaagaaaaaatgatggcaactctctacagtccattccagaaaatagaagaagagggagtgcttcctaactcattctatgaggccagcattacctaataccaaaaccggacaaaaatattacaaaaaacgaaaactacagatcaatatctttcattaatataggtgtaaaaatcctcaataaaacattagcaaattgaatccaacgatacacgaaaagaattatagatcacagctaagagggatttattctggatatacaaggctgattcaatatttgaaagtcaactaacgtagttaattacatcaacaggctgaagaagaaaaatcataaaactagatacagaagaaacatttgataaagtccaatacccatttatgataaaaattctcatcacactagaaatagagaggaacttcttcagcttgataaatacttatacagaaaacgtacagctaacattatggtgagaaactagatgttttccccctaagactgggaccaaggcaaagatgtcttcacttaccactcatatttaacatcgtactggaagtcctacgtaaagcaaaaatataagaaaaggagatgaaaggtatacagattgggaaggaagtttctgttcaccaaataacatgattgtctatgtataaaatcccaaagaatcaacaatgacaaaaaacaacattcctggaactaagcaattataggaaggtttcagagtgcaagataaatacacaaaagtcaagtgcttgcctatataccagcaatgaacaattggaatttgaattaaaaatacaataccatttacactagcaccaaaaaatgaaataatcagatatgaatctaacaaaatatatacaagatttatatgagaaaacaataaaatggataaaaaaatctacagaaatctaaataaatggagaggtattccatgttcatgtatagaaagactcactattgttaagctgtcagttcttttagttttatctctagactcgatgcaatctctatcaagactccaataaattactttgtgaatattgacaaactcattctaacacttatatgaaaagaaaaagacctagaataaacaacacaacattgaagaagaacaaagtcagaagactgacattactaacttactaagacctgctatagagacttgtaagacttactataaaggtgcatccatacaatggaatattattcagtgggaaaaagaaaagagctatcaagccatgaaaaaacatgaaagaatcttaagtgcatgcatattgctaaatgaaagaagccaatctgaaaaaaactacatactgtataatcccaactatgtgatgtcctggaaaaggccaatctatggaagcagtaaaaaagaagaatggctaccagatgctggagggagtaggatgaatagatggagtataggggattttctgggcagtgaaaatattctgtgatactgtaatgtgtattgatattatatatttggagaaactcatagaattgtacaacacaaagagtgcaccctaacgcacactgtggacttcagtgactactcttgtatcaatattggtttattaattttaacgaatgaaccgcactaatggaagatattaataatagaggaaactgtgggtgggaggaggaaggagagggagtatataggaactctctgtactttaatatttctataaacctaaaactactttaagaattaaagtctataaaagaaatagaaataaacattgtctcctttttttttttttttttgagatggagtctcggtctgtcacccaggctggagtgcagtggcgcaagctcagctcactgcaatctccgcctcccgggttcacgccattctcctgcctcagcctcccgagtagctgggactacaggtgcccgccaccacgcccggctaattttttgtatttttagtagagatcgggtttcactgcgttagccagtatagtctcgatctcctgacctcgtgatccgcccgcctcagcctcccaaagtgctgggattacaggcgtgagccaccatgcgtggccttgtcttcttatgttgactgaaatccgatgccaagccccatcctgccaggagctgtccgggagctcagagctgttcactttcctgccacaaaccttcctcaggatggttgccttcttatttagcatggggatagggtgaggggagagcacaatgtacagaaagaaataaattaatagaaatataaattatcctgtatttgtactctgaggtcttaggaacagctccggggaagcttgggttctgacctgaatctcttcctttggcctctggcagaggaaacaaggaaggaagcaggtctcccaggcaacctgcccacactgtgggtggccaaaaacgactcgttcaacacctctgaagactgactcactgggacgttgcaatagacgtgatttccccttgaagccagaggaatatcccctattgctcatatggtcataacatcatgggcctatatttgggcggggctttcgtttgcacactcatgtaactttccagggagaatctgcccagaccctgtgccaggcactggggttagaaccattatgttagatgggacattgacgtcagagttgaaagcccgctagagaaataggcagttataacgcaggcacagtggaagcagagatgctctgggagctgaaagggtgggggtggacatccagccaagcctggaggtcagaagatctcccctgaagaagtgacctggaaatggaagacagaagaatgcatattaagatccacatcagaaacaggggaacatggtggaaatgtttcaggcagaggcagcacatgcaggaagaagttttatggagaggaaaggtagaggtttgagactgactagagaagaagggcacagaactcttggggtccagtgagccatgttatgggcttgagttttgactcaaggcaatgaaaacccaaaggaaaggtttcagagggctgggagagaatgatgtaatcagatatgctttctcagggacaaccgtgcatagaacaacatgtatactatggttctatttatgtttaaaaacccatgatacgacttattgtgttgatctacgtgtgcttaaatcgtcagtaccagattgtcttgattactgtagccctagagcaaatcttgaagtcagataggatgagtcgtccaactttgtccttttcccaaactgtattagctattttaagtctttggtatttccatataccgaaggcatgttattcatttctattttttaaagtttgctgagatattgactgggattgcattgaatccatagatgaacttggaggaaaactgacataatatcaatattgagtcttctgactcataaatgtggcatatctctccacgtattcattgatttatcttagcaatgtcttgtagttttaatggtgggggttttccacattctttggtaaattccctaagaattttggctttttgatgctattatgaatggtgtttctaaaaacttcactttcaaattggtagttattaatatgtagaagtacaattgacttttaaatactgactttgtattctgtaaccttgataaattcgctaatggtagtttttaatagattccttaggattttctaagtatacagtcatgtcatctcagagtaaagacagcattacttcttcctccctgatatatacgtgttttttccttgcctcatggcaatggctatgacctccagaacaatgttgagtaggtaagaacagacatccttgctttgctcccaatagtaggtgaaaagcgttcagttttcacctttaagtatgatgttaactgtagatttttcatagatgctctttataagtttgagcagttccctcttactgagggttcttataaacgggggttgagttttttcaaaggctttttatgcattcatgaagtagttatgtgattttttttcactcttctttattaatgtggtgaattacattaatttttgaaagttgactttcagtacaatgactttcagtacaacaactttccaagtacagcattccaagtgggtaagtcccatttggtctttttatatatttttacttatttcggaaatgattatatttatatatttctagacttcatttttaattgttttgataagaatttttgcatcttgaaatgtaaaatgagagatattgatctgtactattctttgtttggtagtgttcttgtctggttttgacatcaggattatgctggtttcatcaatgaattgggaagtgtttcctcttcctctattttatgaaggaatttgagtaagattgatattatttctttcttaaaggtttgatacaatagctttttaaaaagcatttttagtaatacatgtctgctggtgaccatcttttcagcatctttttgtcttcaaatgtctttatcttcattatttaaaaatattgttttacctataactttcttcacttcccaaccctttgattatttttatagttcttttcatgaaaaatttacaaacattaaaatgtaaaaaatttaactgtacaattttgacaaatgtgtacatccatgtcatccacagacctaacaatatataaaacatttcaatcacaccattaagtttcctaacttttgtttttgaagaatatttccactggatatagaattttaggttgaaagtcctttttttgttttgtttttctttaagcactataaagatgtatatcactctatcctagtttgtgttgtttctaagaagtcagtagtttttctcgttgttttctacatacaatgtgtctttttcttctggctgctttttgagattttctctttatctttgattttcagcaattaactatgatatacctaggtctggttttctttgcacgtatccttcttgggtttttagagcttcccagatctatgggttcatattttttattaaatttgggaacattttggccattatttcttaaaatatttttttctgcacccattttctttcttctctctttttgagacatcaattacatatctattagaacttttggttgtgctcagaagtcactgaggctctgttcatattttgaaaaccttttttattttctatattttagtttgaatggtttctatcgtttaagttcactgatcttattcttgcagtgtccagtcttttattcagtccatccaatgaacttttcttttcagagattgtgtttccttttggtaatagatttccatttggttcttttaaaaatagcttccaggccgggtgcggtggctcacacctgtaatcccagcactttgggaggccgaggtgggcagatcaccggaggtcaggagttcgagaccagcctaacccacatggtgaaaccctgtctctattaaaaatacaaaaatcagctgggcatggtagtgcatgcctgtaatctcagcttcttgggaggctgaggccaggagaattgcttaaacctgggaggcagaggttgcagtgagccgagatcacgccactgcactccagcctgggcagcagaatgagactctgtctcaaaaataaaaaaaaaaaggtttccaattcccttctgagatttctccatctgttaacttgctctgtccatttttccttgaaatctctgaacatatttataatagatgttttaaagtctttgcctcctaatttcaacatacctactctctttggtttttattcattgaattacttccctagtaatgaattgcatttttcttcatcttcatctgtctagtaattttttcagtgtattctaggcattatggatgccacactgttgagcgtctggattttcttgtttttctttaaagaattgtattctgccaggcagttaatttataggtggataagcaggatcctttcaagtgtttcttaaaatttaatggatgtctagatgtcaagaattaccttcctaggatctcagatgaatgactgaggtatccagtgaagttcctccaccctggctgattggaaatccaatgtctcccagcactgtgcaacttctagaacctctgttcaactccaggctttccagtagctgtttctgccaggcttcatgaggtcttaccctgcacagcttagtattcagctaatgtcttcttgagctcttctttttcacgtttccctcttttccagttccttgccccacacagtccagccatttgtagagttccaaactccaatttctgtctcctcaactcggaaagccccctgtactctgcttgcattctacctctatgcttcaaacaacggaagtgccttccagcagaaacccagcgaaatcaagaggctccccttgtgtgtttcccttccctgagggattacagtcctgtgcttgcctgttgcccagtgtctataaacagttgcttcagctgttttgggtagtcttataattgttcatggagggaggcttagtccagtgccaattatcccttctcatctgatggtgaaagcaccccttcttttgggtggactctcgaatatcacctcttttatgagataaatctatttgagtatgatctgtgggattttaaaaaataaagtttttagaaggataaagatcagactattggtagtggttattctaggtagttttaaagcttatattttaacattttaaacttatctgtacaaggcttttaagttttgttttttaattagacttttacatcttgagataaatcgtagattcatatgtcattctatgaaataataaagagagatcctttgtacccttttctcagtttgctccaatggtaacatcttgcaaaacaaatacgacaatatcacaaccaggatattgaccttgatacagtcaagatatagaatattgctatcaccacgaggatccctcatgttgcccttttttagccacacccacttccctcctgcacctgccctaatgctaaccctagcaaccaccaatatgttctccatttctataattttgtcacttcaaaagtattgtgcaatgaaataatatgttacgcattcttttggcattgactttgtttttattcagcataattttccggaagttaacccaggttgttgtgtgtatcaatagttatttcctttcaattgctgaataatattccatagtatagatggaccatagtctgtcgaaccatattctaaattgaaagacatttagtttgttttcagtttttggccattttgaacaaagctgttataaacattcatgtacaggttttcgtatgaacataagttttcctttctttgagataaacgctcaggagcacaattgctgggccatacagcagttttaatatatgttattttgtgatataaatttctctctctgaactactttaactgtatcccaccaattttgatacattgtacattcattttcattccttcagtgaatttttggatttctcttgagacttcctctttggcccatgaattatttagaagtttgtttagtttttgagtatttggagatttttctgtgatctttctattattgattgctagtttgattccattgtggtcatagaatgcactctgtatgatttcagttatttttaagtaattgaaagtttggttgttttaaggcccaagatatgatctatcttagtttatgttccgtaagtacttgaaaaaaatgtgtattctgctgttgttaggtggagtgctctaacatgtttattagatcctgttgactgatagtgttgttgaattcttatgcatccttgctgattttctttacagttgttctatcagtggttgagagaaggatgctgaagtctccgattatttcttgttttttactgtttttaaattcgatcgcttttggggtacaggtggtttttggttacatgaatgaattgtatagttgttaagtctgggattttagtggatccaccatctgagtagtgtacattgtacccagtagttggtttttcatccctcacccccttccatgtctcccccattctgagtctccaatgtccgttatacaactctgtatttctttgcaaacccatagcctagctcccacttaaaagtgagaacatgtggtattcagttttctgtttctgccttaatttccttgagataatggcctccagcttcatccatgctgctgcaaaggacatgattttgttctctttttttggctgtatagcattccactgtggcagtccccacttataattatgagtttgtctatgttttctttctgttctctcagtttttgcttcacatatctttttggtgtgaacacatttaggtttgctgtgtcttttagtgaattgaccttatgtcattatataatgtccctctctgcttctggtaattctctttgctctgagctccactttatctgatattaatatagccattgctgctttcttttaattaatgcttgcacgatatatattttcccacccttttacttttaatttgtctatatatttatatataaagtgagtttcttgtagacagcaaatggttgggttatgttttataattcactacaaatctctgtcttttaattggcttatttagtccatttaaatataatgtaattactgatatgttagggctcaagtctgctattttgttattggttttgcattttttcctatggactaactgaacattctttagaattcattttttattttatctgtaatgcttttatatatatctatttgtatagctttttgaatggtcactgcatatattgttacttatcacagtccactgttatcattttaccagtcctagtgaactgtacctccctttatttccctttacctgcctccatttataatatgattgtcttaaatatttactcagcatacatttaatgctacatcagactgtgttattttttattcagccatctaagataacttagaaaactcaagaggagaaggaaaatctattgtatttacccagatttttccctttcttattatttcttcctgatgttccaagatttctttcttttattatccttttttctgtttagagaatttcctttggccattcttctagagtagggatgctggtgacaaattatttcagtttttctccctctgagagtatcttgatttcctcttcattcctgaaggatatttttgctggatattggactctaggctgacagtgcttgtccttcagcaattagaatatgttattccacttccttctagcattcataatttttgatgaaaagtacactgtcattcaaattatatttcatctaagataaggtgttgtttctctcttgatcctttcaagattttttctttgtctttagttttcagaattttgactatgagatgtcttggtgtgtatttcttggctttatcctgtttatggttcacacagcctcttaaaactgtagttttatatattttgccaaatttgacaagttttatgtgattatttattcaagtactttttcagccctgccttctttctcctctcccaggaggttctcctcttcaggttccacactcagcctccattgccaagttttaagtgattatttcttcaagtagtttttcagcccggccttctttctcctctcccactggtactccaatcacatgaatgttagaccttttgtctgacattactaaggggtagagtgggagttccagctacctattaggttttgtctttgtttgtgctgctataaaggatacccaaggctgagtcatttataaataaaagaggtttatttggctcacagttccgcaggctgtacaagaagcatggcatcaacatctgcatctggtgagagcctcaagccacatgcagtcatggtggaaggttaaaaggagctggtgtgaagaaatcacatggtgggaaactgggtgcagggggaaggtgccaggctctcaggggaactaagctggttcccaaccagttctcaggaatgaagagtgagtactcactcactcccatgagaatgacaccaagccattcagagagattggctccaaccatccaaagacctctcaccaggcaccacctccaacactggagatcagatttcaacatgagacttggtgggaccaaaaaaaaacatatctaagttctaacaggcctccactgatacgtctctggctagaaacggtaggagtgcctccttacagctacaatgccaccacagcagaggggatgacctcattacttctgggcagtggtaaaagtcttgactccctgctaggcttcctctgacatcatcttatcatggaggtgtctctttactgtctggtgggggtggaagtccaggctcctcactggtgtccactaacactgtggagtgggagggggctaattaccgctaatggagataaaagacctggctatctacttggcttcttcagacagtggccatggcaggggatttggggaacctcattacggcctggccagggtggaagtctaagccgattaactggcttttgctggtggaggtggcaccacaattttccctgtggagtttggctggaatagagcaggtattgtctaaaagtgtctgtcttgctaagttgcctctttcctcaggctttggctagagagagcaggcttttgtgagggctttattttaaatctgcacccattttttcagattgctggctgttcagctccaagtctggaatctataaggcaaaaagagaagccagggaactcacccatgccattccttgtccccagggtccctagcctgtgtgccttctctctctctttcagggtctcttatgttagttttatatatattgttcagggcttgtagttgtatttcaaatggaatagggaaaagcatatctactccacttacccagcaccattttttaatttatatatatataacctctgttatctatgtgataaaaaacaaggcataaaatatatattatgaaaaatgtttaataaaaaataaaaattattcctatttttacctcccagatataatttctgttagcatttggacgtgtaaccatgttgggtagtgacatggtttggctccgtgtccccacccaaatctcatctccaattgtactcccataattcccatgtgttgtgggagggacctggtgggagataatctgaatcatgggggcagtttcccccatactgttcttgtggtagtgaataagtctcacgtgatttgatggttctatcaggggttttacttttgcatcttcctcatttttctctggctgctgccatgtaagacgtgccttttgcctcctgctatgattctgaggcctccctagccgtgtggaactgtaagtccaattaaacctatttttcttcccagtctcaggtatgtctttatcagcagcatgaaaatggactaatacgggtagtttttcttttgacatcgatatagacattttttttcaaactggaagaaccttagggttcttttggatcctggggcatttcataaacccagctcttctgagcaaagcttcccaaagcagttgcctctctgtcacttctctctccttagcccattccatttggtcttttcttcctgcacttgttctttcatggtcactcaaaccctccatgtcaccagatccagtggccacttctctgccctcatgctgtagaccttgcagtggcattcctcactccctccttgaaacatgcttgttttggatcctgtcacatcgtgttctcctcctgctcatgagctgcatcttctcagtgtctttttgtgatacttccggtgccacctcttaacactggaggtgttctcctcactcttctcgcttcacatggttcacagcctcagtgaccacagcaccatgtgaactcccaaatagagagctgtagcccagacctctccattggggtctgaaggggatagaactcggacaaagcaggactcttgttttcctctcccaaattgtcctctccccaaacttctccatctcagtgaatgtgatgcatctatctgcattaaaggaaaagacaaaaggggatgaagcatccaaggaaaaagtgcacacccacttggggaccaaaatgtactcagccatgatgcaagctgtacccacttattatagagattttggcctgaacctaagcctggattttcttaatccatttccatctgatttagacataatgtcaatccctcattctggcttgtcagtgttggtttcagtttggattgtatgcatgtgtgttccttttttctctatctatctatctatccatctactatctatctactatctatctatctatccatctactatctatccatctactatctatccatctactatctatctatcatccatctactatctatccatctactatctatctctccatctactatctacctatccatctactatctctccatctactatctatctatctatccatctactatctatcaatccatctatctatcaatctactgtctatccatctactatctatccatctactatctatctatctatccatctactatctatcatctactagctaaccatctatctatctacccatctactatctatctatccatctactatctatctatctatccatctactttctgtctatctatctacccatctatccatctactatctagctatctattcatctactatctatctatccatctactatctatctatccatctactttctatctatccactatctatctatccatctatccatctactatctatctatctattcatctactatctatctatctatccatctactatctaactatctatctggtatatttggtgagaagttgggagagactgcatcagtgcctgatgccctaatgtcatagtaagttgtccattagagatctagagagttctagactgggctaaacgggactcttgacatcagcgtttgtttcataaaaagttgtaaaaaccacacctggccaagtatcgggaggagtgtctgatttcagttctgtccacaaacctgatgagtatctgttttcttgttagagaggtttcgctctaaagcatattcatgaatgggatggagggggagaatttgagagatttttcttgcataattgggcaggagttcaaagagagtaaaaaggagactagtgaagatgtgcccgtgtctgagaacaatgacctgctgttggattaatggagagaagacggggtggtaaatggtttatcactctggaagagaagaaaagctgtgcaagggaaaagataatggattggaccagtctaccccaaacttattctgatagtaaagcatctagaagtcacagtgctctggaaggagaaaaatcttccttgcccaaaactatgaaatattcatatctgtcttacaaactagaaatgattctacctgtagaaagtgagcagcctgtgtcaggctgcaggtggctcacgcctgtaatcccagcactttgggaggctgaagccagcagattgcttgagctcaggagttcaagatcagcctggcaacatggtgaaaccccacctctacaaaaaaaaaaaaaaattagccaggcattgtgacatgtgcctgtagttccagctacttgagaggctgaggcaggaggatcgcttgagcccaggaggtcaaggctgcagtgaggtatgatcacaccactgcactccagcctgggaggcagagcaagaccctgtcttgaaaaggaaagggaagggaaggggaagggaggggagggggggaggggaggggagggaagggaagggaaggctgcaatgtcacaactgcaatctttttccacacccagaaggctgcagtgaggtatgatcacaccactgcgctctggcctgggaggcagagcaagaccctgtcttgaaaagggaagggaaggggaggggaggggaggggaggggaggggaagggaagggaagggtgcaatgtcacaactgcaatctttttccacatccagaaaaaccagaaagctgccaatatatgtgtaattggcctttcttgagtttttacatttacattcatttgctgctttattctcctgtgcacattgtctaaccattaagatgggctccatatttaaaggtggtaggattaaacagtctcccgtgtaagtgcccaaggtttagcccaggtgcccaaagaattcggttgctgcctggagcttattgcttgttttattgttatagtcttcctctggtttcccagcttggcagtaatttcagtttgcccacccctggctccagtatagctgctcttacttgcatggggaagctaaattgcctacagcatacttcatttaccagctgagagaatactctgtaccgcagtctcctcatctgtaaaatgggggtaaggagtgtctacctcacatggatttaatgacttaattcatagaaacacctagaacggtgcctgccacatagtaagctttcaattcctattagctgctattattaaaattattatatgaaaaggtgacattgtacatcctgttgtcttttcggtactgtacctgggtagagtggaccagagagaccttagttcgaatcctctctgtgctatccgtatgtccttgggaaagtcttttagccaacaggagctgaacttcctcatctctgcaagttcagagtgtcctagagtggctcaaaataaatgagatcatgtgcttcaagccctaagcatggtatctggcccagggtcagtgctgtgtacacgttagcatctttctccttcccctccttcatcctcatcccatttcttcttggtcttgaccacaactgtggtcttcccaggcattcctgtgccccttccttggtaaagaagggcttgagcaaagatggggggaagtgggcagtcttgcctctgcttcttcagtgtttctttcttttggtacatctctacttcatcttctgccttccctggacctccacaccatgtccacctaccttttcacatttcctccctctcctggccccagagtccttctcctgcccactagctaccgtcactgctgtaacagactcatctggtggctaaatcatcctccaagaatcttacatcttgaaaaataagctaggacagaggaagtgaacagccctaacccaaggagaatgaatcaccaacaatggaaactcagccaatttttatgcaagacgtcttccctggaagcctcaaattacaacactgagacgaaacagtacactcagccctttaagtgtctagaaaccagtagaaatgacttcctatgaacacgacataggaaagaacatgggctttgagagtcacgccaactttgcacagacttcaagctcgggccataggaattgtgaccataggaacttgagtgaataaatggcttaccctccctgagctgcaggaaatgtgaataattatgataatgtcacagggtgattatgattatcaaactaagtaatcaatgtcttggggattaactgaatgttaattcccaagacaatggggattgataatttgataatcaatttgataatcaattatgattatcaaactaagtgaaagcgcccaacatagtacctgacacagatcagccactcaataattaccttcctccttttcttcctccctccctccctccttctctcccaccctcccaccttccctccttccctccttctttcctattctccaggctgaaactcatggagaatgaacaaatcgggtggtttgtttttgttgttgagttatacaggagttctttatatattcaagatggtagcccttaatcagatatacgatttgcaaatattttcttccataacatggcttgccttttcactctgttgattgtatcctttaatgcacagagttttaaattttgatatttaactattttttcttttgttgcctgtgctttttgtgttatatccaagaaatctttgacaaatccaatgtgatgaagcttcccccaatttttcttctaagagttttatagttttagcactttacatttagatctttgatcctttttgaattaattttttatggtattgaatcttcctaacaccagaatatgtatttccatttacttttgctttttcgtgtccctcaaacattttctttataaaaatattgcatatttttaaagtttttaaaaaaatttgtattacttttgttgctgttagaagtggaatcttgtttccccaacataatttatttgcatagttagataatattgatttctatattaatttgtgcctaaccactttacctaactctgttctttggtatgaccatttttcagttgattttcttgggtttctatgaacatttcgagggtgaaaaattatgaattatgccaattctataattggcaaagctataattcatgagccagaatgaatgacatatgacatgtaaagtctcagaaagtacctcacccacatatctgtcctgaaactactcgaaatacttgagtgagcaagacatgaaccaaaataaaggacttataagtaggaatggtagggtacaaaacaaaacagtgagtaataaaataaatgaaacttaaagccactgtccaaaaatactgctgttatcacagttattacatttaatgtaaatgtcaaaaacattgaaagaactatgaagtagtataaaatatttaatacaggccgggtgcagtggctcatgcctgtaatcccagcactttgggaggctgaggcgggtggatcacctgaggtcaggagtttgagaccaacctgaccaacatggtgaaacccgtctctactaaaagtacaaaaattagccagccgtggtgatgcatgcctgtaatcccagctactcaggaggctgaggcaggaggatagcttgaacctgggaggcagaggttgcagtgagccaagattgcgccattgcactccagcctgggcaactagagcgaaactccatctcaaaaaaaaaaaaaagaaaaagaaaaaagaaaaaaaaatacttaatatacatatggacctgtattttaaaagaaaacaagttacgttaaaagaagggctaaaattacagaagtaattgtaaaaattatataggaatttctgattcttgctaattaactttaaaatcttgattaaagtgaatgatattgtcagaaaacctaaatttgcaaagttgacacataaagttcaatacctgaacagaccaataactctggaagaaatttgaaaagggattccaaaaatagccttgaggagagcagctgaagtcactcactgctgggcagcaaggagagtgcgatcctcatctatgcagagggatgcatgattatccttcgttccaggctcagattctacttacagatttactgccgtctgatctgggcaagtcccttcaccactcagagcctttgttttcatatctgtagagtgggaatgttgtactaaatggtacctaaggtgccttcccagtcttagagtcaaatgtgtgtgtgtatgcatgtgtgtgtaaaataaaaagcatgactttccaagtctaactgtgcgtcagaatcatgcaggaggtgttttatttcttggcctagttctgaagacatcaagagttgggcaggtgagatgtgtgtgttaagaaagcactctgggccgggcatggtggctcacgcctgtaatcccagcactttgggaggccgaggcaggtggatcacttgaggtcaggagttcgagatcaacctggccaccatggtgaaaccctgtctctactaaaagtagaataattagcctggtatggtggtgcatgcctgtaatctcagctactcgggaggcaagagaatcccttgaacctcggaggctgaggttgcagtgagccgagatcacgccactgcactccagcctgggcaaaagagcgagactccgtccaaaaaaaaaaaaaaaaaaaagaaggaaaaagaaaaaaagagaaagaaagaaagagagagagagagaaggagaggagaggaaggaaactctgataggtaacagagaacatatattgaatgtttgttatgcactgggaatgtttccacacatttgtctatgttaactcattgtgcttaaccttgagctcttgcagatcccaagcacacacatggtgtgccctgtccttttaggtgacaccaacacggtatgacacaaatgcaaactgggcacggagatctggtaacatttggtcatgaggtggtcatcaagatgttccagaatatattaactatgaactgtatctagactgacattaaaatgaaaacataacttgaacattctcaaagacagcccttaaatcccccacagagccccagaaattctcagccccagtttaggaacttcaggttgggggattttgaggcagccagccttgcgctagtccactgtgactacagaagaaatagcaatgttcaagaagctcatgtaaggtagggaatcatttgataactgcctggaaagatactgaaagggcataaggctatgtaaatatataaaaggtcttagagccatgtctaccattcactcagcttcctctaattaacaacttacataaacatggtgcagttatcaaaaccaggaaatggtcactaacagagtactattaactaaacgacagacctcatttgaatcttagcatattttccccctaatgttctctttctgttctacaattcagtacaggatctcacattgcatttagcctttgtgtctccttagtctctaccaatctgtgatagtcctctatctttccttatctttgatgacctgaacactttggtgaggactcaccatagtgaatgtctatgtggtgagtaatcaccatatagaatgtctccaaactgggttttgaatggtgttttctcatgattgtagttatgtgtttttggcaaaaaaacaaaaacaaaaaaacacaaagaagtgatgtgtccttcccttctcagtgcattacagcaggggatacatgatgctgatatgtatagcttattgctggtcatgttaaccttgatcatatggttaatgtgctgtctgctgggttcctccactgagaagttcttgttttcccctttataagtggtaattatttggggggaaatactttgaggctatacaaatatcctatttgtccacagattttcactaacagatttttagcattcatcagtggatctacaattattaccatggtgtttgcctagtgacaattttctatttctctcattcctctcacattattaattggaattcttttgtaaagaagacctgtcatttctcctccatttatgtttttattcaattatctataacatttaattatctataattatctatagacttgtgggtatttattttattctatgagttataattcatcactttctttgttcattcaaattgtcctagctgtggccattggaagctccttcaggttagaccctatgtccttttgacactccccatggtttttcaaatattgacttattttctggcactacaagatgtgctgggtttattttgtatatttcctgtttcaatcctaggatcagccatgtctccaaggagctctgtttccttttattggaaaatggtatttagaaaccaagatctgggcactaggtgtgcttgttgctactgggatgtcattgcctctgggctttctctgtagacagaactagaaaatgtatgtatgtgtattaatccaagcacatacatctttttaaaatttttctatatgtatttatctgtatatacattaaaaaccatgagttcatactgattctttcaagtctggtccaactccacaaggttcattccagccttcccccttctttatttgtcacatctttctttagctcttattatctatggtttattcacttatttgtctaatgctagtgtacacataaagaactttcagatttctttctttttttttctttttttgacatggagtcttgctgtgtcacctaggctggagtgcagtggcacaatctcagctcactgcaacctccgcctcctgggtacaagcaattcttctgtctcagccacccgagtagctgggactacaggcgcacaccaccacacctggctaatttttgtatttttaatagagacagggtttcaccatattggtcaggccggtcttgaactcctgaactcaggtgatccacccgcgttggcctcccaaagtgctgggattacaggcatgagtcaccatgcccggccccgaacttttagaatttttaactcacattcatatgagaaacatatttaataactggaaaacagtatttgtctatagtttttatttttgactttgaccagtatccagtcaaagtaccattttacaaagttactgaagttagtgctttcattccctatccccgtcagtgtggttatgttagtaattgattatacagttaggttaatttgttattgcttgtctcccacttttggtcccctgcccccatattctggttgatttcgattatttatttaattttgggtatgtaaaatatcgccatggttctaagcgttaaagctatacacacagataatcctcagagaagtgctgttcctccctcatctccagtttcattccttgatcctatccacccttttctcacctccacctcccatagtaactaaccaatctccttaatttctggtgtatccttcctgtgttgggaagaattcttttacttaggtcacggtggagattctgccttatgaaggcatgaggaagggactggggcagagaagggagagtcaagcctcggaaggtaagaagcaggagagggaggagtcatccaggacggaagcaggctgggtcagcccaggactgcatgggcctagaatattccagaacaccaggaaagcagtgtggagagccagccagaacctggaggccccctccatatgagatgcaggccctctaactcctcctttcattactatttagaaacccccaagaggctctcctccctgccccatcgtgggctgccttgggaagctggacccaggcagaccctacacctcctctgaccagccctgcaccagagggaagatgagccctccacatcatggcatcctgtcaacatgggaagaaaaagtggaagcaggactggctctctctgtgccctctggggtcccaccaacccaccccgactccaggcctttctgccccatgcagggtccccagcaaggactatgagtcctctttgctggctcagaagaggaacttggagatgggggaaggccctgttgttggatatttcaacaccacctcaccactggcaggggaattggtggcaggggcgggggggcggggggcggcattcccggcagcagctggaattttacaatgggagctcctctcaacaagatagggagggggcttgggagggtgatgccagggaagccaggccctgcttgcccagcttttgaaaaaaggcgtcatgctgggagagcgggtgccactgtcttcccccctcacctctgccccaaagccgtgaggttctgctgacaagtcataagaaacagctgatgactgactcagacggaaatgagcgtgtcaaaggggtgggtggtgagcccggtgtgctgggttaacccccagggcagctcagctgagggtcccctggctgggttccctctccccatctctcaggctcccaggggctagtggctcaggcaagtcctgcctctgagaagaacttggggcgagctcgagaaagccttggaatgccggggaggctggcacaccagaattccaccagtgcctgaggatatcctgcccttccgtggagaaggctttgatgtgtcccttgagcagggcggggttggggggaaggggcacaccgaggccaggagatgggaaagtcacaggcggccccagaatgagaaagagaagccatgggcagtcaggcattgggtgcggtgtgctagcagcagtcctatggcactgtgttctgcccccttaaggacaggagtgtgcagaagtggtgttggctgagaacattcatttgcatcttgtgtttgcatccattacagtgtgggacacgtaatgagtgagcaggatgactcactcctgcttcatggcataaccagcttggccatcgcagcaggggctgggcagaggggtcttaaaacccagatcacacggttcaggacatgctccaggctagagacgcctgggccccgtgagccatcacggtcatcaccggtggagtccgagagagtgttgctcggtatcccctctggcacacactcctgtgagccttggccttttctctggaggatgcagggctgtgcggggcagctggtgtagatagatgtggtggggctcacaatccccagcaactgagagtctagattttcttttttttttttttttgagacagagtcttgctctgtcacccaggctggcacgatcttggctcaccgcaacctccacctcccgggttcaagccattctcatgcctcagcctcccgagtagctgtgattacaggtgtgcaccaccacacccagctaattttttgtatttttagtagagacagggtttccccatgttggccaggctggtctcaaactcctgacctcaggtgatccacccgcctcagcctcccaaattgctgggattacagacatgcctagcctacctcttaaagcaaaatcaagtcttcacttgttgaagtagaaacatgaattggttttaattttcttccagtaactgcctccgactgtgctgaggggcaatgtattctagtggttgaaaccccagaccccctgggtttataccctggctttgccatctcctagctgtgtgactttaggcaagctgtttaacctctctgtgccaccaatttcccatctttaacctgccccatccagcttcctacaaaattggtccagccttcagcctccttctgataggtttccctcatgctgctggcagccctctagaaaagtaacaacagaccggctcaggccccacgtttgttccacccctcaccccaatctggagctgctgacttgtccaacagtgggtctgcaagatgccccctctgccccttgtctcagccctgccatggctcacaggcagcaccggagcaggcgagcgagtttgccggctgagtagatagtgacccgaggaacaaagggcagcatcctcagctttgggcatcccagtctgtgtcaggacttctctgaaagccctctgccctcggctttgcggagagaaggaaggatcttccagatgggctgacaaccctttttctcttcccaatcttatgacagggattggcgggtcactgtgctggttctggactgacacctcccagcaagcccaccagagtggctgcgcccacgtccttgacaatactccgtggctcttagaactttagaatgcagaggatttagcaacttttgtccctagaattgggtctcagccacaatttgaaaataaaaagtcctccctgatccccttgtctgtttataccagtgtcaactctctcccagctgcctcgaacaagtcccttatccttcctggacctcagcctccccttctgtaaaatgagggacttgctggggaggcctctgagctccctccaagaacctgctctgggggtaacctgggagaaatcagcctgtgagaacaaagggtcgctgtcacatctgggccagctgttcatgccccaggctcatccatgtgaaggtgtctggtgttctacctcctccagcaggtgccgttagccctgagctggaataggacccacctccagagggtcttgtggtcgggctgccatgggaggcagaaagatgaggcctcatcacaggtgtcagtccccacagatgctcatccatgccaggtgccagcacaatcccaggtcagggaggggtctgcccggtctggctcagggtcagtggactcacgacctgagctacctgtggaggtgttaaacagaagatccaaaggcaactgtaaaagtcacatggaagggcctcaggatgtctttgggcatccaggtgctgctaatggacacacccaaggtcttgagtcaccaatgaaaggttttcttctttttgttttctttttgagatggaatctcgctctgtcacccaggctggggtgcagcggtgtgatctcgacttactgcaacctccgcctcccgggttcaagcgagtctcctgcctcagcctcccgggtaactgggattacaggtgcctgccaccacgcctggctaatgttttaaaatattttttagtagagatggggtttcaagatgttggccaggctggattcgaaatcctgacctcaagtgatccgcccaccttggcctcccaaagtgctgggattacgggcatgagccaccgcacccagccacccgtgaaaagttttctgaactcagctcttcacctccacagccagaaggcatgggacctaatgggttagtctttgtcctgggccagcccggcgccctggcatatactcctgggtccaggttctcagcaagctaattcctgcacccagactgtggcatgggctggctcccctttctccaatactcttccccctcatttgccctggcttcctcatccagcttaaatgtcccttcttcagagaggcctccctgaccccccaacaccctggaggggggtccccacttgtcccactcccagcaccatcctttacagcatgtttcacttcttggaatcacgtctttgtttgctccattgctcagtgtctgtgtctcccaccaaggagcacagctgcttggttcactgctgtctcctctagtctcctctagtgcctggcacatggcagacagtcagtgaacccgtgatggaaccaaggtgcgtgtgccgcttcctgcgtgcccactgctgcactgtccggctttggaatgcatagcctaccacagacactgtgaaaggatgctggagagctcacaaagggcttagttttcacttggcgagtggtgcctcccaggctggggaggcaggaggatttgcctgtgtggggcctccgtaagctgaatactctagccgcgcagctgaacccaggttaggattttatccctctttgtatgtcatctgcatggctcagctctgagctctgtgcttcctcttctggcttccagagctgaactgcagctttctcagcatccctctatggcctggcctgactggccagtgaaggggtctgcccggaaggagtgagtgcagtggcatcccctgaggccagggcgatgatggcaatgactgtagcagggcagctctcgcgtgttggaagcttactcagcgcatctgctacagcattttatcttcccaagagccccatgaggttagcaccattgtcatcccattttacagataagtcaacagaagtttggaaaagttaaagtatttgcccaaagtcacatggctagcaaatatcagagtccaggtttgagtgtaagtccgtcggatgccagagccaagcttaatcactgggccaaatcaccttccgtggcttccccagagacccaggagccctcatacataactaagaagctgggctggccctgctgggggctctcagttccccatacggggctaaaaccctcctgaaattccctcttcagtgactttccagctcagctaagcaccccttggattctcctcagtaggatgaggaaggagggcagggaaggtctttgaatgacaggtaacattgccaagccccaggggaaggaaagaaaaatggcaaaagtggaggttagggcagaaaggaaacagatgcctgtgacctgggcacccaatcagagggagctccctccaagcatattgagggagttgctgtggccttgtcatcaggaacacgctctctgccccatccctggaggtttggaaaacacagcctggaaattcagaaaaagtcctccgagtgattctgattttcccctcaggatcttcctgcccagcccactggggtctgaccactccctgggtacttggcgacacttcccactgcccagtgccctttccacctctctgctcccattcctgaccccttacttcccacacctctgtcccgttctgctgcaggggtgctctgtcctgccactcagatgtggccctccagatgccattcctaccctggaggcagctgtaaggcccctggtcctgtttccacagcacctgagctatagctgggctgggctgatcgcgctgcactgtgagcacctgttgtctttactggaccaggtgctctctgggaaaggagctcgacaagctgaccggcgtctgtcccccatgcaggcgatgacccaggatgcagccaggggccacgacatgcacggaggaccgcatccagcatgccctggaacgctgcctgcatggactcagcctcagccgccgctccacctcctggtcaggtcggtccaagggagccggggaggtgtttgagggctcaaggaagcctcaggggccacggtgggcactggaccaggcatggaaactggcaaattctaggtgaaaccctgtctgtgtgacttgggcaagcctcagccttctcctgggcaggtgcctggcgcagcacttgatgtagtcagacctcagtgtctggcactttctcccttctcccacggcatcttcctcatcctactcagggctggctgccttttacttctggaagaatccatcgaatctgcttagaaaaccacaactgctgattctgaaaaagcagctgggaattcacaggcagctctccccagaattctcctgtttgtttgtttctagttccctcatagtcctatcctcctcttccctatagaataagggaaaactcagcagagctgcagagagcaggaggcctctatgtttcccacctcccaggactaaaaaacagggtgtccgcagtcccgggcagttgcgtctctgaaggctggcgcctggctgtaataattcttatgcttgtagagctttctcatgccccatatctcactggcctccctaacttctccgtgagtagccacccagtgctccttgaacatacctggtccctccgtacctcagcacctttgcacctgctgcctggaactcttccctgggaagtacacatagctggctccttctcatccaggtctcagctcaaatgtcgcttcctctgagaggctgtccttggcctttggaatgagacagacctggattaaagctatctcccattggctttacaaccctgcgcaggccacttatcctcccaggaccctggctctacttgccttgtctgcaaaatgggaataataacaatggaaccacttttctgaagggacagtgggatcctcaatgaagataatgtattcagaggcctagcactgtattggcacatagtaggtggtcaataaatggtagttttctttcttgcctgctacccaggttttgatggaggctaagctcatagggctggggagagggctatcgttaagcaaaagaatataaaaatatctgacctttgcaaattttctgacaacctgtgaccacatggacacattgttagaagcctctagaactttggaaggagcctgtacacgtgagaggtcctggagcttgagctccacgaagttcaagttcaatccatttccactcctgcggctctcactccccactccacacacacatacacacagcccctccctgctcctctgccccaggctgtcgctttaatttttaggggtttacccttgctgactgcagggaaacagagactgacaaaataagaaagtctggggaagttacagagtgacaaagtgctcatggcagcttttaaaatagaactcgtttagcttccccttcctgggctccattgccattcctgggaagctccatggctgctgtagactcagtcttgcgtcttgggatggaactcaccgtggctcctctctgtattcttccagcaatttctgcctctgttctaacctccctgcaactcataggtaccagaacccactgtaggaaaccagggcaggagaggttgtgggagaactggtgcttccacagggagcggagtcatagtgagctcattgtcctctaaagggcttcccagcctgcatctccaatccctgtgtctcttgcatatgcaggaacagggaatttgtcattatgtcttgatggggcatggtagggttgagtgttgatccagcatcttctcctagattcacttactttagaaaggagtgttccaggccgggtgcagtggctcacgcctataatcccagcactttgggagtccgaggcgggcggatcacgaggtcaggagatcgagaccatcttggccaacatggtgaaaccccatctctactaaaatacaaaaattagctgggtgcggtggcacgtgcctgtaatcccagctacttgggaggctgaggcaggggaatcgcttgaacccgggaggcagaggttgcagtgagctgagatcgcaccactgcactccagcctggcgacagagcaagactctgtctcaaaaaaaaaaaagagtgttccagtgcaataccacagaaaaatgttccagcataaatgccccttctttacagcccctgcctgagtgtgactggaagacaccagaactgaccccttgcctctctctccttttccagctgggctgtgtctgaactgctggagcctgcaggagctggtcagcagggacccgggccacttccttatcctccttgagcagatcctgcagaagacccgagaggtgagggggagtcaggaattgaagggcagatctggggtcggcctcgtagagtggagaaataggtcccagagaacatcattcctgggtgcctggacctccagaggggctgggcaaaggccctgggaacctgtgagttttgtgtttcggtagcacttgcatatgagaggtttctaagaagggggtgcattcagtaagaacacatcatacgcgagctagggtcctgagttcagctacagacatggcttataagtccagatatagactaggaagggagaagacactttacccaattcctttcctcaaaaagatccataaaaacaaagacaggaaagagaaaactgatcggaaaggtaaactgaggcctcctctcttagttcagtcaatggcttcatgacaaagaagaggaatgggtttagtgctgagctgggcttgggttccagaatagctgtgagtcccaaaagaggatttgggctcttttgtaaagaattctcttttatggttgtgtgtgtgtgtgtgtgtgtgtgtgtgtgtgtgtgtgtgtgtgtgttttaattattttaaatacatgtgatttggaaaacatgtcactttcactctcggctacctatccctgtaagaagatgcccaaggttacagttctggccccactatttacctggtagttttttccttcatcataagccaaccagctcagaagagctgaaccacctctggagcgcataacatataaacccaaatggaaagtctggatcaccgtgtagcaaaagaggagggtttcatagaaaggtctgatctgcaaggcttggtagacacattgtctattaaggataaagagaaggaagattctaaatttgagcctactgggctcatctagcagagaagacatgatggggctttctctgtatctccaacccccatgagttccaaaatggaccgagaaaccttctgaccaatgaattctaaatcatgtggtgtgcacatgtgtgcatgtggtgtggtaggttgtatcagagaggcagttcacaaaaggagaaatagaagttgtaaacaaatatgaaaaagcgatactaaaataaatgcaaattaaaaccataatgagacaaactttgcctaacaaattagctaaaaaacaaaaggtaaggccaggtacagtggcttgtgcctgtaatctaagcactttgagagactcaggtgggagaaatccttgagcccaggagttcaagaccagcctgggcaacatagcaagacctcgtctctacaaaaaaatacaaaaactagccagttgtggtggtgcacacctgtaatctcagctacttgggaggctgaggcaggattgcttgagcccaggaggtcaaggctgcagtgagccaagatcgtgccactgcactccagcctgtgcgacagagcaagaccctatttctctctctctctctctttttttttttttttgttaaaaaaagataaaaaccaatgcaggaaaagcatggtgaaaatcgtacttttatatatatagatagtataaatggcaaaatccttttggaaagcaatatgacaatatgtctcaaaggtcataaaagtctataaacatgttgataatctttgatctgttgactccacttcttgaactcctttctagattaataatccaaattatggaaaaaggaatgtgctgcatagtagtgttcattgcaaaatatgtaaaataccaagaaaataatcttgaatgtccacaatgaaactaataagatgccaggcatggtggctcacgcctgtaatcccagcactttgggaagccaaggcgggcggatcatgaggtctggagatcaagaccatcctggccaacatggtgagaccccatctctactaaaaaaaaaaaaaatacaaaaattagctgggtatggtggcacgtgcttgtaatcccacctacttgggaggctgaggcacaagaattggttgaacccaggaggcggaggttgcagtgagccgatattgcaccactgcactccagcctggcgacagagcgagactccatctcaaaaaagaaaaagaaactaataagttatggaggtctaccagaaggagtataatgcagctaaaaatgatggatattatccaagggcataaataaaatttaatatatgatacaattacatcataagatttattaaatggcttagggaaaattgactaaacatttggaaaaagatagagtgagatccccaactgacaccatatagcaggtgaaattctagttgcactaaatatttctcctttttttttggagacagagtctcagcctcccgagtagttgggattacaggtgtgcgccactgtgcccagctaatttttgtatttttagtacagatggggttttgccatgttggtcaggctggtctcgaactcctggcctcaagtgatccacctgcctcggcctcccaaagtgttgagattacaagcatgagccactgggcccagactaaatatttcaatttcagaaaacgaagcttcaaagaagataagaaagtatatatgaatatttacatgatccttgcatgcaaaagcaaaaatccatgaaggaaaaatcaacacctgtaatttctgtacatcaaaaatatttataaaattaaaaggcaaacaaccaactggaaaaaaatatttataacacaaataacaggtaaatgtataaccagaagggaaaaaaggtggtcttagagaccgtatagtaaaacagaaatttacttataatactatatgtaaaatacgttaggagtaaaaatatacacacagcttatagcttcgcagacacaggaacagaaaaccaaacaccgcatgttctcactcataagtgggatttgaacaatgagaacacatggacacagggaggggacatcacacaccggggcctgtcggggatgggggacaaggggagggagagcattaggacaaatacctaatgcatgtggggcttaaaacctagatgacaggttgatgggtgcagcaaaccaccatggcacatgtatacctatgtaacaaacctgcccgttctgcacatgtatcccagaacttaaaataaaatttaaaaacaaagaaaagaaaatacatagggcaaaaatggcatcagaagagggacattgaaacagctgtggttgggtttgggaggggaaattgtaagtgttttcgtttacatccattttccaaatgtttgtcatgtgattgcactattttcccctaaaaaaaaaaaaaaaagaaaggctagaatgaggaagaaccactgtattctgcctcagggagccctggaccccgtgaatgaggctcattccccttctcctcctctccacaggtccaggagaagggcacctacgacctgctcaccccgctggccctgctcttctattccactgttctttgtgtaagtccacgtgggccaggatgctggaggtgagggaggagggggaggagcgacctctatctggggcagagccctcacacctctggagataagcagagagagaaactgtcaagcagcggcatgtgaaatgggtttcaacccttagatggcttcagagcagccaccatgagaggcttctggtgactccatgtggccgccatggtgcctggcatctctgggctcccatgttggaactgctgtcactgtctgttcacaggccacaagagatattctatgtccacctcatttttcaccccagtagtcggtttcacccaatgtgatcaccccctgtattcaccagacaggggggcatcaaatgtgtacactgactgaatccatcctcaaaaaataaacatttacctgtaatgaggctatttaagtaaaggtggtttaggcattgaagaccattatccataacaagtgtcagcaatggcaccatttaccagtaaggggacagcctttcagagaggctcactcaagcattgggtaaagcaagtccctcccagtagagacaccctgggtgccatcttgcccatctgtaacccactccctgtgagtaacttccagttccacctgaccttgtcctgggacacgctgcggccaggaaatgtgtgtcttttgtggaatattccagaaagggagcagaagctgtctgggactatctgagccttttctcacctagatctctttgcttgttgcctgcctccatcctagacaccacacttcccaccagactcggatctccttctgaaggcagccagcacctaccaccggttcctgacctggcctgttccttactgcagcatctgccaggagctgctcaccttcattgatgctgaactcaaggccccaggtaagcactgaggcagctggcacgggggacagggctcagaaggtcagaatgcttccaactcctctgaaactgttttttgtgaccctccttaccttgcatcctttgattcatctctgccaacgccttggttcacaaacatggagtctcctcttcacagcaccatcaagcatctgatggttgaatccacacaagatgaaagtaaatatgggaggtaactcgaggagggattgttaggggaagtaggagcaggcactcagggcaaggagaccccaccttggcctgtgcctctgatctggttagtcaaggggtctccaaggctacccagatcagacagagaagcccccaggatgctgacaagagggctttgcatgttctctgtgccccaggaacaagtaggtaattgtgtgtgtgggttgatgcagtttgggttggggaaggtggctggtactaggaacaatgaccactgtgacaaatgtggacaagacccgggactcagttttcatgtgtggggtctgaaaagtaagaattcttcagaaattgcaggtgctgtcatagacatgcaaatcaggtctaaggaagctacagtagtgcaggagaaaacttagcaagtgtgatttactgagaagcggctcagcgaatcagtactcaaaggaataaattcgcaaaagcatctcaatagatgcctctaaaatatttcataaaattcatcatcattcctgatattcaaaacccctcaatatatggaaacgattactctagaagtgcttttaatatggcaacagcccaaggtaaaatactagaggcatgttctttagagccaataatcttcctcttttggcttataggtatttgcctatgcaaaaagacaaaaataaagaatactttctcttctgaagaagagaaattttaattagttggagctcaaacaattggttttctgtcgagactgagagaatcccctgaacaaagaattgtcagaactagaaaacaggtagctaagagctttttttataaaccagcattaaccagtgagaaaacataattttaaaaaatttacaatagcaattaaaaataaaaaataaaagaaattttaataacctatatagagaaaacaaactttgctgaagaatgaataattgaagaatcgtattgctgggttgaatcaatattgtaacgagaccaggtgttaggaaagtaaacgtaaccacaatcaaaataccaagatatttttaaaatttataaaatatatgtaaactaaaaaacataatatataaatattttacaaataaataaatttatatataaagaaaataaaaaaatctatttgaaagatttatttatgcacttagtatatattcattcatgtatttttaaaggagagtaagaaggaaatatttccattttttgaaggtactatagggctatagttattaaaatagtacactatgggtataagaatagatagataatggaagaagatgtaatatctagaaatatattaaatatacaaaattatattatatgacaaagtggcatcctcaaattactgatgaaaaaatcagtcatttcatagatgatatcaggataattggtagaccataaaaaatattgagttagaagactatctaaaaaggccaggtgtggtggctcatgcctgtaatcccagcactttgggacgccaaggcgggcagatcacctgaggtcaggagttcgagaccagcctgaccaatatggtgaaaccccatctctactaaaaatagaaaattagctgagtgtggtggcatgagcctgtaatcccagctactcaggaggctgaggcaggagaatcacttgaacccaggaggtggaggttcaagtgcctccgagatcacaccattgcactccagcctgggcaacaagagcgaaactctgtctcaaaaaaaaaaaaaaattctatctaaaaaataaaattaagagttctaatgcaaacataaaaataacttttagatacattaaaggtttaggtgtagaagacaagaccacaaaaactacagaagaaaaataggttgtattagcctggagtggagaagagctgccaaacatattccccagggcaaaaattataaaggaaaagactaacagatatgaaagcataaaatttaaagcttttcatatggcaagcccactttgagtgaaaggtaaatgacaaactgagaaaaatatttgcaataaaaattaatatatcaggccaagtgctgtggctcagacctgtaatcccagcattttgggaggccgaggtgggcagatcatgaggtctggagatcgagaccatcctggccaacatggtgaaacccgtctctactaaaaatacaaaaattatttgggcgtggtggcatacacctgtagtcccagctactcgggaggctgaggcagagaatcgcttgaacctgggaggcagaggttgcagtgagtcgagatcgtgccattgcactccagcctgcagacaaagcgagactccatctaaaaaaaaaaaaaaaaaaaaaaaaaaattaatatatcaaacccatgaagaggttttttttttagtccattaagaaataggcaaatacacttatggaaatatgaataaatatgattcaagtacatcaaaaagaaccccccaaaatattcaccctcactactcataaagaaaatgcaaaactaaagagcaagactcttcttccccccctatcaaattggcaaaaattaaaaagaaagaacaaaaatgccagcgctggtgaggaatggggggctgtgtttgctaaagcatcagaaagcataccctttcacccagcaattccattcctcaattttatcctgatgaatccctatggatgtacaaagatgtagctacaaaacaaagacgttcatcaacgcatccttgctaataatcaaccaatgccaaaaaacctaaatattgaacatggttgagtatactgcggcaaagtcatttggtggaatgatattcaattattaaaaatgatattgtagaaatagttactgagctcaaaagatgttgaataactagttgagcgaaaaagcagtccccccaatactaagtatgttataatcccatttttgttttctctctttctaatgtatacatgcaccaggtcctgtttagtactggcagcgtttaattctcaccttacacattaaacacacacagaacagaagtaccaaatcttattccccaacaacttatggaccctagaaagctcaagactggcttgtaaatttctttggaagtgttcataactttcctacccaaccagttacctgatctgtctgcgccccacccagtcagctgacctgtctgtgcctcgcccaatcagctgatctacctgcccccccatcagtcagctgtctgtcattacaaagagcagagcaagtacagctagggatggccaacccccaagtctacctataacaaggtcctcacctcatggtagagacttgggtggagatttaggacatcaggaagacccttaggaggcgctggactctgaaaggtaaaagctgggtttgccaacccagcttcccaaggaaaggaacaaaccagttaaaggaacaaaccctaaaggaacacgccagtttaaggtcaaactccttcattccctcccacactccctcccactgtcccccaaaacaaacagatcagaatgccttctgagcttctggttggtgactgaagttcctttgctaggaggcaatgcctttcttcctttcgagtacgctcagagaaagaatttaaaatgcaaatgtcttggcagggcgttgggtttccaccaaagaccgaaatgattcttttttattttgaaaaggataagagagttgtggggttgggggaggggattacctgtggggagaccacttcccagtttcaagtagaaccggctgtccctcctcagctcaatgcacgctatgccttgagatatttttgcaggcggctgggtagaaactccgttctgggcagcacagaaagcagatgtgccacggaggtgctggcggtggtgaggccctggccctggaatgataacatgtgaagcctgcagcacaagggccaggcagggcagcagctggagccggaagtagaatgagggtcctttggcctcagagcaggggggactcttggaaccatcactcactgctgatggccttttcctccacatccttcccgggaccatgtgaagcttcagatatcctggtgaccaaggagaagtcagatgccccaagagggcagctcaagccaagtacccatggcaggaacctctcctcttccagggaaagcagaaccaaaataggaaaccatcaactctccctcgtttcggggaatcattttcaaacagttccaaaacctcacacatacgtaaatatacagtgagcctgtgcccgctcattaatgaggaaaccagcacgatgatagagctggcttaaaggaggatccaagaaactgagatgagctcctcatggaagctagagtaagactcaaagttagataccaaatagttaacatcacagaggggaataaaaccataacctttgaggttatcttttctattgaacaaaaatctcttgcaacttatctcacatccaccagttaaccttcaattttaaagaacctaagccctaattaatgacagatagttaaacaaaattaccttctacatgacccttaaatgagcttgttgaaaaatactttcgcacgatttttttttttttaagatggaatctcgctctgtcacccaggctggaatgcagtggcacgacctcggctcactgcaacctctgcctcctgggttcaagcgattcttctgcctcagcttcccgagtagctgggactacaggcgtgcaccaccatgcctggctaatttttgtatttttagtagagacggggtttcaccatattggccaggctggtctcgaactcctaaccttgtgagccgcccacctcggcctcccaaagtgctgggattacaagcatgagccaccgcgcccagcctttcctatgattttcaacaggcctgctgcccaattcctgagtccctcccacccccagttaagtggagaaagagctaggatggaggccagggaacttgaatgcttgaaggagaggctgaataacttagtggcttctagtccttgggaccagaccattgtacttgcaaatactgggtctgctacttactaactgtgggccttcagcaagacgtttagcttgtgagcttccgtttcctcatctgtaaaatgggtgtatagcaatgcctccctgtcaatgcagttagtgaggattaatgttggcctaattgatttcacagtgctgggggcagtaagggttgcagtggtgttagcttagaaggtaggtcctggtaaagtcacagggagaaatgagaagggacgtggggaggtgggccctccccccgtgaagtcttagggacccagttgccatggaaatgaatgaaacagtttatcctgctttgatgtggctgggtggcagaggaagtgggcctgttatcaaggctgggggcctccccctgcttcctgactccacccccgtatgatcgcccagtgcctcaattctggaggtagcaggaaacctcacgtcagtgccactgggtcctgcccaccacagccctcttgggctcagcccacatgtttattgaatatttactctatgcctgcatagctgtgccgaccacaatactttcctgcaaagaatttacctgtaaacctgggggatgacatggggcatcttacatgcaaaccgctctgcaattttcaaagcacacagacctcaaggattgcaccttgcctgtaggggaagaaggaaaagtcatattcttctcattataaaatgggaaatgattttgagaagaccaagttcagtatttcttgtttaagctacaaagtgaagtatgaaagagggaacacgaaccctcgtatgacaaagacctacacttcgtcacttattagttaatgaccttggacaagttccttagactctctgagcctcctggtcaaaagcaggattataattatcgttgatgatgatgacgaggaggacagcaatgatgccagggttgcttatggcatatgaagcaccgtcataggttggtcccatctaaccctcagaacacctccctgggtagttactattattcccatttttcagatgctgaaactgaaggctcgacatttatgtaacttgccccaggtcacatagctgacaagagctctaccacttgaacccatatctctttgataccaaaagtcatatcccatccttttcacatttgcataaagctgtgtttctaccaagaggcactgacagatggctgcatgaccctgggttgcccaggctgtctttttataaacgctctcccccttggggaatttctcctgcccctttccctttgggttgcttaatatggcttcataccctttgacttcctatcaaatggggaacaaacctgggttaggtcagttttgcttatcagcgggtggcaggtgaattcagaatgttcttcagtggtgttacatttctctggggacattactgatcacagacatttggattttatactttttgtctctggttatggaatgaaaggttagacctcttgaaggatgtcaaacatcattgactagtaggtgggggaggtttagggaaaagagtagaggcaggtgttccagaaaccacacggtgtgatcagttaggactgagctggctgcctatagcagaaagccccaaacaactatgccttaaactctcaggggctatttttcttttacacacagacacacagacacacacaccacacacacacacatacacacacacaatctgtatgaaggcaggccagcattggcatggtggccccatgaacatcctggaccagccttccctcatctttccactccaccatccttggcaaaaggcaccatcttcaaggttgcttcttggtctaggatggctgctggagtgctggccatcatgtccacattccagttaacagaaagaaggaggtgaggggggttgcacctaacacattctgcaagggaggttgagaaattgactcatcaactgggtacaatgcccagtgtcccactcataaaaaaacgaggaatggatattgagtagatgcctagaagtctctgccacatatgacttacttgtaagagtagcccataaggcctggattggtcctgttagggtgactctcaccagggtggtgaaagggtgttatgaaaggtctcatctcacttcgcccccacaagcccggtggctctgcaaagctggagacctcatcccacaggcgtttccgtggggtcactgcacctgttcagagcagcatatgtcttgtggtggcactggcctttcattccaagaactcacatctcctctgcctgcatgaaggcctgcccagtgggttccttccccccagtattttcctcttggctttctagccacattccttctcaccttccccctctctgctcctggactcccggtggccagagattccgagcctcccttgttatgtcttctcctttgtttattcacctgaaatccgtgcttcaccttcctgcccaggccctgctgaggcccacagccatgagtccccaattcctccagcctctctggagtccaggaccctggggatggggagcaggaaggcgctatacatgggacccccagtgaggagggaagtgtaagagaaaccctgctgtggggagtggtgtgcctggtgtttgcttcagggtatgatgtaggtcaaactgtccaccatgagttgatattaatcatagttgctggagaaccaaacctgatctagtctcatttggagattgcaatgccgttggggccgggctctgcttccaccctgttgattccgtggaatcttggtgttccccttgtaggaggaaactgagtcagatgtggttgctccctgcctcccccaggctcaagtacccacatcaccctcagcatggacctgtctatccgtgtgtcattaataccagtgcttgcttgatggcagatgtagtgattttcctgtgtcctggatcttcacagtctgctgttctgtgcaggatccccatctatttgcaactttgaaaaagagtggaagctttgatgggtgaacaaggcttaatggcgaagggccttggacacctgggccaggagtttgaacttcactatgagtgtgttctgcccactcaccccgttcttcgcctgtatggggtgacttctctcaatttcttacttgctagagcctgacgtaggaacaacccaggcaagatttttgtttagcccttgcaccaatcttgatctaagaagctaaactcagaaagttgtttccatctgctaaggtgaccaagaaagggtgtgatctaagatcaaagggagagaggtgtctgtggatctgaggctccccagtgcagcctccctgtttggggagtggagggtggagttaagggtggtctcgaaactgacattgcacaccccacttagcattcatggcctccctggcatcaccaggtaacattgtgaaaaccaagcccatggagggtgctgggagatatttccaacctcacagcacataccagcaaatggggactcggcagtacaatctctaagccaggctcaaaggagtcagtctgtacaaaagcttatattatcaaagcctcctccacattgcacagtcttttctaatgtgttcccagctcaggccccagcccaccagttaattaccccaaaaccccacaccccatgctaagcagggaggtccattaccaagagaggccaaggaagggggttgatggtgttttgggggtgagggcgggagtttatctgatgatcataggttctgcttgggaactgttggtaccttgggtattcagcaccagccaaacaactctgaaaatcactctctctgggtcagagtgtgccaagaggcacaggtatcctcctaaatatcccccattaaagcaacgggacacatagagcaacagtcgcgtggagtccacgtagctcatacgaagcagcttctgattctaactgtagcacaatcctaaaatgagactaaggcacacgaatatagatgttagagactgctcctcatcctagagacaagaggagacgaaggagcttcaaggagaaggttgtcaacagtaccaagcactccaaaacaaaagttcaagcagcgtgaggatgaggttgggccgttgggtatggggacggggaaaatgttgccaagcttcaggagagcagggtcaggagggcagaggggttggaagccaatggctgggcgtgttggaagaaagctgatgtggagggagagcgacgtcagagtctactgcttcctggagtatgaccgcctggatgtccttggtcaacagaggcagaagtggcggtgaagaaatggggtcagcggggtgtgggttaatgttaaaagcattaaacagtaaaagaaaagagaaataaggtcaagagaagattttgcgtatctatgtgttttatggtcagggagatggggaatatctgtttgtctccgctatggtagctatggtattatgtagaggtggttggagagcgggtgaggatctcttctctgtaatgcacgtgagtggccaccagatggtgtcccaagtcctgatgtaatagccactgtgtcaaggacttatctggcaaaatggaccaaacgttaacttctaaatatgcgatgattacataaagtaaacatcacgcaaaaggccaaaaatcaaagcaattaggtcccaagttagaagagcattatgtggtaattttctgccttttactaaaggaacctcacagcctttctatttatagctgtctttaaaccccaacccccgccctaccccgcccccgagacttgcacttctgaggggacgtcctgcaggttcccagctcagtcccagttcagagtggccctgctctcgatggggactgccctgggcctatttccaagctatgacaagaaggcgacccaccccgctgggtccccagcccctgctctgtgagggagtgaactcccgctttctgtttcatctccttgtcatggtggaaacagaactgaatgcacactgtaaagcgactactgtgcacaacagagtcaagctgcagaaacaaaaggaaaacctttggtgtgtttcttctcagcatttggaagtcagaggagacagagagggggaagggccagggagaaaggggatgcgggctgggagaggagcctgggatgcagatgcctcagagcacggaggacgccaggccagaccacagtccttcccgatccccggactccaggcagagacggggaggtgcaggtggggaaactcgaaacccactgcctggctggagctaaggcaaagtggatgggctgagaggtgcctggcatagcgggaaggcaccccggaccgggagagggggcagcggcagggaccgaggagtagccctgcggcacaagacggggcagcctcctgggcccaggttctgcctcctgcgatgctccgcctcccagtctctgaagagagaaactttaagttggtcaagccatggtggggcctgggaatcatagactgttaaaggcctcagaggccacggatctaatctggcccttcccaggagaaactgaggcccagggctaaagtgacctggccaaggccacgcagaagagctggaatagaactcaggcttccgacacgggctctcaccctggatctctttctctccagctaggctgcctccaagcctggagccgggacctgagccacaaggggagtggaaagctcttaggaagggagggcagtcagagaggccacgggaatccagaggacagcgaggcccaggaccgagttttggtgttggaggtggaggtggggatatgactcgtgaggtgtaaaaggacgcatagaagcaaactgctaggcaccctggagggtccacagaacagcttctctgcaggttcgcctgagctccatccgggaatttccaacctgattgtccagtgcttggctccccacgaggcacacggacgatgctgaaggaactgatcagcccatgaactcttttcttcttgacccacagggatctcctaccagagactggtgagggctgagcagggcctgcccatcaggagtcaccgcagctccaccgtgtgagtgctcttgggggacggagaaacagtggggagggagtttgggacccctgcactgttccaccttcaccctcctcccccactcaaacatccagtgcccccaccccctgtccaccccagccagcaacaaacaggcttccagggaactgggaaccccctggcactgctggtgatattttgtgtccaggtgtgtttttctaggctgacggtctttcaccagattcttaaagaggtctgtatcaattatgccaggtgttaggcacacagttcccccactttcattattttcagatgaggaactggaggtcagagaggtcaagcaacttccccaaggtcacacagcgagcaagggtacgagccagaatttaaccctcaggcttattcagaagcccatgatatttccacaatctccttctgtctgttactaaaacagtgtttccaaacttttttgaccaggacctataagaaaaatccattttatatgacagcctgatacacaaacacacacacacacacacacacacacacacacacacacagctgaaatgaaatgtatcctggttacataggatgagctctgttctattctatttcatttaagaaacaaatttggctccccagatgatttcattacccactcctgtgtcctgacctgcagtttgaaaagcactagagagggggtgcccattaggaggaccctctgcaggccttgaagagttgggtgctgtctcaccttgacatgttgggagcccagggaccccggccttcaccacctcagaaattataggcccccggccctcctcattcccagccccaggggttcacttcccactcactcccctgagcaacacttcttgacttccctctaggtgaaaacaaacacaaacaaaatgatagatgttgagacagagggaaaggatgctaaaatgttgtagtttagtaagtaaataagattcctctgggggagctggggcaggtgggctgatgaagaatcatcaaagccctttagacctttattcggactccaggcaccatcctaagcatggttacatgtgctgactcatttaatcctcacgttaaccccgtgagaaagggatttttcacataagggaagtgaggcaccgagagatttgtagaaagagcttacagttgggagatggtctcactttcattatctgtaaattgagaatgatgataaattcttcgggagagaaattatgcaagctggtgagggcaggggctcggctgggctcgttacaaggttgtaaggggctgcttatacaagcccacctcctttttcttacagatagagaaatcaaagtgagtttcttcccaaatgatggggactttgacagagactagtcctgtctctgccctgtccccgggcaccgacgtccccagagtgtggagggaatgctgccctgcgtggtgctcctttgcactgggtttaaacgcagtgtggaattgagagagcaagagctctcatcacatgcagctcatactaaagcatttatggatacaaagccgccatggctcgaatttgcttcgaggtcatgcagtgatggaggggttggcatgggggaagtgagaacagccgtgcgttgttaactgtaaacagagtgatcagcgcctcagagcccacgattcttttaatttggggtatgtttgaaagtttccatagtagccgggcgcggtggctcacgcctgtgatcccagcactttgggaggccgacgcgggtggatcacgaggtgaggagttcaagaccagcctggctaacacattgaaaccctgtctctactaaaaatacaaaaaaaaaaaaagttagctgggcgtggtggcgggtgcctgtagtcccagctatttgggaggctgaggcaggagaatggtgtgaacccgggaggcggggcttgcagtgagctgagatcgtgccactgcactccagcctgggtgacaagaacaagactccgtctcaaaaaaaaaaaaaaaagagaaaggttccataataaagaaatgtaaacactggcaccaagagggaatctgggtatccatcgggaagggaggtagcagtggccaggcacacagtcccctcccagccagtgaaagcctgtatcatggctttgggctgattagaaaaggtgtccctcataagctcaggaagaagatgcactctgacttggcatcccctcctccgggcagatgcagccccacggcacgaggaatttcatgtcccgctcgccccagaccacactgcacagcaccacgttgctgtccagctccccctgaaaactgatcgcttggcttcaagtcaccttgcctaaaatatgatcctcatttgagtaatcttgcatccactcagctgtctcataggaaaaaacgtttatataaaaattaagtaaatttagttttaaagaattaagttcaattttgaaaagatctttgaaaacaacagctgaaaaatgctcagcagtgaaccccacgctttcccctggaaacctggaccctggagctgttgcttctgtcctggcctcctgtggtcacctcctcgagctctgcctgggcttgaggaggccctggtctcagtggagctgagcaccagcaggcacgaggggggtggctgcactgtggcatgctgcgcacccctgggtgccatagccggtcccctgtgtccccagcaccgtgctgctgctgaacccagtggaagtgcaggccgagttccttgctgtagccaataagctgagtacgcccggacactcgcctcacagtgcctacaccaccctgctcctgcacgccttccaggccacctttggggcccactgtgacgtcccgggcctgcactgcaggctacaggtatgtacctggggcctggggctctggtggagcacctctctgaggaggtagcaccctctccctgcttcatctcagccacggtctccagggtacacttagtctcctgcacccaggtgacatggcagggtggtggctggagggctgacctcatagagggtgtttctggtgtgctggatcctaaccagctgggtggcagcctgggcagtaggactgggtgctgataactggtgcctcagaagatggcatatgccataagaacgagaatgagctttgggctgaagacctggcatctaggcctggctctgtcacaggtgtcacaggtcggctgtgtcaccccacacagctccttcccctctatggggtacagtgaggagcgctgaagtccctcctaactgcagtgccgtggctctggatctttctctcctgaccatttcctgagaatggaagggcagggagaggcctggctgcctggccagctgtgggtaggagatgggtgatgaggctgggaggggacagatcactgcctccctcagtaagaagctagcaactggaacaggtggacagctagctcacggtccaggagcaaagcccatctcctcctggggtttcaggccaagaccctggcagagcttgaggacatcttcacggagaccgcagaggcacaggagctggcatctggcatcggggatgctgcagaggcccggcggtggctcaggaccaagctgcaggcggtgggagaaaaagctggcttccctggggtgttaggtgaggctcttgggagaatggggttctcccacattccccatggcctattctaggtcccaaggtgcacggtccaggcgggcctggtggctctgctccacacagtcactcagggactcagcttcttcagcatctcactgctctgccatcccctagggtgtctcattcctgtctataggggcagggtgggggtgctatcatgatggcagcttgtgggaagaggaaaagagagtgcttacgagggcaaaggctgggcttttctgttgaaggtgatgcagaagctgggcacatcacttccgctcatgttcctttgagcccgccttggtcacgtggccacatcttgccccaaaggagcctgggaaacatcgtctctatgactccagtaccatagaagggagcacagactttgaggaaccattagcattccctgttacaatattcctcataaaaaccttctgggctagtactattattctcccatgggcacattgtaaaatgaggctcagaggttgtggtttggccacattcgcacagctcataaagggcatgccatctacatggtgtgcttgaaagaagggcctctggcttggagcctggcaccctggctgtaactcagcctcagcctatccagctacatatccttgtgccgatcctgtcccatctctggtctcttctccaaggcaaggggactggactggccaatctccaaggcctcttcccagccctcttctcctatcctccctgttcttacagacactgcaaaaccagggaagctccacaccatccccatccctgtcgccaggtgctacacctacagctggagccaggacagctttggtaaggagccggggccctggtgacacccatgccccacactgcctgagctgtgtttctggtcctgggtccatgcagctcccaccccgtccccaaagctctcccacatgagcaggctctaagcagagcaagggggcagtgctaggagtcctgggctggccctgagtcctgctgtctcccctccaaagggaatatagaaggggatccggggcccagacgcccagacagtgctggccttgcttccctgcagacatcctgcaggaaatcctgctcaaggaacaggagctactccagccagggatcctgggagatgatgaagaggaggaagaggaggaggaggaggtggaggaggacttggaaactgacgggcactgtgccgagagagattccctgctctccaccagctctttggcgtcccatgactccaccttgtcccttgcatcctcccaggcctcggggccggccctctcgcgccatctgctgacttcctttgtctcaggcctctctgatggcatggacagcggctacgtggaggacagcgaggagagctcctccgagtggccttggaggcgtggcagccaggaacgccgaggccaccgcaggcctgggcagaagttcatcaggatctataaactcttcaagagcaccagccagctggtactgcggagggactctcggagcctggagggcagctcggacacggccctgcccctgaggcgggcagggagcctctgcagccccctggacgaaccagtatcacccccttcccgggcccagcgctcccgctccctgccccagcccaaactcggtacccagctgcccagctggcttctggcccctgcttcacgcccccagcgccgccgccccttcctgagtggagatgaggatcccaaggcttccacgctacgtgttgtggtctttggctccgatcggatttcagggaaggtggctcgggcgtacagcaaccttcggtaagagccgtaatgcggagcatccctctgccctgggtaacagggttgttgtgctggtggaatctggggcctgaggcttagggccccagaggaaccaaaagttcccttatttatttttattttattattattattattattattattattattattattattattattttgagacagagtcttgctctgttgcccgggctggagtgcagtggcatgatctcggctcactgcaacctctggctctccagttcaagcgattcttgtgcctcagcctcccgagtagctgggattacaggtgcacaccaccacacctgactaatttttttttttttttgtcttagtagagatggggtttccctctgttgaccaggctggtcttgaactcctggcctcgggtgatccacccacctcagcctcccaaagtgctgggattacaggcgtgagccaccatgcccattccccttctcaccatcttcttcttgccaggcggctggagaacaatcgcccactcctcacacggttcttcaaacttcagttcttctacgtgcctgtgaagcgaagtcatgggaccagccctggtgcctgtccaccccctcggagccagacgccctcacccccgacagactcccctaggcacgccagccctggagtatgtccccagcctgggccaatggtcggggaaagtagagttctggctacctgaaggaagccgattggaagtcatggaaagcaagcacctgtgttgacagggcacctccccctgcctggccctcactccctgcacttggacatgacattttgccatatgacaaagactgaaagttgtcatacttccccaagggcagggagaagctcagcatggggctgcaggtgccatccaaggccctggagctaggatgggcaggcctcctggggagctgggatgatgactcttgttctttgccctaggagctgggcaccaccccatgggaggagagcaccaatgacatctcccactacctcggcatgctggacccctggtatgagcgcaatgtactgggcctcatgcacctgccccctgaagtcctgtgccaggtaagtggccccgtggttgcggaacagggtccactggctgcagtcacccagcctcacttagaaggccctggatttagggaatcaggcttgaggcccccatggaggacctgggccctcttggaaaagatcagggagtgtgggtgagaagcaggactgagcctgaactcaggacactgagtgtgagagctggggtcactgcagtgatggaggagggccctcagaagggtccgggggacctcagatttcagcccccttcctcaactcccgcctttgtctggctaagccagaagcctccctggaggccagtgggtcaggtgaggggcatggaggctgggcaccggccctcccctgcttcctgcttccacctcaccagctccccctgactggctgcctctatgtctctcttctctcttcctccctaattcttgctccttcttaccatctatccacccacccatctggcttggctgccccttccctctggccacagcagtccctgaaggctgaagcccaggccctggagggctccccaacccagctgcccatcctggctgacatgctactctactactgccgctttgccgccagaccggtgctgctgcaagtctatcagaccgaggtaaggcctccctgccccgaaccgcctcttccccacctgccgggcctgcaaggccccacccctgccccgggagagccagcaggtctatgctggaggagccaaatgggcccctccaggaggttcacactgatgtacatgctcctgccctctccagctgaccttcatcactggggagaagacgacagagatcttcatccactccttggagctgggtcactccgctgccacacgtgccatcaaggcgtcaggtgggtactgcctgagcagagacagacggtgaggcggggcctgggacgcgaaacgtggagctctgtggaggtggggttacctgggaggtggggccatgggaaggtggggttgcacaggaggtaggcccctggggagacggggttaccgggaggtggggccatggggtggctgggtgacccggtaggcggggccctggggaggcagggatacgggaggtggggccacgggaaggtagggttacccaggaggcagggccatgagagggcggggttacctaggaggcagggccatggggaggcggggttgtccggtaggtggggccttggggaggcagggttaccgggaggcagggccatggggaggcggagttacccaggaggcggggccctggggaggcggggttacccaggaggtggggccatgggagggcggggttacccaggaggcggggccatgggagggcggggttacccaggaggtggggccatgggagggcggggttacccaggaggtggggccatgggagggcggggttacctaggaggcagggccatggggaggcggggccctggggaggcggggttacccaggaggtggggccatgggggggcggggttacctaggaggcagggccatggggaggcggggttgtccggtaggtggggccttggggaggcagggttaccgggaggcagggccatgggaagatggagttacccaggaggcggggccctggggaggcggggttacccaggaggtggggccatgggagggcggggttacccaggaggcgaggccatggggaggcggggttgcctggtaggtggggccctggggaggcaggggtaccgggaggcagggccatgggaaggtggagttacccacgaggcagggccctggggaggcggtgttacccaggaggcaaggccatggggaggcggggttgcctggaaggcagggccctggggaggcacggttaccgggaggcaggaccatgggaaggggggttacatgggaggtcgggccaggtggaggcaggcttacccagcaggtgggccctggggaggcagggttacccaggaggtggggccctggagaggcaggaccctgggaaggtgtgatcacagcggagatggggccctggagaggcaggaccctgggaaggtgtgatcacagcggagatggggccctggagaggcaggaccctgggaatgtgtgatcacagcggagatgggccctggagtgatggggtcactgaggaggtggagatccccagaacgtggagccagagagagaggcagggccttggtgagacagatccctagggagtcacggtccatgtggtaggggatggggaggtaaggcccagggaggcaaggccactgcgttcgtgaggagccggggaagccaggggtagtgaagggtctgtctgtgtgtggcacaggtcctggcagcaagcggctgggcatcgatggcgaccgggaggctgttcctctaacactacagattatttacagcaaggtaagacccgtgctggggctccttcccctccaggatctgctgctgatacttcctccgccagagcttggacccagagctggactcgtgtgttcctgggccccagtctttacgctggaaggctgcagcaggctcccctggatgctgagagaagcagagaagggaaggagtggatatctctgtgcttcttggcctccaaagcctctctcccaccatgttctctgcccccacccgaatgcgctcagcagcagcccaggggtaggggtctgctgggcctggctacagggctggggctgaaagggggaaagggaagccttccagaggcacctcagggagaagccagggtctcggggggccagtgtgcctggcaggctgcatgcaagatgggattggcgtgagaaaggagtgaggagagctgtggggaggtggagggctgtccatgacatgccagaagacatgagttctctgagcaggtcgcatcccaaggtccaggctgagggaagcttggcctcacaggtgggcttcttccttcggccattccaaagatatcctcttagcacctgcccatgctgcctctgtgctgggcaggggaaaagaggggttgagcagggaagcctaggcctcactttagcttgtctagaggagggagacagacaagaaacgaggaaacaaagaaatagccaagataattccagagagcggcaagtgatgacaaagcaataaaacagcagatggacggtggtgttggggctgcagtgcgtttggcagtgaaggaggtgggcaggaggcaccgacactcactgtagccacatgccaggtgcttgctagacgtcttccacagcccaggcactgttctaggccctggagccttcctaagagtgaacaaaggacagacgtggtcccaggagacctgctggccccctggagtgggtggtaggcattggttcgatgatgcacacgatgtaaaattacaactgtgacacatggatgaggagagggacacgggatgttcctaagtggcaaaccgaacccagtcaggagagttagtagtgaaggcttccttgagaaggcacctgagttaatattggagggaaaaccaggaattaattaggctgagaagagaggtgagtgctctcacagcagcagaaactgcatgtgcaaaggccctgtggtgggaggcagtgtgaacaccttgaagcactctgaaagaagacccccaggctggagcagagacagctggtgggaacatgatgctgaggtgaggctaaagaaatgggggaccagcataccaagagccttaattgcaatgaaaggagttttgtggttttttgtttgtttttttgagacatagtctcgccctgtttctcaggctagagtgcaatggctcaatcttggctcactgcaacatccgcctccctggttcaagcaattctcctgcctcagcctcctgagtagctgggtagcaggtgcccgccaccacacccggctaattttttgtatctttagtagagacggggtttcaccacgttggccaggctggtctcgaactcctgacctcatgatccacctgccttggcttcccaaagtgctggggttacaggcatgagccaccacgcccgacccaatgaaaggaattttatcctagtcctaagagcagtggatatccattaagggggcttatgtttgtggtggggctgggagtgcctgtgacatgattatatctgaggcttggaagctccctctggcagctctgtggaggacagataggaagggtccacaagtgatgcaggaaggccagttaggaggctgttgccatggtccagaagagaaattagggcagcagcctgcactagggtagtggtggcagagctggaaaggaatgggagacagatgtgagtgatgtaatcagcagggcccatggatgggttaggaaaggagaggccagactcctggagtcactcctctgtgactggcagcaccatcttctctggggggaccacaggaagaggccggggtccagttggggaagagcttgagtttgggtcgggacatattattgaggttgagaggccttgagaggtataaggagacagtgagaatagacggctggctgaacgggcctgactttgtggtgaatatgaagatgggtggacagctgctaatggaaaaaggtcacggaggagactcctgaaggggggaagcagggaatacaaagagcagaggaccaaggggagaaccttgagcccttcatgatgtaatggcgggcagagggcagcgatccagcaaagcagagaggcaccagccagagaggcgctagaaaaaccaggaaggtgccatcacgaaagcccaggagaggttttcaaggaggggagagcagtgaactgtaaggtcaagtaagctgaggaccaagaagtgttcttcggtttaacaacatggaggtccctgatgacagagacattcacacaaagacttgaagagggggttcaggtctggctctgccagaaacagcatgtctgtgggcccaacccttcttcactctgggcccggcaggagagcttcaggaccacccctgcaggtgctctcagctcttgtacctttcaacctggtcacagaggctgctgacccctagaccaagccagtgacgtgagctcttccctggagtcatccaggtctatccagggtggtacaggggccctggtgaataagagagggctttctggggatatgctaactagaggcaaccccctgtcactgatgggccttcaaagagaaggcagcaggcaccggggcctctggactcagagggtctggctacactgcatttccagggggccatcagtggacgaagtcgctggagcaacctggagaaggtctgtacctccgtgaacctcaacaaggcctgccggaagcaggaggagctgggtgagtggggtggtcagtgtggggtgtgcagtagggaggtgctctgagcctggcctgagtgtccttgcccctcagattccagcatggaggccctgacgctaaacctgacagaagtggtgaaaaggcagaactccaaatccaagaagggctttaaccaggtacgggcttccctctccttccagccataccctcaagagacttactggagcgtgcatgtgcgtatgtgtgtacgtgtgtgtgcacatgtatgtgtgtgcatgtgtgcacatacacacccgtgtgtacatacttgtgtgtgtgtgagagagagaggagaggtgggggaggagaggcagggtgaggggtgtgatttggggatgcacacaggtgtggagtgttgcggggtgtcggggaggtaggggtgccctgtgagaggacgcgtgtatgtggaaaagttgtggggtgggtgccaggagagtcctaagactctgagaccaaagaaagcaggctctggatcaggggacctggggctgctccggtgagggcagcaggcagggcaatgtctcctcagggggcacttgcttcttccagatgctggagaggaggcaggggctgatggaggcctcaggctccctcctgtgacctggccattaaccctggagcgcagtcagacaaacccctgccctcccacacccctagaagtggatgggcagttctgagaaaaggaactgccaggggctggcagtgttggatggccagggatttggggctgacctgggccttccttccagattagcacatcgcagatcaaagtggacaaggtgcagatcatcggctccaacagctgcccctttgctgtgtgcctggaccaggatgagagaaagatcctgcagagtgtagtcaggtaggaaaggggggtcctagggaggggagcagtttctgctcccaccaacccagaggcctggaaggagctggaaggatgggggcctgctctgatccctggcccctgccctgctgcacagatgtgaggtctcaccgtgctacaagccagagaagagcgacctctcctcaccaccccagacgcctcctgacctgccggcccaggccgcacctgatctctgctcccttctctgcctgcccatcatgactttcagtggagctctgccctagtgtgggcccagcgccagactggacagaagccctggggcaacctcctcggccacccctccaggacagtccctctctgtggagaactgaatggccctgtgcagagccatagtcccactgtgggtcctgcaatgagcaggggctgggagtagagggtttctggggcctcagggttctgggaaagcaacagctatcagagagagaagggccagaccccatagcctcttagattcctggcagtagaaggagaaggatgggtaaattgacctctgaagtccctgaccattagcatggtctaggatcctttctagaaggaagatctgaggctctggtgctcagggggatggcttgggccttttctctcaaccttggctgagcctaccccttactttgccaaagacttgaggaccctgtatgtctggagttcagtcccctcctctgtggggctcaggtgattgaaatgtggatgaaacatttctctacttcaagaccacctctccctgcaaacaccacacacacatggcatgcatgtacgcacatgcgcacacacacacgcacacacctcaataatttctctcaagtttcctgagtctccagaaaaacagcactaacgctggacctgtctactctcagaacccggcacagattctctcttgatctccttttggaatctgagattcttagaagacaggatagggttaaatttagtagcagctcagttctagctaaatcactagaggaagttaattaactttaagccttcatttctccagcactaaaatggagtggagagttggggtggaaataagacatccttaaaaggttaaattgtctgcaaagcacctagcccagtgccgagctcccagtaggtgttcagtaaagcttagtgcctgactttctgaacactgattcctcctgtttggagtcactgggatactctcattgccgttgggatgttcctcactccttcccagttcgtggctgaggcagaacccagactgaagagggaagagacattccagaggaggattgccttcgtcagggtaaggggtgggctgctcaggggccctacccttcacccccttctgtatcagattggccctcccactcccatctcactctgcgtgtacaatcttccatatccgcaagttcactggcactcttctggcacctgggcaagatcccagaacagaggatggagtgactggcctcacagagcttagtgcccgactcaggggaaatgggactggtgcatgggaaatggtcagcctaggataggacacgagagtctgaaattcaaagcaaccagcttgaagtggtttgagaagctggaagcaaacatgggctagagagatagggcagaagtcaagacgaggatctggactgatgtggagaaagtagccacggaagcatgaactgtatcctgcacaaagtccctcttccccgcctcctaattcattatgcccaaaaggccttacgtgaaattccagcccagagtactcatgacttgagagacgtggacagagccagcttctaccttgcctggccgtctctcccctgtcttaatgtctgctcttgctctaagctccagaagagtggcgggccatgtatcttcaatatgtttttgctgtatgggcaggttgtcttattatgtgatcaacagatgtccaggaactaatgagtggaatttaatattattgtcaaataaaacttgatttgtcctatatttaatgaccagtagttactttgctgcatgaccctgctagttggacagtttatataaatcattttatttataccagaaagaagcttcataggggattgttttatttctctttttgtaattttccaccctatagaaaatatatttgggtgaaaattttccccaatactgttctgcttaagcctcatcatactcactgacccacagaacaaaaattcctacacctaaggactcagcatttggggtttcctgtgctacttcacttgagaaatatatacccatatatccatctgtttcctgtaccccaagctccagggaggggacgggcctgaggccgttgctgcggatgggtggcacagtggatcctggacctaccatgcagctgagaggaggggaagagagctcaataatggccctttggatctgggactgcctttagacttgggtgataaggaaagagagaagaagaagtggagggatggtagaggacacctgtggcttgggagagggaggtaagtaccaggttgccagaacactattcaggatggagggagaaagaactgtgagctgttccagctctgcatcagctggctattgcaaacaatgaagcataccttcaattcagggaactaagtctccgatcatttgttcttgctcatgcatctggaggacatctagggaccacctgatctaggctgggctcagagtggcttggctccaagctgcaggatgggtgcagatctgcttcgttggtctttcagacacattggaccagcatgagaggcaagcagagacacgcgatgcctcctaggaatggaacctggaacaagaacaatattccttctgccaataattggctaacactgatgaagcacatcaacccacagacttaataaacccagcaaattttgcacaggaattttgacacaggaatctccacacaagaaaaaaacaaaatcacatgagaagtgcactttacctttgatgttctttccataactccagtctaatcaagagtaaaaaagatcatataaacccagactatgggaccagataacctgaccagtactctcttactgtcacaaaaaataaggaaagactgagaaacaaaaagagatggagtaaacctgaaaaataagcagtagacactggcttgtatcctgaaacattaatccaaaaactggtaaaatcccaatacaatctggagttcagttttttcttaaacacacacacacacatacacacacacacacacaccccttactgtcaaacttctaaagaaaaaaaggtaataagaaaatactaaagacagaggaaaataatacactttatcttcaaagtagcaacaattaaactgagaactctctctttcaatagaaacaatggaagccagagatgatgaaatgatatctttaaagtatgaggggaaaaaacaaacctactaacctggaatcacacacccagaattgtctgataatacttttttaaaaaaaacttataaactgcagcggtcgggcgcagtggctcacacctgtaatcccagcactttgggaggccgaggcaggcagattacgagttcaggagatcgagaccatcctgggtaacacggtgaaaccccgtttctactaaaaatacaaaaaattagccgggtgcggtggcgggcacctgtagtcccagctactcaggaggctgaggcaggagaatggcctgaacccgggaggcggagcttgcagtgagccgagatcgcaccactgcactccagcctgggtgacagagcgagactccatctcaaaaacaaaacaaaacaaaacaaaaaacttataaactgctcacaagggacacactttaaatataacatcacagaaaggttgaaagcaaaaggatggaaagaatcacaccatgcaaaaccaaccagatcaaaaaagctggtgttaacacactaatatccaaagatgcaaaaccggaccaaaaaagctggtgtcaatacactaatatccaaagatttaacagcagaagcattacaaaaaataaagaggaacatttcataaagattaaggagtccaacaaaaggtattacagttataaagctatatacaccaaataacaactgaaaattatatataaatataaatacatgtcactatataaatataaactgtatataaatataaatataaaacaaaaatggacagaactagaagtctccacaaccacagtggtcaacatatctctcccaatagctgatagaacacatagacaaaaaattttaatagagatatacaagatctggacaacacaattaacaaatttgatgttactgaaattgatagaacattgtggcccattctcagctcactgcaaactccgcctcccgggttcaaaggattctcctgcctcagcctcccaagtagctgggactacaggcgcatgccaccacacccagctaattttttttatttttttagtagagacagggtttcaccatgttgtccaggctggtctcgaactcctgacctcaggtgatccacccacctcggcctcccaaagtgctgggattacatgcatgagccaccacgcccagacagaagattctttaaaccatacttcacaaaaatcactggctgacctaagaatggatcccctattggtcagacacataccctggatactatcaccatgagctgtaggcgaatccatgggccaagtggttataggctaaaggggctctgagccagaatgtctcatccagtccatgagcttttgtaatccgagtcattgaacactgaggaaaggggccgaggtaggggactgaaactagaatccccattgggtcctgctgttggcagatgaagagaaaggaggaggctgtccttttcagcaccccatcctcctcctcaaggtggcccctcctccgcatggtacctcaccaagagctcaggagctggccataaacttgcagactctcacctcccactactcacagcagaattacttctgccctaggcatgttgacctcctggtcttgccatccctggaatgggtatatttctccaactttgggaggagataggtgtctccttttgccacttcctgcttcctagaaggctgggcaggcctcagttaggggaccaaaatcaagctgtgcactgcgggtctcagggtttgggaccgtagaagggagcgctctcttggcccccagttccatcattccttcctgcacctggcagaacccctgtggccttacatttcctctgctccctttgtcggatacggcactctctcaggctaaacctcggatcacagggaggccagggaggagcaggagcgttcacccttggagtgaccctggccgcctcccgatgtctccaagcctcgcttccttgcctgtgaaaatgacacagtgtctactttccggggagtgtgtagggctcatcaggggacgcaatgtgaaaggggatggtgctgctgagactgtagtccaggtagcctaccgggcctcaggtgtaatgctcaaccttgtttttactaaccctgtttttagactctccctctttcctttaatcacctagccttggttccacctgaattgactctcccttaggtaagagagccagacagactccatcttggctctttcactggcagccccttcttcgaggacttaacttgtgcaagctgactcccagcacatccaaaaatgcaattaactgataagatactgtggcgagtgatatccgcagttcccaggaattcgtccgattgataacgcccaaagccccgcgtctatcaccttgtaatagtcttaaagcccctgcacctggaactgtttactttcctgtaaccatttatccttttaactttttgcctactttatttctgtaaaattgttttaactagatccccctcccctttctaaaccaaagtataaaagaaaatctagccccttcttcggggccaagagaattttgagcgttagccgtctcttgaccaccggctaaataaacggactctattttttttaaataaatgaagcctattttattacttcaagtgttaatgataaaaaaaatttcagcacagctgttgcattttaaaaagtgaaactacatactatgtttctagctcagtaaacagatgaacctgatgtctttaaatgacataacaattgagcattgtacagtacatcttatgaagacccgtaaattaaagaactactggtaataatcactaactataaacagactcttaattcatctcaaagtgtggcgttttctctaactcgctcaggtacaacacagggctccctgtgagcagaagccttaccgagagggggctcctccagacacaatggcttacacctctttgttctcctcaggtagctgggagcttcttctaggggccggaaggtagtggtctatcaccatcttcagacctctccttgaagtccctggcatcccagtcatgcctccccccggggaaagggctctcccacagcctccagggcaagaagcccgcagccccctgtctgcccaaagcagaagcagcacagttttcagcccctgcggctccaggcacacccgagatgctgtgtggacccagccagcctggtgcctgccctgggccttcagactgcccctcccgcattgccacactgccacccactccagcaccggtaatgttcacagcttccctggggaaagggctcccccattttcttgaggaagaatccacttcctcctttccccaagtctctgaatccttctctttcttcccccaaccataccagtaaaatcagggtaaaggaaatgcctcctgggagagggtgccatcccccatccctctgggggcaaagtgaggcaggtggcagactctgtccccaggcgtgccagcttgtttctctctgttctgtgctcaggcacacctatgtcccggctcggaccacagccccggagactctgagtgtgggctccctggagacatggctgtggtcacagcaggtacgtgtgtctgccactctttgcacggggggagtgggaagaaatggcgcttgttcgaaggatctcagatatttccagctcaaaggtgcagcgtctcagtcattgcaacctgcacagagaatcacctgtgaatgtctgcgtcgagtgaactgacctctcagcaaacactttcagcacttactgagcacgtgtcaggcgctgctctgtgtgctttacatgcttacgttaactcatttgtgccacagccccatgaggtaggtacaattatgctcccttttacaggcagggaaactgaggcagagacaagtaacttgtccaagctcacagagacagtaaaaaggggaatccaggatttaagcacagacaggtggggtccagagtccctgcgcttaaccactaatctctgctgctctctggaacctctcgtgtgggtggtgggtaagctgaggccatgaaaaggatcacacagatgtctgagaagaatggcttcgtttctaatggaacgctggagacgctctgatagcttcaaaatagaagctgtgttcacacaccctcaggaatggtgggagtggcaggggtggaaaagttggagggggcatagaggaggagaggaagctggggccagactgggttggcgggactccaggctggtctgcgcggaccactgctaaggggagggcagtcaggaaggaagccctcggtgaatggtgaatgtcgctcctggctccagagcagactgaagggggtcccccgagacctctggggaagaggagggagggagcagagcggcccccacccccacacacccaaggaaggggcccttgcaaccagggaccagaggccttctctgagcaaaactgtagccgaaagtctctgaggccagaacagaatcgttttggggctgagaaagctgaggagggctttgcaaacccaatctgcagcccctcaggttacagaggaggaaactgaggcccagagactgggagaggcctgcacagggtcacacagagtgagaggcacgtgccaggatgagggcccagccaggtagcctggcttacttttgggggtgtagctcagtgtgtgcatgcgtgcgtgtgtgtgtgtgtgtgtgtgtgtgcgtgtgcacatgagtgggtgtgtggtcctgcacatgtttggagggcaggcaatttgcataaataatgcaagttggggtctttgcgttttctcactgatttcctggttgaccccagccatcttgatttgttccacttcctggtgtgagttcatttggaaaaagaaaatggagagggtgatatgcatatcatgcagatgaagagactcctaacacctccccagctcagctccaccagcaaaagcctgtccaaggaggaacctgcggtattaggggcagagggagaggaagcaggggtccacttggtctccctctcaaggcagccatgagaacaggggaaatgagaagagaccaggccccgccctccacagcaaccccaaagtgtctgccctctcacctcatcacagagctgccagtaccaaggagtttgggagaggggacagttgcacccgcaaaagagaaggaggaggtcacaaggttttcttcacctgaagggcagctttcggaagagggagtgactgatcttctctgtgtccttcccatttcgaaccctgtaaatgtgtaactagtccaaacaaacatgtacatttaaatgtaagaaaagaatgtggttgatccttatgtaccaatatatcgtgatcttcaagtaaacaaagcaagttaaagagcgatttgtatggtgctcacatgtataaactaccctaagctatttaccatggttatcactgggtgggagggtaaagaaattgaggagggggaggagagagaccctccttttttcctcttagggtcctacaatgcttgagtgtttttataatggaaatatatttatggattacctaagtagtttttgttcttcttgttgttgtttgtttgtgacgaagtcttgctgtgtcacccaggctggagtgcaatggcacaatcttggctcactgcaacctctgcctcccaggtttgagtgattctcctgcctcagcctcccaagtaggtgggattacaggcaccggccaccatgccaggctaatttttgtatttttagtagagacgaggtttcaccacattggccaggctggtctcgaactcctgacctcaggtgatccacctgcctcggcctcccagagtgctgggattacaggcatgagccatcgtgcctggcctacttgactagttttttaaacattacagcttaacaaaaaaagaacattgatggcatttaaaataaaaacttccccaccaccaccaaaaataagaaaaatagctgagaaggtgactggttggatatgaagcataaatccgcttcttctatcaccccaattagtcctgattctgcatgcactctgccaaataacgctgctggaagtaaaggatggaaaattcccgaggtgtgcactgttcctccctttccacagccacagcagacagtactagttgataacggatttccagggcaatgctgatgctgccagtccagggactacccttagcgaaccagtggcttagagcatgacgctgtcctgcctgcctctgggccgtgggcaagagctggagggactgcaccagaggcaaaggtgccccgcagttgggtactgcctgtgccgaggcagtgtgtcgagtctcacctccaccagggatgagagcgtttaaacttaacctatctgtgtaactgtagctgactcacgaggtgattgtttaaacgaatcaaaatgtgttttcctaacagctcttttctggtttattacctctcacggttttctaaaaatgggtcctgccaaccagagagctatctgtgtgggtggcagtcatgaatttggggtagaaaagtggggagttgagaattagaatggaattacagtgctctgaatgggcttcgaagacaatttggatatgtctgtgaaaaaaatctaggagggaggaaccgacgctaatgagtcagggtcacatggggagaagagagacaggaaaaagcacaaaagcccaccccattccaggctgcccgctccaatggcatggcatggaggagggacgtcgggatcctcagaactatccacagaggatttttgaatagtttgccaagagacgtgtgatgtacactcccttcatcctcctacataatctttagtaaaattgactttgcttattagtattttatgtaagtggattccttagaaaactgaaatgacaaattctgccgccttcgatgctgaataatcccagagcagctcccacggtgggtggcactgcaggtgaggacacaagcgaccctggggacctcttttcctaagcacgtaattcttgcctgactccaatactgtggtcctgcagacctccgcaatgctggtacctggccctcctcacccgtggctctgtccacagttgcaagaagatttaatttttgtttaaagctctcagtggctttgtaatggattagaaaatggatgaggatggattggaaacagtggttcatctgtagagaaggtaagtaactttgtaaccccaaggcgagttatgtaaacagacttccaaacaccctggctgagataggagaacctgaagagaggccattgcagctatgcccagaagggtcaccaggagtggggaccctcacttggcagaggagggtggcagaaggaggaggaggaaggggagtgacaatagatggtgggccttctgcttctgtatcttgggcattgatcattctggggggtctttgcc

SEQ ID NO: 531 - DNA, 3253 bp, Homo sapiens
aagcttactcagcgcatctgctacagcattttatcttcccaagagccccatgaggcgatgacccaggatgcagccaggggccacgacatgcacggaggaccgcatccagcatgccctggaacgctgcctgcatggactcagcctcagccgccgctccacctcctggtcagctgggctgtgtctgaactgctggagcctgcaggagctggtcagcagggacccgggccacttccttatcctccttgagcagatcctgcagaagacccgagaggtccaggagaagggcacctacgacctgctcaccccgctggccctgctcttctattccactgttctttgtacaccacacttcccaccagactcggatctccttctgaaggcagccagcacctaccaccggttcctgacctggcctgttccttactgcagcatctgccaggagctgctcaccttcattgatgctgaactcaaggccccagggatctcctaccagagactggtgagggctgagcagggcctgcccatcaggagtcaccgcagctccaccgtcaccgtgctgctgctgaacccagtggaagtgcaggccgagttccttgctgtagccaataagctgagtacgcccggacactcgcctcacagtgcctacaccaccctgctcctgcacgccttccaggccacctttggggcccactgtgacgtcccgggcctgcactgcaggctacaggccaagaccctggcagagcttgaggacatcttcacggagaccgcagaggcacaggagctggcatctggcatcggggatgctgcagaggcccggcggtggctcaggaccaagctgcaggcggtgggagaaaaagctggcttccctggggtgttagacactgcaaaaccagggaagctccacaccatccccatccctgtcgccaggtgctacacctacagctggagccaggacagctttgacatcctgcaggaaatcctgctcaaggaacaggagctactccagccagggatcctgggagatgatgaagaggaggaagaggaggaggaggaggtggaggaggacttggaaactgacgggcactgtgccgagagagattccctgctctccaccagctctttggcgtcccatgactccaccttgtcccttgcatcctcccaggcctcggggccggccctctcgcgccatctgctgacttcctttgtctcaggcctctctgatggcatggacagcggctacgtggaggacagcgaggagagctcctccgagtggccttggaggcgtggcagccaggaacgccgaggccaccgcaggcctgggcagaagttcatcaggatctataaactcttcaagagcaccagccagctggtactgcggagggactctcggagcctggagggcagctcggacacggccctgcccctgaggcgggcagggagcctctgcagccccctggacgaaccagtatcacccccttcccgggcccagcgctcccgctccctgccccagcccaaactcggtacccagctgcccagctggcttctggcccctgcttcacgcccccagcgccgccgccccttcctgagtggagatgaggatcccaaggcttccacgctacgtgttgtggtctttggctccgatcggatttcagggaaggtggctcgggcgtacagcaaccttcggcggctggagaacaatcgcccactcctcacacggttcttcaaacttcagttcttctacgtgcctgtgaagcgaagtcatgggaccagccctggtgcctgtccaccccctcggagccagacgccctcacccccgacagactcccctaggcacgccagccctggagagctgggcaccaccccatgggaggagagcaccaatgacatctcccactacctcggcatgctggacccctggtatgagcgcaatgtactgggcctcatgcacctgccccctgaagtcctgtgccagcagtccctgaaggctgaagcccaggccctggagggctccccaacccagctgcccatcctggctgacatgctactctactactgccgctttgccgccagaccggtgctgctgcaagtctatcagaccgagctgaccttcatcactggggagaagacgacagagatcttcatccactccttggagctgggtcactccgctgccacacgtgccatcaaggcgtcaggtcctggcagcaagcggctgggcatcgatggcgaccgggaggctgttcctctaacactacagattatttacagcaagggggccatcagtggacgaagtcgctggagcaacctggagaaggtctgtacctccgtgaacctcaacaaggcctgccggaagcaggaggagctggattccagcatggaggccctgacgctaaacctgacagaagtggtgaaaaggcagaactccaaatccaagaagggctttaaccagattagcacatcgcagatcaaagtggacaaggtgcagatcatcggctccaacagctgcccctttgctgtgtgcctggaccaggatgagagaaagatcctgcagagtgtagtcagatgtgaggtctcaccgtgctacaagccagagaagagcgacctctcctcaccaccccagacgcctcctgacctgccggcccaggccgcacctgatctctgctcccttctctgcctgcccatcatgactttcagtggagctctgccctagtgtgggcccagcgccagactggacagaagccctggggcaacctcctcggccacccctccaggacagtccctctctgtggagaactgaatggccctgtgcagagccatagtcccactgtgggtcctgcaatgagcaggggctgggagtagagggtttctggggcctcagggttctgggaaagcaacagctatcagagagagaagggccagaccccatagcctcttagattcctggcagtagaaggagaaggatgggtaaattgacctctgaagtccctgaccattagcatggtctaggatcctttctagaaggaagatctgaggctctggtgctcagggggatggcttgggccttttctctcaaccttggctgagcctaccccttactttgccaaagacttgaggaccctgtatgtctggagttcagtcccctcctctgtggggctcaggtgattgaaatgtggatgaaacatttctctacttcaagaccacctctccctgcaaacaccacacacacatggcatgcatgtacgcacatgcgcac

SEQ ID NO: 532 - protein, 878 aa, Homo sapiens
MQPGATTCTEDRIQHALERCLHGLSLSRRSTSWSAGLCLNCWSLQELVSRDPGHFLILLEQILQKTREVQEKGTYDLLTPLALLFYSTVLCTPHFPPDSDLLLKAASTYHRFLTWPVPYCSICQELLTFIDAELKAPGISYQRLVRAEQGLPIRSHRSSTVTVLLLNPVEVQAEFLAVANKLSTPGHSPHSAYTTLLLHAFQATFGAHCDVPGLHCRLQAKTLAELEDIFTETAEAQELASGIGDAAEARRWLRTKLQAVGEKAGFPGVLDTAKPGKLHTIPIPVARCYTYSWSQDSFDILQEILLKEQELLQPGILGDDEEEEEEEEEVEEDLETDGHCAERDSLLSTSSLASHDSTLSLASSQASGPALSRHLLTSFVSGLSDGMDSGYVEDSEESSSEWPWRRGSQERRGHRRPGQKFIRIYKLFKSTSQLVLRRDSRSLEGSSDTALPLRRAGSLCSPLDEPVSPPSRAQRSRSLPQPKLGTQLPSWLLAPASRPQRRRPFLSGDEDPKASTLRVVVFGSDRISGKVARAYSNLRRLENNRPLLTRFFKLQFFYVPVKRSHGTSPGACPPPRSQTPSPPTDSPRHDGELGTTPWEESTNDISHYLGMLDPWYERNVLGLMHLPPEVLCQQSLKAEAQALEGSPTQLPILADMLLYYCRFAARPVLLQVYQTELTFITGEKTTEIFIHSLELGHSAATRAIKASGPGSKRLGIDGDREAVPLTLQIIYSKGAISGRSRWSNLEKVCTSVNLNKACRKQEELDSSMEALTLNLTEVVKRQNSKSKKGFNQISTSQIKVDKVQIIGSNSCPFAVCLDQDERKILQSVVRCEVSPCYKPEKSDLSSPPQTPPDLPAQAAPDLCSLLCLPIMTFSGALP

SEQ ID NO: 533 - DNA, 3307 bp, Homo sapiens
gctgcggctcgccgcgcggctccagctggggcgcggtggtcccgacggtcacccgaatcgcagggagtcgccgctggagaggggctcggcgcccggcggggactgcaggcgatgacccaggatgcagccaggggccacgacatgcacggaggaccgcatccagcatgccctggaacgctgcctgcatggactcagcctcagccgccgctccacctcctggtcagctgggctgtgtctgaactgctggagcctgcaggagctggtcagcagggacccgggccacttccttatcctccttgagcagatcctgcagaagacccgagaggtccaggagaagggcacctacgacctgctcaccccgctggccctgctcttctattccactgttctttgtacaccacacttcccaccagactcggatctccttctgaaggcagccagcacctaccaccggttcctgacctggcctgttccttactgcagcatctgccaggagctgctcaccttcattgatgctgaactcaaggccccagggatctcctaccagagactggtgagggctgagcagggcctgcccatcaggagtcaccgcagctccaccgtcaccgtgctgctgctgaacccagtggaagtgcaggccgagttccttgctgtagccaataagctgagtacgcccggacactcgcctcacagtgcctacaccaccctgctcctgcacgccttccaggccacctttggggcccactgtgacgtcccgggcctgcactgcaggctacaggccaagaccctggcagagcttgaggacatcttcacggagaccgcagaggcacaggagctggcatctggcatcggggatgctgcagaggcccggcggtggctcaggaccaagctgcaggcggtgggagaaaaagctggcttccctggggtgttagacactgcaaaaccagggaagctccacaccatccccatccctgtcgccaggtgctacacctacagctggagccaggacagctttgacatcctgcaggaaatcctgctcaaggaacaggagctactccagccagggatcctgggagatgatgaagaggaggaagaggaggaggaggaggtggaggaggacttggaaactgacgggcactgtgccgagagagattccctgctctccaccagctctttggcgtcccatgactccaccttgtcccttgcatcctcccaggcctcggggccggccctctcgcgccatctgctgacttcctttgtctcaggcctctctgatggcatggacagcggctacgtggaggacagcgaggagagctcctccgagtggccttggaggcgtggcagccaggaacgccgaggccaccgcaggcctgggcagaagttcatcaggatctataaactcttcaagagcaccagccagctggtactgcggagggactctcggagcctggagggcagctcggacacggccctgcccctgaggcgggcagggagcctctgcagccccctggacgaaccagtatcacccccttcccgggcccagcgctcccgctccctgccccagcccaaactcggtacccagctgcccagctggcttctggcccctgcttcacgcccccagcgccgccgccccttcctgagtggagatgaggatcccaaggcttccacgctacgtgttgtggtctttggctccgatcggatttcagggaaggtggctcgggcgtacagcaaccttcggcggctggagaacaatcgcccactcctcacacggttcttcaaacttcagttcttctacgtgcctgtgaagcgaagtcatgggaccagccctggtgcctgtccaccccctcggagccagacgccctcacccccgacagactcccctaggcacgccagccctggagagctgggcaccaccccatgggaggagagcaccaatgacatctcccactacctcggcatgctggacccctggtatgagcgcaatgtactgggcctcatgcacctgccccctgaagtcctgtgccagcagtccctgaaggctgaagcccaggccctggagggctccccaacccagctgcccatcctggctgacatgctactctactactgccgctttgccgccagaccggtgctgctgcaagtctatcagaccgagctgaccttcatcactggggagaagacgacagagatcttcatccactccttggagctgggtcactccgctgccacacgtgccatcaaggcgtcaggtcctggcagcaagcggctgggcatcgatggcgaccgggaggctgttcctctaacactacagattatttacagcaagggggccatcagtggacgaagtcgctggagcaacctggagaaggtctgtacctccgtgaacctcaacaaggcctgccggaagcaggaggagctggattccagcatggaggccctgacgctaaacctgacagaagtggtgaaaaggcagaactccaaatccaagaagggctttaaccagattagcacatcgcagatcaaagtggacaaggtgcagatcatcggctccaacagctgcccctttgctgtgtgcctggaccaggatgagagaaagatcctgcagagtgtagtcagatgtgaggtctcaccgtgctacaagccagagaagagcgacctctcctcaccaccccagacgcctcctgacctgccggcccaggccgcacctgatctctgctcccttctctgcctgcccatcatgactttcagtggagctctgccctagtgtgggcccagcgccagactggacagaagccctggggcaacctcctcggccacccctccaggacagtccctctctgtggagaactgaatggccctgtgcagagccatagtcccactgtgggtcctgcaatgagcaggggctgggagtagagggtttctggggcctcagggttctgggaaagcaacagctatcagagagagaagggccagaccccatagcctcttagattcctggcagtagaaggagaaggatgggtaaattgacctctgaagtccctgaccattagcatggtctaggatcctttctagaaggaagatctgaggctctggtgctcagggggatggcttgggccttttctctcaaccttggctgagcctaccccttactttgccaaagacttgaggaccctgtatgtctggagttcagtcccctcctctgtggggctcaggtgattgaaatgtggatgaaacatttctctacttcaagaccacctctccctgcaaacaccacacacacatggcatgcatgtacgcacatgcgcac

SEQ ID NO: 534 - protein, 878 aa, Homo sapiens; identical to SEQ ID NO: 532

SEQ ID NO: 535 - DNA, 1165 bp, Homo sapiens
ccctcactcccttccccaggggctggggaaaccactcaggtgacagtagccttggtgccggccagggagggcgggaagtccagccagaggctggaacagcagtgctgaacgccgggactggctgcccctaccccagacctgcccccctgctccgcccagccctcctgcggggccaaagccgcgcttccgacgcgggggcctaacctccccttactccttgggggtcgctggtgctccgcgctggtgcccctcgggccactgccatggaccggccagggtctgcttcttccgagggctggcgggtcagagccggggctgcttctcagacgccttgcggcctcgggggcgtgacccagaggatgtggggccgggcgcgcacctggctgacgctgccgggccgccaggtggctggagaggccggctccgcggctccgccccgcccgccggaggagcccaggctgggcagatgctgcggctcgccgcgcggctccagctggggcgcggtggtcccgacggtcacccgaatcgcagggagtcgccgctggagaggggctcggcgcccggcggggactgcagggtcaggtcccctgcccgctccagcggggaactgtccgtgagcgtgggcatcagggctcttgtgccgtcagaacctgggagtcatggaagtgcccgcttcaccaagggacccaggttaataactcctgttctagaaaacatgactttctgtgtgctgatttctttggattatccccagcacagctccctgtgggaggaagctgttgtcagaagcaagctgggggtagtgatggataatgaaaactgtgtagaggacactggtagcgactcactgagccccagaaattctcagccccagtttaggaacttcaggttgggggattttgaggcagccagccttgcgctagtccactgtgactacagaagaaatagcaatgttcaagaagctcatgtaagccgtgaggttctgctgacaagtcataagaaacagctgatgactgactcagacggaaatgagcgtgtcaaaggggtgggtggctcccaggggctagtggctcaggcaagtcctgcctctgagaagaacttggggcgagctcgagaaagccttggaatgccggggaggctggcacaccagaattccaccagtgcc

SEQ ID NO: 536 - protein, 231 aa, Homo sapiens
MLRLAARLQLGRGGPDGHPNRRESPLERGSAPGGDCRVRSPARSSGELSVSVGIRALVPSEPGSHGSARFTKGPRLITPVLENMTFCVLISLDYPQHSSLWEEAVVRSKLGVVMDNENCVEDTGSDSLSPRNSQPQFRNFRLGDFEAASLALVHCDYRRNSNVQEAHVSREVLLTSHKKQLMTDSDGNERVKGVGGSQGLVAQDASEKNLGRARESLGMPGRLAHQNSTSA

SEQ ID NO: 537 - DNA, 152207 bp, Mus musculus
  misc_feature (1)...(152207): n = A, C, G or T/U
gttcttaccctgtggagaaaggggcaggaggaactccctgctttaggaggaagctggaacttaccactgtgagaggacagatgtggactgagagttttcttagtgttcagtggcacttcccaaggaccccttcccttgtgctctgtgcagtttttaggacagctaagatgactgccacttgctgtggcaggcccaatttgtcttgttctccccttactgtaccccagtataatctctgttgatcaacagaactaccccaagaacccacatgttctccccacctaaccagacggctgtctggctgatgccttcctcccttcaagcccaacacagcgcccttgtcagtgaagaggtggtccatggactggtctagctgatggcagttattagcactggttgctgtttccatagtgacaagcctatacctcttcccgctctttagtgtgcagtgggctgctgcctcggtgttctcccgcctcagttttattagatcaaagctgcccttggccatcatgttggccacctcaatcaccagccaaaatggttgctttgtccaccagaggtcaagccatctctctggcgctgtagttcccagctccttctagggaacaggaagttgatattgccattggggaggtggcggggtatggccgtcacctcgatagttttattgtaaaagggaaatttgaacaacaacaaaaaaactggaaaaaaataaaaaaaaaaactttaaaagttgaccagaaggctggaaaatgactaggcatgaatggggtatgtgtgtgtgtgtggggggggggggggtcagaatggctttcaggctgagggtgggtcacggggaaccctgggggcctggggaaagaacactggttggggtggtgaggcgggcagtttctgggctcagaaagctgaggaagaaaaccacctgtagagaggaccttctggaacactccagtagtgatatgtgctaatgctggccacacgtgggggagtatcatgctatgccaaaacacgtgggagaggacacagtcaccagtggtactaatgtgcacttgtgggagggtctgttccctacaacccttccccaggatacttggggagctttgctgttggggatagagctggtgaaaaaaaattgtaggaagaccccaggcattgagtgtgtctgcttatatacccaggctcttctcccccaaaagcccaggtgcccatccccctagactctaccccattctccagccacaaaagctgccatcaggaacatcgctggagcgagtccacagggtcacaacctctgccctggctgcccttccctgacttaaggttccctcccactgtctcccatctgcctggaggtcaaggggtcccccttcccctctgttcacagggacccctacccatctcagcaagatgcctgggtcctctgaggtatagttactggaggaggggagttgaaaactgagagaccaggtactaggctgtgtggaatttccttttaccttctgagcccacactggagctacccaaagtggggaggcttgagggggttggaagggctggtccctggcccttagtgggggttggtcgtcttggaaacatccccttctctacacaatgggaagcccccctcagcctcccgcgtggatggagccgacagccccatcgctggctatcagcctcagggacttggcaaccgtcactatggcaacacagagcccagcaacagggcccactgagaaagggaggggtccaagactggggcagggctgtgagtgtgaggggacaagggctctgagagtcccctcgacacaaacatccagaggtacaggtggatacaagaggggagagaagtggagataaatagtctccatgacaaacacatcaccaaagcagccaggacatcataacacgctgagagacaggaagacacctgggacggatgcacagctgggaagagaaacagcgcatactgcacagcccctgggacacaccccctccgagcactggcatccacagaccccctgccaaccacctgacattcacaacacctacagcctttcacatgcgcagtgacgcgcctgtcttttaagctatttgaaaatgctggtgacttccacatagaaccacacttgccatctgttggctttctggatacaagtacacacacactcccagggtaacaactatgacaggaatagaagggaggggaactactccttcatccatttgttcattcagcggctccaacatgtatcctgtgttcaggtgccacttcagcacgatgtgctaaggtgaaaattcctgcttcataaagtcacatttttgtctattgactgttttttatgtccccaccaccaccccgccatggtgctagtgtgaaacctagagccttgaacacgtttgacaagacattgagctccacccccagccccaggtccattgtttaaaagatgaatttaatttgaatatttttgcctgcgtgtatgcccgtgcaccttgtctgtgtctcgtgctccaggaggtcatgagagcatcagaccctctatgagcagagttacagagttgttgagtcttgggtaggtgctgggaaccaaacctgggtcctttgcaagagcagtaagcactcgtaatctctgaccctctagcctccctctcacctgcatttgagacagggtctcattccagcccaggttgtttggttgtgtaattaactgattgattgagtgattgattgattttaagacagggtcttgctggtcagtggtggtgcctttgatttcagtactcaagaggcagaggcagggggaccactgtgagttccaggccagtctggggtctggaaaaacaaatcaaaaccaaccaaacaaaaaacccaaaacaaagaaggtaggttttgtcatatagaccaagatggccttagactcagagatctgcctgtctgccttcacttcctgactgctgggataaaaggtgagcaactccatttctgtccagtatttagcttccgaggttcacaattaaaaaaaaaaaataaataaaaataaaaaaaaattttttaaatttgttttttcaagacagagtttctctgtgtaacaggaccctggctgtcctggaactcactttgtagaccaggctggccttgaactcatagagtctacttgcctctgcctccccgagagctctgatgagaggcttgcaccaccacaccccacttgaaggccacattttgatggggaacagcatattacaatctcccttcaggaaaacaatactgtggctgaggtgggaggagtttgaagccaacctgggtggctgagaccctgtggagaaagaaacaagaccaaacaaagaaaggaaacccagggaaacagggtaaacttttccggttcagagggcagacagtagctgtgggccagccaggaactgcaatgggaaggcagaagcagagatgcaaaaggagcgatttgacctgtttggtagctgggcggtggtggtgcacacctttaatcccagcacttgggaggcagaggcaggcggatttctgagtttgaggccagcctggtctacaaagttccaggacagccagggatacacagagaaaccctgtctctaaaaaataaatataaaataaaataaaagacctgtttggtaataacaggggcatcctctgtatttttgttccaggctttccctgtctgtccctagccatagcccaaggggcagaaagtcactctaagaagctggtctggtcaggtgtggtgcacacacttttaatgtcagcactcgggaggcagaggtgggtggatctctcagcttgaggtcagcctggtctacagagtgagttccaggctagcctgggctacacagagaaaccctgtctcaaacagagaggggaataggaaggggggaagggagaggaggagggagggagagagggagagagagagagagagagannnnnnnnnnnnnnnnnnnnnnnnnnnnnnnnnnnnnnnnnnnnnnnnnnnnnnnnnnnnnnnntaagacataaaatcctgagcaggaagctgagtgtggggtagcaagaatttgttatcccagcacttgtgaggtgttgagggcagaggcttgtgagtttgaggccagtgtaacctatgaagcgaaaccctatttcaaatacacaacacaatgaaacacatccagcgagggcgagcagagcagaactaagggaaacaagtaggctagggacccagatgcctaagctgcccttcccaactgtggaaggaaggtcggtggagcttggccatcctgggggcggagctgcagaagcacaggcttggctagcctttgcagtttaagagatacaactttcacctgttcagagtatggtctgtgttggggagtgttagcgataggagaaggggtaaggagttgcagtagaaatttctttctttctttctttctttttttttaaatgtgtgtttatgtgcgtgtggtagggagcgtttgtgcaggccgtggcatgcgcatagagggcaggggccaagttgccagggtctgttctaccgcgtggctccacaggatggaacattgcttctcaggctttgcagcaggtgccttaactcgctgagccaacacacaagactgcaataaaaatatctggtggataatgtttgatgttgcaaactgagatttaagttagaatgaaatgtggggcttcttcctaacgggaaagtgggcacccacagactcgggtctcccccttcccaggaagatgttcaaggtctgcaggcaggcgggggaaagagatgtggggtggttcggaggcagggtactggcttgcctggacttggggtgataagtagggcaagaaagaaagacacagaatgaatggccactactgagtacaagagtcacgtatgtggcagggcaggtgtccggagggagttcaaaacaaccaggttcgaggcagctgtgattctcatgagggaattgaagcagtccgtttcctggttctctatcaggaacttaggcatcagctcccccagtggcactgactggtggggtgggggtgcccacgagcagcctcagggggcagcagctggtgagtggggaggaatctgtgtgctcagcaaacagcagccttcgtgcgcacgggcttcctcctccctcatcaatcagccacagccaaatgtccctgcattcccaccaccccaaggggactggggctgggccagggtccccaggggagtgagaaggggatggatgtggggagccggggtggggcttcggtttccacccattggcccgagttctctttggaagccctcagttcttcttgtcatggaatgactctttcctggctcatgccactggaggggggtggcctcagctacaaatcacctgtgggggggctgctggtggggaaagggggcagagagatgagtcagggttgttgaagaatccactctggttctcacggaactggtccagggcagggtcagcagggcggttgctggcacagaggccccgtctcccacactgatccctctctcctaatggatactcaggtcagccagtggcgggtaagaccctgaccccttgaacatctgtccttccagcttctcctagcacccaccttattccctgcttctcacgaagatctagaggtatggcacccacctcatccaaagtttgctattacccacgggggttggagggtgggggtagggggctgtgacttctaggtcttagcttctggctccctctccctctcagcccttacacccctcagggacccaggcgtcctgcccactccctttaccatagcaaccattcttcttggagttgcttaagactttaatatcatttcattaagtcagtaagttcagagaaggttgggagcacaaagggactaggactgggcccaaaaggaccaaggtaggggggaagaaggaccgaggcccctcttctccgtggagatggctctgagaaatcaaatattgacagtgggagaacagaccttattaaatctgggacaggggtgtgtgtgggtgactgtgggaatggccgggtgcctgggttctgagggtgataaggctctgggaggagagaaacgcctatagttgaggtggcccaggctaagggaccgatctcagggtacaactgctcagtccctttcctttgggatgtgcttagacttgctactctggttgtttctcagctgtcccctacagcccctagggacaagcatcccatcacagctgtggctgcgccccccccctccctttacctccacctctgctgatgagcttcagcggcgtttaatcggattgagcagtaattagcaaagcaagatgtttgattacctatttagcataatgtggggggctgggatccctaggcacagccaccgttgagaggggagtcagaagagaaaaagggtctatgcaaagttcctttccctgagggatttatgaacctgcccttgaggatccccatcccaagcctccccacaaattttcagtcctttgggacttttccctcgggattctgaccagtcacatcacccctctttaccatctggctggaagattacctatgagttccatcccagccccgtgtactgtgcagctgttggttttagggtgtggcgcagcctctttccttcagtccctgctctctcagcaacaggagtctgggctgggccaaagaccacacaaatcagagctcagaaactcatcttcaggataatggcggcagctagatgtggcagcacacccccataattccagcacccaagaggcagaggcaagactcaaagtttgagagtttgaggccagcttgagctacatggcgaacggggaaggtgttggtattggtgttggtgtaagtaagagaggaatggtcgattatggaagtggtggcttgggtcagggtgtagataaatgcattggcttccaggagtaccagggactgccacttccggcaggaccagactggctaaatgagacctgtcaggtgtgaaaatggtagaactgaggtgccagcgtctcttcatatccagcaaagaaaatgtcatcaatttagctcctcatggaaatgtaatcagtgggctcgctgctggctttgtcttaattaggcactattgatggaagcagggagggcgcctccctattcccatgattctgcttcctcgtggcatttcccacgtctccccaaagcgtcttgcgacctcgggtacagctgtcttttccaccttccagccaccaggacacgcagcgccccctagcacccactcagttctgcccctccaatgatctccaagctgctctgggacgcagcctttgttcttatggagagcaaagctcctcccaggccgggtcaccttccccaggggagtccccgcctctcgtttgccccccaaaccagcaacgcttttcaaagccaatcctcagattaaaaaaaaaaaaaaaaattccagttccagccttcacccgttcccccccgcccccgccccgtgcctcccagcaatcctagaccccaatccgggctaagaagcgggagcagcgggagggcaggggtgctccagccccggtttttcccctggacccagctgcagccctggctgtttggaaatcctggagagttttctagaaggtgaacgagtctcgcaggcgggaccccgagcgccacctgctggacccgtgcaggccggagcccacacacctgggggccggggtcgggcgtttgggtccccctgtcttttccacatcctgcgagaccgtgtctcattgttttcagtcccagctcttccagcatagtcctcaaatccaggcgggagccgtcccccgcaccttcggctcccagatttagtagctctcgaaaccctagccgcgcccccccttgccctttagtctcagatccacgcgggaaagactctcgtggggtggggccgcggagcagtgcgcctgcgcagtgtccgcagacccgccacttactctcccggccccgagttgccatggcgacgcgtgcatgcaggcgcgggcctgggagggccacgcggggcagcttcttggttggtgtgacccaaccgtctgtctagggaggagagggtcgaccttgtgaggtgtgtgtcgggacagagggaaggaaagaatgctggggagaagggggcagctgtaggggaggagcagcagccgagctggggtggttgtagggggagaggggagcaaggaacatttgtgactgggaagaagaagggcaattcggggtgcagtgaagggggaacagttgtgtgggcaagaagttgtgagggagactgcctactggtgaccagtttgaggagcaagcgggccctgaggtatttccagtaaccccagtgagccccaggctggaacagtgtctcccggtgtctgcagtgtggtttctgtctccagaggctccagtgtgaggcttaggggagctagatgcttccccctgaggctgatggaggaaaccgcgctcttgtagttggttttattgatttgttggcctaacagaacgtttttccttggagcaaagtacaaatccttcaagtttgaaattcataacccggtgatcaatgcctgtggcagcctgtggggatgaggcaaggcagccacaggtggctgccaggctcttgaggaggaagagggagcgcccagcattctacagtgtgttcaggagattctgtgctcctgacttagttgctttttttttttttttttgcccactgggtcttcctcatgtcctcagtttcttttttttcaccattgcataatttgacattcattactgggtggcttttgtccttcttggttgttcctaaggacatttggaatctggtgatcctgaaattgtgtacttagcatagactcaaccaacaggcctaagaaaccacagtccacactaaccaggctccccacctctaagcaattaaagactaaagagacttgtgcacacggtctttgtttaaggctgctgagatctcagtgtggtgggaagaacatttttttttttaagtgaggaggagaggagctacataggaaaatcatctgggtttgcctcagtgacttgacacagtaacagcgacgatggtggcaatcaccgggactgtgccttctcttattcaggagactgcaggatagtgtagctgaaggcctgggtgaacatagacgttttccataacctcccttagtgcggtttctgatatatatatatgtgtgtgtgtatgtgtgtatgtgtatgtatgtgtgtgtgtgtatatatatatatatatatttaatgtatatgtacatatatatgtatgcaaacgtgtgtagatacccaaagaagggagtcagatcactaggaactggagttacagacagttgtgagtcacctggtgctggggaaccaaactcttgtggtcctgacgaggagaaagctatcttttcagttcctgtgtctgttatttgtttattcctaatggcttatgagaccttgatttcccctacttgcagtttgtgtgtgtgtatgtgtgtgtgtgcatgccgtggtgtgtacttgcagggcagagaacacttgtgcatgtgcactctataccacatgaaccccagggattgaactcaggcccttagactggttggcaagcaccttaacgttctgagccctctagcctgcccggggctttgacttttaatctgattctgtgaagagtttgggttatcccagggaagaagagaggcctccatggtccccctcccttcttaaattgggtgtttggagcctaacccagggccttgtatacacattccaagcaagcactttaccactgagctgtgacccttgggagccaaggttctattgggtatgctccgagggtacagcagggtacccccagaaaagatgatcatctaaggtgtcccactcaagtttctgagtccagagggaacatgtgtacctggaggctgggttagaggtgggatctggaggtggacttcctgcccccgtgtacctgcaggttttgccttcaagatggctagcaaagccgagaagaagcgaaaagtggctggccggggaggcgcccgggcaggccgagttgtccgagctcctcagtccactgcaggcccaggagctacagaggcttccctgctccctgatggtcaggagccagagcccgagtctggcaaggaggactctggtgagtacttgctgggacggaggggacttagaaatggaccgtgggcagaagtagagaggcttttgagagctttttttttttttttcctgagacagggtctctctgtgtagctctgggtggtctcaaactggctaggtacagcaggcgggcctggcattcatcagggatctgcctccctttgcctcacaagccctgggattaaagggggcaccaccatgcccaactcaggagtatcttggggctagggcgcaggaccacgaagcaggacagatgtgatagtgtatctaaggcttccacagagcctccatccttctcttttctttcctcttgatatgtgcacgtgccttcttcctggtcagcccgctatttattctgttttttaaaatctcccatcagtgtaccaggaattcaccagccagttctttctctagcctcttccttatttcaagtgtttctggttgttcccaccccactgtagagggtttgatctcttcctttttcctattttcaccctgggtggcaaaacaaatagtgtttttcttccattaagcccatcaccatggagacccagcctgcttcgccaccctttgattcctaagcccggctgatgcgttccaccatctgttgaaagctcctgtgttttcttcctcagcttggcagagacttggtagattgtggaggttcaggttcagggtgacaggaaaagaagcctacatggagggaacaaagagctgcctcttgtggagttgatcctggagccagagtggttggaggggttggggtcttggttgctgtcggttgctttccctttagatcctgtccaacggcctgaggctgtgagccaggtgtagacctcaccttttaaaacgcggggcttgttggtattgctagtgtcctgtaaggatgaagagaaatagaatcttctcctgttgacttctaaaattttatttaataagtattttattattactactactattttattatatgtatagttgttttgcctgaatgttggtccgagcaccccatgccatatatctggtggaggccagaacatcagattcccctggggctccagtgtagatggtgagcccccacttggctgctgaaatcaaacctaggttctctggaagagaaagcagtgctcttaaccatgaaataatctctccagcccctaattatttaattatcttgtggagggatgggtgagcctgctcatatcatggtgcatatgtagaggttggaggacagcttgtgggagttggttctttcctcttagcccatggggtccagggatcacactcatgtggttgggcttggtgatgagtacccttatgtgctcatccatccccgtgtctcttttttcctttagtgttgagggctcaacccaaggctctcatgcatgttaggcgagcgctctcctcacggagctgtgtccccagagagaatccactgtaatgggatagtgggaataggcttagggctgtaggtgtgctagccacacacacacacacacacacacacacacacacacacacacacannnnnnnnnnnnnnnnnnnnnnnnnnnnnnnnnnnnnnnnnnnnnnnnnnnnnnnnnnnnnnnnnnnnnnnnnnnnnnnnnnnnnnnnnnnnnnnnnnnnnnnnnnnnnnnnnnnnnnnnnnnnnnnnnnnnnnnnnnnnnnnnnnnnnnnnnnnnnnnnnnnnnnnnnnnnnnnnnnnnnnnnnnnnnnnnnnnnnnnnnnnnnnnnnnnnnnnnnnnnnnnnnnnnnnnnnnnnnnnnnnnnnnnnnnnnnnnnnnnnnnnnnnnnnnnnnnnnnnnnnnnnnnnnnnnnnnnnnnnnnnnnnnnnnnnnnnnnnnnnnnnnnnnnnnnnnnnnnnnnnnnnnnnnnnnnnnnnnnnnnnnnnnnnnnnnnnnnnnnnnnnnnnnnnnnnnnnnnnnnnnnnnnnnnnnnnnnnnnnnnnnnnnnnnnnnnnnnnnnnnnnnnnnnnnnnnnnnnnnnnnnnnnnnnnnnnnnnnnnnnnnnnnnnnnnnnnnnnnnnnnnnnnnnnnnnnnnnnnnnnnnnnnnnnnnnnnnnnnnnnnnnnnnnnnnnnnnnnnnnnnnnnnnnnnnnnnnnnnnnnnnnnnnnnnnnnnnnnnnnnnnnnnnnnnnnnnnnnnnnnnnnnnnnnnnnnnnnnnnnnnnnnnnnnnnnnnnnnnnnnnnnnnnnnnnnnnnnnnnnnnnnnnnnnnnnnnnnnnnnnnnnnnnnnnnnnnnnnnnnnnnnnnnnnnnnnnnnnnnnnnnnnnnnnnnnnnnnnnnnnnnnnnnnnnnnnnnnnnnnnnnnnnnnnnnnnnnnnnnnnnnnnnnnnnnnnnnnnnnnnnnnnnnnnnnnnnnnnnnnnnnnnnnnnnnnnnnnnnnnnnnnnnnnnnnnnnnnnnnnnnnnnnnnnnnnnnnnnnnnnnnnnnnnnnnnnnnnnnnnnnnnnnnnnnnnnnnnnnnnnnnnnnnnnnnnnnnnnnnnnnnnnnnnnnnnnnnnnnnnnnnnnnnnnnnnnnnnnnnnnnnnnnnnnnnnnnnnnnnnnnnnnnnnnnnnnnnnnnnnnnnnnnnnnnnnnnnnnnnnnnnnnnnnnnnnnnnnnnnnnnnnnnnnnnnnnnnnnnnnnnnnnnnnnnnnnnnnnnnnnnnnnnnnnnnnnnnnnnnnnnnnnnnnnnnnnnnnnnnnnnnnnnnnnnnnnnnnnnnnnnnnnnnnnnnnnnnnnnnnnnnnnnnnnnnnnnnnnnnnnnnnnnnnnnnnnnnnnnnnnnnnnnnnnnnnnnnnnnnnnnnnnnnnnnnnnnnnnnnnnnnnnnnnnnnnnnnnnnnnnnnnnnnnnnnnnnnnnnnnnnnnnnnnnnnnnnnnnnnnnnnnnnnnnnnnnnnnnnnnnnnnnnnnnnnnnnnnnnnnnnnnnnnnnnnnnnnnnnnnnnnnnnnnnnnnnnnnnnnnnnnnnnnnnnnnnnnnnnnnnnnnnnnnnnnnnnnnnnnnnnnnnnnnnnnnnnnnnnnnnnnnnnnnnnnnnnnnnnnnnnnnnnnnnnnnnnnnnnnnnnnnnnnnnnnnnnnnnnnnnnnnnnnnnnnnnnnnnnnnnnnnnnnnnnnnnnnnnnnnnnnnnnnnnnnnnnnnnnnnnnnnnnnnnnnnnnnnnnnnnnnnnnnnnnnnnnnnnnnnnnnnnnnnnnnnnnnnnnnnnnnnnnnnnnnnnnnnnnnnnnnnnnnnnnnnnnnnnnnnnnnnnnnnnnnnnnnnnnnnnnnnnnnnnnnnnnnnnnnnnnnnnnnnnnnnnnnnnnnnnnnnnnnnnnnnnnnnnnnnnnnnnnnnnnnnnnnnnnnnnnnnnnnnnnnnnnnnnnnnnnnnnnnnnnnnnnnnnnnnnnnnnnnnnnnnnnnnnnnnnnnnnnnnnnnnnnnnnnnnnnnnnnnnnnnnnnnnnnnnnnnnnnnnnnnnnnnnnnnnnnnnnnnnnnnnnnnnnnnnnnnnnnnnnnnnnnnnnnnnnnnnnnnnnnnnnnnnnnnnnnnnnnnnnnnnnnnnnnnnnnnnnnnnnnnnnnnnnnnnnnnnnnnnnnnnnnnnnnnnnnnnnnnnnnnnnnnnnnnnnnnnnnnnnnnnnnnnnnnnnnnnnnnnnnnnnnnnnnnnnnnnnnnnnnnnnnnnnnnnnnnnnnnnnnnnnnnnnnnnnnnnnnnnnnnnnnnnnnnnnnnnnnnnnnnnnnnnnnnnnnnnnnnnnnnnnnnnnnnnnnnnnnnnnnnnnnnnnnnnnnnnnnnnnnnnnnnnnnnnnnnnnnnnnnnnnnnnnnnnnnnnnnnnnnnnnnnnnnnnnnnnnnnnnnnnnnnnnnnnnnnnnnnnnnnnnnnnnnnnnnnnnnnnnnnnnnnnnnnnnnnnnnnnnnnnnnnnnnnnnnnnnnnnnnnnnnnnnnnnnnnnnnnnnnnnnnnnnnnnnnnnnnnnnnnnnnnnnnnnnnnnnnnnnnnnnnnnnnnnnnnnnnnnnnnnnnnnnnnnnnnnnnnnnnnnnnnnnnnnnnnnnnnnnnnnnnnnnnnnnnnnnnnnnnnnnnnnnnnnnnnnnnnnnnnnnnnnnnnnnnnnnnnnnnnnnnnnnnnnnnnnnnnnnnnnnnnnnnnnnnnnnnnnnnnnnnnnnnnnnnnnnnnnnnnnnnnnnnnnnnnnnnnnnnnnnnnnnnnnnnnnnnnnnnnnnnnnnnnnnnnnnnnnnnnnnnnnnnnnnnnnnnnnnnnnnnnnnnnnnnnnnnnnnnnnnnnnnnnnnnnnnnnnnnnnnnnnnnnnnnnnnnnnnnnnnnnnnnnnnnnnnnnnnnnnnnnnnnnnnnnnnnnnnnnnnnnnnnnnnnnnnnnnnnnnnnnnnnnnnnnnnnnnnnnnnnnnnnnnnnnnnnnnnnnnnnnnnnnnnnnnnnnnnnnnnnnnnnnnnnnnnnnnnnnnnnnnnnnnnnnnnnnnnnnnnnnnnnnnnnnnnnnnnnnnnnnnnnnnnnnnnnnnnnnnnnnnnnnnnnnnnnnnnnnnnnnnnnnnnnnnnnnnnnnnnnnnnnnnnnnnnnnnnnnnnnnnnnnnnnnnnnnnnnnnnnnnnnnnnnnnnnnnnnnnnnnnnnnnnnnnnnnnnnnnnnnnnnnnnnnnnnnnnnnnnnnnnnnnnnnnnnnnnnnnnnnnnnnnnnnnnnnnnnnnnnnnnnnnnnnnnnnnnnnnnnnnnnnnnnnnnnnnnnnnnnnnnnnnnnnnnnnnnnnnnnnnnnnnnnnnnnnnnnnnnnnnnnnnnnnnnnnnnnnnnnnnnnnnnnnnnnnnnnnnnnnnnnnnnnnnnnnnnnnnnnnnnnnnnnnnnnnnnnnnnnnnnnnnnnnnnnnnnnnnnnnnnnnnnnnnnnnnnnnnnnnnnnnnnnnnnnnnnnnnnnnnnnnnnnnnnnnnnnnnnnnnnnnnnnnnnnnnnnnnnnnnnnnnnnnnnnnnnnnnnnnnnnnnnnnnnnnnnnnnnnnnnnnnnnnnnnnnnnnnnnnnnnnnnnnnnnnnnnnnnnnnnnnnnnnnnnnnnnnnnnnnnnnnnnnnnnnnnnnnnnnnnnnnnnnnnnnnnnnnnnnnnnnnnnnnnnnnnnnnnnnnnnnnnnnnnnnnnnnnnnnnnnnnnnnnnnnnnnnnnnnnnnnnnnnnnnnnnnnnnnnnnnnnnnnnnnnnnnnnnnnnnnnnnnnnnnnnnnnnnnnnnnnnnnnnnnnnnnnnnnnnnnnnnnnnnnnnnnnnnnnnnnnnnnnnnnnnnnnnnnnnnnnnnnnnnnnnnnnnnnnnnnnnnnnnnnnnnnnnnnnnnnnnnnnnnnnnnnnnnnnnnnnnnnnnnnnnnnnnnnnnnnnnnnnnnnnnnnnnnnnnnnnnnnnnnnnnnnnnnnnnnnnnnnnnnnnnnnnnnnnnnnnnnnnnnnnnnnnnnnnnnnnnnnnnnnnnnnnnnnnnnnnnnnnnnnnnnnnnnnnnnnnnnnnnnnnnnnnnnnnnnnnnnnnnnnnnnnnnnnnnnnnnnnnnnnnnnnnnnnnnnnnnnnnnnnnnnnnnnnnnnnnnnnnnnnnnnnnnnnnnnnnnnnnnnnnnnnnnnnnnnnnnnnnnnnnnnnnnnnnnnnnnnnnnnnnnnnnnnnnnnnnnnnnnnnnnnnnnnnnnnnnnnnnnnnnnnnnnnnnnnnnnnnnnnnnnnnnnnnnnnnnnnnnnnnnnnnnnnnnnnnnnnnnnnnnnnnnnnnnnnnnnnnnnnnnnnnnnnnnnnnnnnnnnnnnnnnnnnnnnnnnnnnnnnnnnnnnnnnnnnnnnnnnnnnnnnnnnnnnnnnnnnnnnnnnnnnnnnnnnnnnnnnnnnnnnnnnnnnnnnnnnnnnnnnnnnnnnnnnnnnnnnnnnnnnnnnnnnnnnnnnnnnnnnnnnnnnnnnnnnnnnnnnnnnnnnnnnnnnnnnnnnnnnnnnnnnnnnnnnnnnnnnnnnnnnnnnnnnnnnnnnnnnnnnnnnnnnnnnnnnnnnnnnnnnnnnnnnnnnnnnnnnnnnnnnnnnnnnnnnnnnnnnnnnnnnnnnnnnnnnnnnnnnnnnnnnnnnnnnnnnnnnnnnnnnnnnnnnnnnnnnnnnnnnnnnnnnnnnnnnnnnnnnnnnnnnnnnnnnnnnnnnnnnnnnnnnnnnnnnnnnnnnnnnnnnnnnnnnnnnnnnnnnnnnnnnnnnnnnnnnnnnnnnnnnnnnnnnnnnnnnnnnnnnnnnnnnnnnnnnnnnnnnnnnnnnnnnnnnnnnnnnnnnnnnnnnnnnnnnnnnnnnnnnnnnnnnnnnnnnnnnnnnnnnnnnnnnnnnnnnnnnnnnnnnnnnnnnnnnnnnnnnnnnnnnnnnnnnnnnnnnnnnnnnnnnnnnnnnnnnnnnnnnnnnnnnnnnnnnnnnnnnnnnnnnnnnnnnnnnnnnnnnnnnnnnnnnnnnnnnnnnnnnnnnnnnnnnnnnnnnnnnnnnnnnnnnnnnnnnnnnnnnnnnnnnnnnnnnnnnnnnnnnnnnnnnnnnnnnnnnnnnnnnnnnnnnnnnnnnnnnnnnnnnnnnnnnnnnnnnnnnnnnnnnnnnnnnnnnnnnnnnnnnnnnnnnnnnnnnnnnnnnnnnnnnnnnnnnnnnnnnnnnnnnnnnnnnnnnnnnnnnnnnnnnnnnnnnnnnnnnnnnnnnnnnnnnnnnnnnnnnnnnnnnnnnnnnnnnnnnnnnnnnnnnnnnnnnnnnnnnnnnnnnnnnnnnnnnnnnnnnnnnnnnnnnnnnnnnnnnnnnnnnnnnnnnnnnnnnnnnnnnnnnnnnnnnnnnnnnnnnnnnnnnnnnnnnnnnnnnnnnnnnnnnnnnnnnnnnnnnnnnnnnnnnnnnnnnnnnnnnnnnnnnnnnnnnnnnnnnnnnnnnnnnnnnnnnnnnnnnnnnnnnnnnnnnnnnnnnnnnnnnnnnnnnnnnnnnnnnnnnnnnnnnnnnnnnnnnnnnnnnnnnnnnnnnnnnnnnnnnnnnnnnnnnnnnnnnnnnnnnnnnnnnnnnnnnnnnnnnnnnnnnnnnnnnnnnnnnnnnnnnnnnnnnnnnnnnnnnnnnnnnnnnnnnnnnnnnnnnnnnnnnnnnnnnnnnnnnnnnnnnnnnnnnnnnnnnnnnnnnnnnnnnnnnnnnnnnnnnnnnnnnnnnnnnnnnnnnnnnnnnnnnnnnnnnnnnnnnnnnngctagctctttttttttttttaatatttattttctttttatggtgtgtgtgtgcgcgtgtgggtctgggtctgggtctgggtatgtgggtctgagtattggtattgttcctgggagtgcatgtgctgaatgaaggagagcagaactgtagaaagctcctgaagttggaggtacagtcagttgtgagccatctgacatgtgtgctggccgtcaaactctgccagagcagtacgtgtttgtatgtatgtacgtatgtatgtatagtttgagacagggtctcactctgtggcccttgcttgtttggaactcactatgtagacaaggctgaccttgaacccacagagactcaccaccccatgactcctacgtgctattgtgtgctctgcaggtgattttatgcagccgaggctggcctggaattgattctcctacccctgctctccctccactgggaccgtgtaaatatgtgcactgccactccgagatttcaaacagcaattttaaaaatcaaacatgttaatacaacacaatccaaagatacactaatttgatacttacatgccgaggagagatgccaggaaaatattaaggtctttgttttctataattaaaccgttatgtttttataagaacagaaaacttggtgtgtacagtaaaaaaccctgcagttcataacatacaatagtctccaatctgagctgaggtgtttcaggaggtatttgttggcgatgtgttggtggtacgtgcagtgcgtgtgcatgtgtgtgtgtgtgtgtgtgtgtgtgatgtgccgaggaccaaggccatggtgaacttgcagaatatagtgtgggtgatggtgatgggtgccagacatacctcgggttcattatgagtttggttttttaaaaaagattttattacattttattgttatttacttattctccgagtatgcatgtggcgtgcaggtgccacagtgtttaagagaggtcagaggacagcttgttggtgtcagttctctcctttcaccatgtgggtcccaaagatcaaacccagagcaccgggcttggcagtgtatgcctgtacccgctgagccctcttaccagccctttacgttaattttcatcagaaacctcttactgttgtcaaaggtttccagtgcccatgttctgttatgcaatcctatagggggttgcaacccacattcaagaaactgaagcctaaagcatacaacacactgtttcttgacatatttaaaagctgtgcaaccatcaatgctatccaattctagaacatttttatccctcccaaaagaaagccactttaagtaccttgacaaattggtgccagatgcttcctggatctgtttcctcctcctcttcttcctcttcctcctcctcctcctcctagtgttgtatatttaacgtgtgtaatgtatgtattatgcatatatgtatgtgtcttggtttgactttttgacacaggccaaaagctacctagggagggaaaggtctgtctttgagagaagccaagcaggtcaggacctggaggcaagaaccggagcatagaccacggggagatgtttacagactgctcatcttgcctcgcgcagcttgcttgcttatttactcatgtatgtattatgtgtgtgtgtatgaatgtatgtatgagtgtatgtatgtatatatgtaggtgtgtgtatgaatgtatgtacgaacgtatgtatgtatgtgtgtgtatgtatgaatgtgtgtgtgtgtgtgtgtgtatgtattgaatgtatggaagtgttgcttgcacatatgtctgtgtactacaaaggggtcagaagaaagtgtcatcctggaactagagttacagatgaatgtgagccacaatgtgggtactgggaatcgaacttgggtcctctggaagagcagccaatgctcttaatgctgagccatcactctagcctcttggcttgcttttttcatataacccagaatcacctgtctgggaatggctacctacagtagtgggctggtattgcccgggatcagtcagccaaatgctcctacagacttgcctgcaggccaatctgatggaggcatttaaaaaaaaaaaaagatatatttacttatttattaggcatacagcattctgcctgtgtctatgcctgtaggccagaagagggcaccagatttcattataggtggctataagccatcatgtggttgctaggaattgaactcagaacctctggaagagcagtcagtgctcttaacctatgagccatctctccagcccttggaggaatttttttttttttttttaaattaagattctatcttcccaggtgactctagcttgtgtcaagttgacaaaaaagctaaccagtgcaatgtgtgtgtgtttgtgtgtacagacagagggtgaatctgggtagagctgaaaaaaagatcaccccctgagaggctcaaaccaaaagacaagctgataggtacttaaaagtgggggactcgggggctggagagatggctgagcaattcccagcaaccacatggtggctcacagccatctttaatgagatctgatgccttcttctggggtgtctgaagacagctacagtgtacatacatataataaatatttaaaagctaaaaaaggggggtcttggtggaggggactaaagtgcatttgcattgcttacatttggataagtgattgcaatgaatccacaggtgcagcagtggttagaggaccacccaggtcgttggtccttgtctcccacctagtttgatacaatgtgtctttgttgattttttggctgtacacaccacaacttccgggatgctcttgtctctgtttttctgtcagttttttgttttttaaacctgagattacagaagcttggactacagcattctgctcttatgtgggttctagagattcatgtttaggtcttcacgcccacacgacagacaaacacccactgatcgcctgagacccccttctccccactcttcttttggggggggggttttcaagacagggtttctctgtttaaccctggctgccctggaactcactttgtagaccaggctggccttgaactcagaaatctgcctgcctctgcctcccaagtgctgggattaaaggggtgcgccaccacgcctggctcccccccactctttattttattcacttatttaattatttttttgagaccaggtctcacccagtgcttaaaattgtatcattccctagcttctgtcgctgtgccccgctattgtttattttgagacagggacttactttgtagtccaggttgacctggaagtcagagcaattctcctgcctaaacctctctagtgctttgattataagcatgagccacacatctggcttaaatgactgatcactggcttcactgttttgtgttgctgggcattaaacccacagccttttatgtaaaagtatccttttttcctatctatctatctatctatctatctatctatctatctatctatctatctatctatctatcttgcattggtgttttgcctacaggtatgtctgtgtgaaggggtcagattccctggaactggagctgcaaaaagttgttacagacagttatgagctgctctgtgggtgctgggaattgaacctgggtcctctagaagaacagccagtgcttttaactctcatgagagttgggcatagcctattctgtcaaaattttctctgactcatccctttgtctgccactcaatttaacatcactttcgaacatgggtacttccttctacaaactaactttaccttcattgtttgggattaaaaatgtatactcagggcatgtctgtattccagccaagggattaacggtatgtgccaagggctgagccacaccctaactacagtttcagacatcctgtaacatttgtatatgctaggaaagagctgaccctgtgtggagagccttggttttagcagctttccctcagatcctgaattgactaatctacactctcgctgtagattttctgtgatgggcatttcatgtaaatggaatcacacactgatatgctgttatatatcgggcttcttttgcacagaagaaagttttcaactgtgttgtannnnnnnnnnnnnnnnnnnnnnnnnnnnnnnnnnnnnnnnnnnnnnnnnnnnnnnnnnnnnnnnnnnnnnnnnnnnnnnnnnnnnnnnnnnnnnnnnnnnnnnnnnnnnnnnnnnnnnnnnnnnnnnnnnnnnnnnnnnnnnnnnnnnnnnnnnnnnnnnnnnnnnnnnnnnnnnnnnnnnnnnnnnnnnnnnnnnnnnnnnnnnnnnnnnnnnnnnnnnnnnnnnnnnnnnnnnnnnnnnnnnnnnnnnnnnnnnnnnnnnnnnnnnnnnnnnnnnnnnnnnnnnnnnnnnnnnnnnnnnnnnnnnnnnnnnnnnnnnnnnnnnnnnnnnnnnnnnnnnnnnnnnnnnnnnnnnnnnnnnnnnnnnnnnnnnnnnnnnnnnnnnnnnnnnnnnnnnnnnnnnnnnnnnnnnnnnnnnnnnnnnnnnnnnnnnnnnnnnnnnnnnnnnnnnnnnnnnnnnnnnnnnnnnnnnnnnnnnnnnnnnnnnnnnnnnnnnnnnnnnnnnnnnnnnnnnnnnnnnnnnnnnnnnnnnnnnnnnnnnnnnnnnnnnnnnnnnnnnnnnnnnnnnnnnnnnnnnnnnnnnnnnnnnnnnnnnnnnnnnnnnnnnnnnnnnnnnnnnnnnnnnnnnnnnnnnnnnnnnnnnnnnnnnnnnnnnnnnnnnnnnnnnnnnnnnnnnnnnnnnnnnnnnnnnnnnnnnnnnnnnnnnnnnnnnnnnnnnnnnnnnnnnnnnnnnnnnnnnnnnnnnnnnnnnnnnnnnnnnnnnnnnnnnnnnnnnnnnnnnnnnnnnnnnnnnnnnnnnnnnnnnnnnnnnnnnnnnnnnnnnnnnnnnnnnnnnnnnnnnnnnnnnnnnnnnnnnnnnnnnnnnnnnnnnnnnnnnnnnnnnnnnnnnnnnnnnnnnnnnnnnnnnnnnnnnnnnnnnnnnnnnnnnnnnnnnnnnnnnnnnnnnnnnnnnnnnnnnnnnnnnnnnnnnnnnnnnnnnnnnnnnnnnnnnnnnnnnnnnnnnnnnnnnnnnnnnnnnnnnnnnnnnnnnnnnnnnnnnnnnnnnnnnnnnnnnnnnnnnnnnnnnnnnnnnnnnnnnnnnnnnnnnnnnnnnnnnnnnnnnnnnnnnnnnnnnnnnnnnnnnnnnnnnnnnnnnnnnnnnnnnnnnnnnnnnnnnnnnnnnnnnnnnnnnnnnnnnnnnnnnnnnnnnnnnnnnnnnnnnnnnnnnnnnnnnnnnnnnnnnnnnnnnnnnnnnnnnnnnnnnnnnnnnnnnnnnnnnnnnnnnnnnnnnnnnnnnnnnnnnnnnnnnnnnnnnnnnnnnnnnnnnnnnnnnnnnnnnnnnnnnnnnnnnnnnnnnnnnnnnnnnnnnnnnnnnnnnnnnnnnnnnnnnnnnnnnnnnnnnnnnnnnnnnnnnnnnnnnnnnnnnnnnnnnnnnnnnnnnnnnnnnnnnnnnnnnnnnnnnnnnnnnnnnnnnnnnnnnnnnnnnnnnnnnnnnnnnnnnnnnnnnnnnnnnnnnnnnnnnnnnnnnnnnnnnnnnnnnnnnnnnnnnnnnnnnnnnnnnnnnnnnnnnnnnnnnnnnnnnnnnnnnnnnnnnnnnnnnnnnnnnnnnnnnnnnnnnnnnnnnnnnnnnnnnnnnnnnnnnnnnnnnnnnnnnnnnnnnnnnnnnnnnnnnnnnnnnnnnnnnnnnnnnnnnnnnnnnnnnnnnnnnnnnnnnnnnnnnnnnnnnnnnnnnnnnnnnnnnnnnnnnnnnnnnnnnnnnnnnnnnnnnnnnnnnnnnnnnnnnnnnnnnnnnnnnnnnnnnnnnnnnnnnnnnnnnnnnnnnnnnnnnnnnnnnnnnnnnnnnnnnnnnnnnnnnnnnnnnnnnnnnnnnnnnnnnnnnnnnnnnnnnnnnnnnnnnnnnnnnnnnnnnnnnnnnnnnnnnnnnnnnnnnnnnnnnnnnnnnnnnnnnnnnnnnnnnnnnnnnnnnnnnnnnnnnnnnnnnnnnnnnnnnnnnnnnnnnnnnnnnnnnnnnnnnnnnnnnnnnnnnnnnnnnnnnnnnnnnnnnnnnnnnnnnnnnnnnnnnnnnnnnnnnnnnnnnnnnnnnnnnnnnnnnnnnnnnnnnnnnnnnnnnnnnnnnnnnnnnnnnnnnnnnnnnnnnnnnnnnnnnnnnnnnnnnnnnnnnnnnnnnnnnnnnnnnnnnnnnnnnnnnnnnnnnnnnnnnnnnnnnnnnnnnnnnnnnnnnnnnnnnnnnnnnnnnnnnnnnnnnnnnnnnnnnnnnnnnnnnnnnnnnnnnnnnnnnnnnnnnnnnnnnnnnnnnnnnnnnnnnnnnnnnnnnnnnnnnnnnnnnnnnnnnnnnnnnnnnnnnnnnnnnnnnnnnnnnnnnnnnnnnnnnnnnnnnnnnnnnnnnnnnnnnnnnnnnnnnnnnnnnnnnnnnnnnnnnnnnnnnnnnnnnnnnnnnnnnnnnnnnnnnnnnnnnnnnnnnnnnnnnnnnnnnnnnnnnnnnnnnnnnnnnnnnnnnnnnnnnnnnnnnnnnnnnnnnnnnnnnnnnnnnnnnnnnnnnnnnnnnnnnnnnnnnnnnnnnnnnnnnnnnnnnnnnnnnnnnnnnnnnnnnnnnnnnnnnnnnnnnnnnnnnnnnnnnnnnnnnnnnnnnnnnnnnnnnnnnnnnnnnnnnnnnnnnnnnnnnnnnnnnnnnnnnnnnnnnnnnnnnnnnnnnnnnnnnnnnnnnnnnnnnnnnnnnnnnnnnnnnnnnnnnnnnnnnnnnnnnnnnnnnnnnnnnnnnnnnnnnnnnnnnnnnnnnnnnnnnnnnnnnnnnnnnnnnnnnnnnnnnnnnnnnnnnnnnnnnnnnnnnnnnnnnnnnnnnnnnnnnnnnnnnnnnnnnnnnnnnnnnnnnnnnnnnnnnnnnnnnnnnnnnnnnnnnnnnnnnnnnnnnnnnnnnnnnnnnnnnnnnnnnnnnnnnnnnnnnnnnnnnnnnnnnnnnnnnnnnnnnnnnnnnnnnnnnnnnnnnnnnnnnnnnnnnnnnnnnnnnnnnnnnnnnnnnnnnnnnnnnnnnnnnnnnnnnnnnnnnnnnnnnnnnnnnnnnnnnnnnnnnnnnnnnnnnnnnnnnnnnnnnnnnnnnnnnnnnnnnnnnnnnnnnnnnnnnnnnnnnnnnnnnnnnnnnnnnnnnnnnnnnnnnnnnnnnnnnnnnnnnnnnnnnnnnnnnnnnnnnnnnnnnnnnnnnnnnnnnnnnnnnnnnnnnnnnnnnnnnnnnnnnnnnnnnnnnnnnnnnnnnnnnnnnnnnnnnnnnnnnnnnnnnnnnnnnnnnnnnnnnnnnnnnnnnnnnnnnnnnnnnnnnnnnnnnnnnnnnnnnnnnnnnnnnnnnnnnnnnnnnnnnnnnnnnnnnnnnnnnnnnnnnnnnnnnnnnnnnnnnnnnnnnnnnnnnnnnnnnnnnnnnnnnnnnnnnnnnnnnnnnnnnnnnnnnnnnnnnnnnnnnnnnnnnnnnnnnnnnnnnnnnnnnnnnnnnnnnnnnnnnnnnnnnnnnnnnnnnnnnnnnnnnnnnnnnnnnnnnnnnnnnnnnnnnnnnnnnnnnnnnnnnnnnnnnnnnnnnnnnnnnnnnnnnnnnnnnnnnnnnnnnnnnnnnnnnnnnnnnnnnnnnnnnnnnnnnnnnnnnnnnnnnnnnnnnnnnnnnnnnnnnnnnnnnnnnnnnnnnnnnnnnnnnnnnnnnnnnnnnnnnnnnnnnnnnnnnnnnnnnnnnnnnnnnnnnnnnnnnnnnnnnnnnnnnnnnnnnnnnnnnnnnnnnnnnnnnnnnnnnnnnnnnnnnnnnnnnnnnnnnnnnnnnnnnnnnnnnnnnnnnnnnnnnnnnnnnnnnnnnnnnnnnnnnnnnnnnnnnnnnnnnnnnnnnnnnnnnnnnnnnnnnnnnnnnnnnnnnnnnnnnnnnnnnnnnnnnnnnnnnnnnnnnnnnnnnnnnnnnnnnnnnnnnnnnnnnnnnnnnnnnnnnnnnnnnnnnnnnnnnnnnnnnnnnnnnnnnnnnnnnnnnnnnnnnnnnnnnnnnnnnnnnnnnnnnnnnnnnnnnnnnnnnnnnnnnnnnnnnnnnnnnnnnnnnnnnnnnnnnnnnnnnnnnnnnnnnnnnnnnnnnnnnnnnnnnnnnnnnnnnnnnnnnnnnnnnnnnnnnnnnnnnnnnnnnnnnnnnnnnnnnnnnnnnnnnnnnnnnnnnnnnnnnnnnnnnnnnnnnnnnnnnnnnnnnnnnnnnnnnnnnnnnnnnnnnnnnnnnnnnnnnnnnnnnnnnnnnnnnnnnnnnnnnnnnnnnnnnnnnnnnnnnnnnnnnnnnnnnnnnnnnnnnnnnnnnnnnnnnnnnnnnnnnnnnnnnnnnnnnnnnnnnnnnnnnnnnnnnnnnnnnnnnnnnnnnnnnnnnnnnnnnnnnnnnnnnnnnnnnnnnnnnnnnnnnnnnnnnnnnnnnnnnnnnnnnnnnnnnnnnnnnnnnnnnnnnnnnnnnnnnnnnnnnnnnnnnnnnnnnnnnnnnnnnnnnnnnnnnnnnnnnnnnnnnnnnnnnnnnnnnnnnnnnnnnnnnnnnnnnnnnnnnnnnnnnnnnnnnnnnnnnnnnnnnnnnnnnnnnnnnnnnnnnnnnnnnnnnnnnnnnnnnnnnnnnnnnnnnnnnnnnnnnnnnnnnnnnnnnnnnnnnnnnnnnnnnnnnnnnnnnnnnnnnnnnnnnnnnnnnnnnnnnnnnnnnnnnnnnnnnnnnnnnnnnnnnnnnnnnnnnnnnnnnnnnnnnnnnnnnnnnnnnnnnnnnnnnnnnnnnnnnnnnnnnnnnnnnnnnnnnnnnnnnnnnnnnnnnnnnnnnnnnnnnnnnnnnnnnnnnnnnnnnnnnnnnnnnnnnnnnnnnnnnnnnnnnnnnnnnnnnnnnnnnnnnnnnnnnnnnnnnnnnnnnnnnnnnnnnnnnnnnnnnnnnnnnnnnnnnnnnnnnnnnnnnnnnnnnnnnnnnnnnnnnnnnnnnnnnnnnnnnnnnnnnnnnnnnnnnnnnnnnnnnnnnnnnnnnnnnnnnnnnnnnnnnnnnnnnnnnnnnnnnnnnnnnnnnnnnnnnnnnnnnnnnnnnnnnnnnnnnnnnnnnnnnnnnnnnnnnnnnnnnnnnnnnnnnnnnnnnnnnnnnnnnnnnnnnnnnnnnnnnnnnnnnnnnnnnnnnnnnnnnnnnnnnnnnnnnnnnnnnnnnnnnnnnnnnnnnnnnnnnnnnnnnnnnnnnnnnnnnnnnnnnnnnnnnnnnnnnnnnnnnnnnnnnnnnnnnnnnnnnnnnnnnnnnnnnnnnnnnnnnnnnnnnnnnnnnnnnnnnnnnnnnnnnnnnnnnnnnnnnnnnnnnnnnnnnnnnnnnnnnnnnnnnnnnnnnnnnnnnnnnnnnnnnnnnnnnnnnnnnnnnnnnnnnnnnnnnnnnnnnnnnnnnnnnnnnnnnnnnnnnnnnnnnnnnnnnnnnnnnnnnnnnnnnnnnnnnnnnnnnnnnnnnnnnnnnnnnnnnnnnnnnnnnnnnnnnnnnnnnnnnnnnnnnnnnnnnnnnnnnnnnnnnnnnnnnnnnnnnnnnnnnnnnnnnnnnnnnnnnnnnnnnnnnnnnnnnnnnnnnnnnnnnnnnnnnnnnnnnnnnnnnnnnnnnnnnnnnnnnnnnnnnnnnnnnnnnnnnnnnnnnnnnnnnnnnnnnnnnnnnnnnnnnnnnnnnnnnnnnnnnnnnnnnnnnnnnnnnnnnnnnnnnnnnnnnnnnnnnnnnnnnnnnnnnnnnnnnnnnnnnnnnnnnnnnnnnnnnnnnnnnnnnnnnnnnnnnnnnnnnnnnnnncaacagccacggtgcaactcgataccaacatgaattcagtctctacgagatgataaaaggtggaaggagatgaaagggggaggtggggcacggatcttagggaacgaataaggcagcgtgctacaaaaccagatgagaaatggcggggaactgaatagctgtggttgaaaatccgtcaccgactgagcgcaaggctgaggcagccgccgttcatgagaaagaaaaggccggacacattaatgcaattagggagacgcgaatagacacgagggatgggcacagcccagctgcaggagtagacagccgtcacagtgtggatttagagagaacatacaaagaattttcctgagatgcacaaggaacggcgtctgggagtgagaaggctgcgctgttgctgcttaccgacggcctctcacgttaatgtcagcgtgcattttagtttcagcactgaaatgtaaggatgccagttctggggaacattatggcgttccaccgagaacatttagcttcaacctaataacaagcatttagataaatccaaattaagggacatttgaaaaacatctggcttgattcttagagtgattgatagtacaacgtaaaagagaaagcccgacatgatggtacatgcttgtaatcctgtcacctgagaggctaaaacaggaggacacacacacacacacacacacacacacacacagaggatagcaaaggatgggagttgttgaaatgaaaggaggttgtgggaaacagaggcaggaaggagtattaggagttccaggccagcctgagtatgaaactctgtctataccccatcaaaaaaacctaaacaaacaaacaaacaaacaaaaatgcacctcaaacaccacacactcacacactcactcacacacactcactcacacacactcacacactcactcacacacacacactcactcacacacactcacacacacacactcactcattcacacacacacacacacacacacacacactcacacactctctctctctctcacacacacacacacacacacannnnnnnnnnnnnnnnnnnntactatctatctatctatcttgcattggtgttttgcctacaggtatgtctatgtgaagggggtcagattccctggaactggagctgcaaaaagttgttacagacagttatgagctgctctgtgggtgctgggaattgaacctgggtcctctagaagaacagccagtgcttttaactctcatgagagttgggcatatcctattctgtcaaaattttctctgattcatccctttgtctgccactcaatttaacatcactttcgaacatgggtacttccttctacaaactaactttaccttcattgtttgggattaaaaatgtatactcagggcatgtctgtattccagccaagggattaacagtatgtgccaagggctgagccacaccctaactacagtttcagacatcctgtaacatttgtatatgctaggaaagagctgaccctgtgtggagagccttggttttagcagctttccctcagatcctgaattgactaatctacactctcgctgtagattttctgtgatgggcatttcatgtaaatggaatcacacactgatatgctgttatatgtcgggcttcttttgcacagaagaaagttttcaactgtgtcgtagcatggacttcaccttcactgtagatgtgcaccaatattttgtttatccagctatagcttaaatggacacaggctgttcctgcaccatctgcccctcttccgtccacctccttcctcaggcctaggcagggaacccagagccttatgtgtgctaggccctggtccactgagctatagcctgtgccagcttcgtcgtcatctttttttctcctcctccttctccttctttttttggaacagggtttgtctgtgtagctctatttgtcccctggaactccctttgtagaccaggctggcctcaaactcacagatccacctacctctgcctcccaagtgctgggattaaaggtgtgcaccttgggggatggagagatggtttagcagttgagaacactgactgctcttccaaaggtcctaagttcaggtttcagcaaccacatggtggctcacagccatctgtggtgggatctgatgccctcttctgggatgtctgaggacagccacagtgtacttacatataataaaatgggggaaaaaaaaggtatgtgctttggggcccagctcccccacccatttctactcccgcactgggaacaacgctgaaacagacgttaacaggccacaccagtttagctctcaggccacttgggtactagaagtgggattgctgggtaatatagcttctatctttgatgttctccccagagctagaaccggagaaatctgagaaacctacagaactcggcacttctctgatggacatggtaggtttgcatttcccccagtggtcacatcctttccagtcaaagcgtgagtgccaggagacaaggcctctgagatgacctctctcgttccccaaccttgggtcagctttgatcggacttacaactctgatcttggacagctgaacaacttgaacaagcaggtagatgttgtccttctcagatagtaatttctcagacgttctctgtccttctgctgttgtcttttgactgaggacctcatgactgccatagtcactgtgtgaaatggacattcagtgttttcttccaagcagagcttaaccttaccctttgttatgtagggggtgagtagggtggcaaccttgcattcttttttgaaaattttttcactgtttatttttgttttatgttcgttagtgttttgccagcatgtatgtaggtctgtgtgagggtgttggatcccctggaactggagttagcgacagctgtgagctgccatgtgggtgttcaggaggaacagccagtgctcttaaccactgggccatctctccagccccaaccttgcttttttttttttttttttttttttgccagctgaaatgtgtgcacacatttgcccttgggaagctgaaacaggagtttatatggataaaattggcctgggctgtgtatcaagattctgtttcaaacaaccaaaagacaaaaggaaaacaaacagagaaaaagaaactaaaagatcataaaggtccaaccccagccaaatataatattctctttcccatcatgccgggacctaaagacagactgtgcagccagacaagcactctgctcttagatattttagttggttgttgaaagagctcgtagcacaggctaacctcaaattcactatatagctcaaggtagattgctgtcttcttgtctggttccctagtgctagaattataggtgtgcctccacccctacaggcttgtagctctgatctttttgagtcagggtcctactacacagcttagtagggcctttttatcttccatcctcttgcttgagtctaccatgtttagtagccatatgcaccctagttaaaccattactctttttgctgtttgccatgttttgttctcatactatcactgtgataaataccataaagctgaccctgaaacgtgcgtcactaagagtgggtggttctgctcttccagaggaccagggttcaattcccagtacctacatggctcacaactatcttttttggtttttcgagacagggtttctctgtgtagccctggctgtcctggaactcactctgtagagctggctggcctcgaactcagaaatctgcctgcctttgcctcctgagtgctgggattaaaggcgtgcgccaccacgcccagctggctcacaactatctttaactccagtttgatgggatatgatgccctctactggcctccttgtgcacccagcacaccagttgtgcacagacatatgcacatatatgcagacaaaatactcataaaataaaaggaaaaattaaggttaaaatgaaaattaagtaagaaagaatagtaagggtaaagaacattgcctatatttctaatacacaatacgaagtttttctaaccagattgtaatatgcccttacattagcaataaagggattttccagactaaggactgtcagtttactaagtactaacaaaaacagatagcaaatgatgtctttgtcagtttttatttatattcttttttttttaagatttgtttattttatgtatatgagtacactctagctgtacagatggttgtgagctatcatgtagttgctgggaactgaatttaggacctctgctcgctccggtcagcctcacttgctctggcccaaagatttatttattgttataaataagtacactgtgaaaaaaaaaaaaaaaaagtacactgtggctgtcttcagatgcaccagaagagggcatcagatctcattacagatggttgtgagccaccatgtggctgctgggatttgaactcaggacctctggaagagcagtcagtgtgcttaaccgcagagccatctctgcagctcctgtgtatattctttgaaacatcatttacagatggtgtgggctgtgcccatcttttcctttttgggctcttggtattgtatcactgattcctccacatcctgtccaggaaagagctttgttagaagattgtctattttctcttctttggagctcattcctcttcctcctcttccggggatactgggaaggactgggcggtgtctccagcccccagagcctcgtctttgctcctcatcgcaggcttcagcaggctcatggggataacttgttttcaacccaatcactttgttccttagctgcattttgtcagttttcctttcctcctgtccctgggttctcataactgctgtgccagtcgactgctaacggcatctcctgctgcagagggggcagcttcctaggcaatgggctgtggaccttgtgccctacccaccccatcctcgcgcccagatcttgcttgtttccttcattcaccttccctttgaggttgagaatagcagagaatgcgttttcatagccacaggcagaagaaatattttggggaagataatggcgcaccgctcccccctgtgacacattctgttttcattctccgaggcaggggagtctgttgctccttcccttaaaagctagaagaagcctgccattccgtcttcccagccttctggcacctcatctcccaagtcaacccttatagccgtggacgggaggaccacccatcctcacagctctgacacaccctgtctctctgttctccgcagaagcccttcttcctctcacgaacgatgttgaccggactggcagatgccacgtggacgggggagcacgacatggttctggagcactttgtccaggatcctgcggtgcctgccctcaccatcttcattgaccccgtctttgggttgaagctggagctgggcatgcctgtgcaggtgggtaccccactttccaggctctgtggagctgctgcatatcaccctcatccggagtcacgctccctctgtgccccacggctcgtggaaccccactcttaacctttgagacatctctccagccctgattcaaacttgcagtgcagctagtgatatcagttactcggtaggatacctatctagcacaaaggaaaacctgcagttggttggtccctagccttaaataatttgggagtaacagtccaagcctttaaatctaagtatttgggagctagaggcagaaggatcagaagatcaaggatttccttggctttactgcaagtcccaggctggcctgggcatatgagaccctgtcccaaaaaccactattttaaaataatatatatctaagccgggaggtgatgatacacaccttttatcccagcactcgggaggcagaaggcaggtggatctctatgagtttgaagccagtctgggctacagagtgaggtccaggacagccagggctacacagagaaaccctgtctcaaaaaaaaaaaaaaaacaaaaaaccaaaaaaccaaaaaaacaaacccccaacccctatatatatatatatatatatatcaacagtaatgatgaagaaagtaataaaggagattcatagacataagaatcctttattaaactatagtaattaaaacagttaatactagggcaggagtataaatgatgaatagcagcattaaaggaatgtataaaaatagatatgagtgggttggaaagatggctcagaggttaagagcactgactgctcttccagagggcctgagttcaattcccagcaaccacatggtggctcataaccatctgcagtgggatttgatgccctcttctggtgtgtctgaagacagcgacagtgtactcacatacatataataaataaaatcttgagagagagagagagagagagagagagagagagagagagagacagatccatttaacttgctacaacagtagatgagagattttactgtattctccaggttagggtggctagtttaaacttcctttaaaaaatgactacgcacagtagcttagtggaaccttcaggaggccctgcactcaatccccagcacagaaagggaaaaaaagagtcatgtctctcggcattctgattttagactccaaggagtgtctcctcctgccatgcccacgcctttctccactgtgatgctctgtgccctgtcacaccgttagccaaaataaacccttcttcactggggcaggggtagaggtgggagtgggggagtccataacctagtatctgataaaaggggcaaagagtgagacctgggacatgaaggcagctcacagcccaggatccacagaacacagggaaaaggcataatcaaatctagtgaatttcacaaacaggtgtgaaccctaaactgtgctgaagctccaagttccttctcttcccgcacttggttgggggaaaaccttggagcattccaaacatcccccaagaggtttgtcatttaacaaagatttgctattgccttaaattagccttaaccacgtgcccctcctcacacaagtctctcaggctacagaaaagagaataacataaaatacctaatcctttcactttaccttcaagaggcaaaataaactggcctctcccagtggggcatcaagaagtcgcccacagtgtgctagagccaaaagagtgaattgacaaagctgctcaggcatgagcaaaatggggcgaaattgcatggcaacggcgggcacattataccaaggacaaagggaagaaaaaaaaaaaaaagaacaaagcgcgtatacaggagggagatctaacccaaggaaggaggctcctcacaacagccacggtgcaactcgataccaacatgaattcagtctctacgagatgataaaaggtggaaggagatgaaagggggaggtggggcacggatcttagggaacgaataaggcagcgtgctacaaaaccagatgagaaatggcggggaactgaatagctgtggttgaaaatccgtcaccgactgagcgcaaggctgaggcagccgccgttcatgagaaagaaaaggccggacacattaatgcaattagggagacgcgaatagacacgagggatgggcacagcccagctgcaggagtagacagccgtcacagtgtggatttagagagaacatacaaagaattttcctgagatgcacaaggaacggcgtctgggagtgagaaggctgcgctgttgctgcttaccgacggcctctcacgttaatgtcagcgtgcattttagtttcagcactgaaatgtaaggatgccagttctggggaacattatggcgttccaccgagaacatttagcttcaacctaataacaagcatttagataaatccaaattaagggacatttgaaaaacatctggcttgattcttagagtgattgatagtacaacgtaaaagagaaagcccgacatgatggtacatgcttgtaatcctgtcacctgagaggctaaaacaggaggacacacacacacacacacacacacacacacacagaggatagcannnnnnnnnnnnnnnnnnnnnnnnnnnnnnnnnnnnnnnnnnnnnnnnnnnnnnnnnnnnnnnnnnnnnnnnnnnnnnnnnnnnnnnnnnnnnnnnnnnnnnnnnnnnnnnnnnnnnnnnnnnnnnnnnnnnnnnnnnnnnnnnnnnnnnnnnnnnnnnnnnnnnnnnnnnnnnnnnnnnnnnnnnnnnnnnnnnnnnnnnnnnnnnnnnnnnnnnnnnnnnnnnnnnnnnnnnnnnnnnnnnnnnnnnnnnnnnnnnnnnnnnnnnnnnnnnnnnnnnnnnnnnnnnnnnnnnnnnnnnnnnnnnnnnnnnnnnnnnnnnnnnnnnnnnnnnnnnnnnnnnnnnnnnnnnnnnnnnnnnnnnnnnnnnnnnnnnnnnnnnnnnnnnnnnnnnnnnnnnnnnnnnnnnnnnnnnnnnnnnnnnnnnnnnnnnnnnnnnnnnnnnnnnnnnnnnnnnnnnnnnnnnnnnnnnnnnnnnnnnnnnnnnnnnnnnnnnnnnnnnnnnnnnnnnnnnnnnnnnnnnnnnnnnnnnnnnnnnnnnnnnnnnnnnnnnnnnnnnnnnnnnnnnnnnnnnnnnnnnnnnnnnnnnnnnnnnnnnnnnnnnnnnnnnnnnnnnnnnnnnnnnnnnnnnnnnnnnnnnnnnnnnnnnnnnnnnnnnnnnnnnnnnnnnnnnnnnnnnnnnnnnnnnnnnnnnnnnnnnnnnnnnnnnnnnnnnnnnnnnnnnnnnnnnnnnnnnnnnnnnnnnnnnnnnnnnnnnnnnnnnnnnnnnnnnnnnnnnnnnnnnnnnnnnnnnnnnnnnnnnnnnnnnnnnnnnnnnnnnnnnnnnnnnnnnnnnnnnnnnnnnnnnnnnnnnnnnnnnnnnnnnnnnnnaagacgatggatagccctgggcgggatatggatggggaggaagagatccagctatacgtgacatcatttggacaactggaggaagttaaatgtggacatatattgtattagataaatttttctatcaccataattacagtaattttagaagatacaggccaagcattaagggtgtggcatctggatgcctgcagctcacaaaggctcaggtataaagaggggacagacagatggagcattgacattgaatccaggaggcaaggatattttgttaactttatttttcttgaaaattttctacgagttggagttttttgaaaataaaaattgaaagagccgggggtggtggcccaggtctgcagtcgcagctgctagaaagcagaggcagaatttctgcaatcgtgagttcacagctgagactcaaaaaaaaaaaaaaaaaaaaaaaaggaagaaagaaagaaagaaagaaaaaaaatcgaacatgcgtacatgcacacaactgagggccggaatatggttcagtaggtcatggtattttctacacaagcctaataatcagggtctgttccccgaattctcggtggaaggagagaaatggctccccaaagatgccctcatctctacatgtgtgccctgacaaaacatgcatatacttgcgttctctctttctctctctttctttctttctctctctctctctctctcgtgcacatgtgcacacacacagacacacacacattatcctcatcaccatctccatgatcatcacaatataaaataaatagaaagttgggtagcaatgtgctttcatagtagagcttatacttagcatctgtgaagttaaggaatccgttcccagcatgggaaaaacaacaaccacaaccacaacaaccacaacagcaagggatcattctgaggtgtccctgggtgagagacatttatttggagcttaacaatcctcatagcaacttcagattcttcttattctattaaattcaaacaaaaattagatgcaaaacctttaaaaaagggattctccgttatctctatgtgtgtgttggtcaaacattttcatctctgacaaataccggagcaaactctttttttttttttttggctttgtcttctaagtgagaaaagctacagacttgtgaacgtgggctacagcagcactcagcccaggtgaaaatgaatggtaaatgccagtcaggggaaagggtacgcagactgaaacttggtgtgaggtgcacacctgtaaccttgccccagagggacaggcagcggatctcagttcaaggttaccctcagccatgtagtaagttctaggacagtttgagaccctgaaaataaaaaataaaaaactgaaataagaaagcctagaaaagtttttcttttttcttttgtttgtttgtcttttgagacaggatttctctgtgtaacagccctagctatcccggaacttactatgtagatcagacttaacatggaactcacagagttccacctgcctctgccaccggagtgctgggattaaattaaaggtgggtgccaccaccgaggcctagataattctgacttgcgatcttcttcctggatctctcttacttctccctgttttttcaatggctgaaataaaatctctattctatcctgtccatttactcactcagccaacacatctattgatcatctaccatatgctagacatagtgtgttagactcttagttgaacaaaataaagtctgtgcccccggggcatgttttatccgtccccctccccaacatctgtggctatggcatctacaccaggaagcataggtagggacagcactaagagctcagcctgcctctcccaaggggagcctcagagacctttgggcatcctggagactgaactctgatctctcgcctgcagacgcagaatcagattgtgtacttcattcgacaagccccagttcccatcaccccagagaacttcgaggagactgtgcagtatgggacggtgcggggtgcctacatcccggctttgctccggctgctcagcggtgtctacgtcccccagatttttatgaataagtcttggcctgagagcatccggaatcattttgtttcacacctgcataggtttttggcctctctgacaggtaagcaagaggctggcgtggctggcttctccatgctggggttgtgaggcgctgggcaattcatcagtaccagcttcccccaaccccctctggcactaaggcctcacgtgtgcacaatctctaccacagatccacaccaccaactctattactaacattcatattaaaatatcaaaagtacttcttttcagcactgagatcagactggaactcaccttgttgaccctcctggccttgaactcaacagagatctgcctacttgtgcttccctagtgctaggattaaaggcatgcaccaacaggcacggctatgctgagtggctgttgcacaataaagttctagtcccagcctttaaaagactctttggagtgaaatctctctgtgcgtaccacccatatgcatgtggtacggaagtgtttaatatgtgtgcacacaaaaacccaggcgtgttgcttccacatttcctgacttgggctgagagtgtagcttagctgccagaatgcttgcttagcatggacagagccttgggttcaaaccccagcattctgtagccccaggggattgtgcacacatctgtaatcccagcactcaggaggtagaggcaggaggatcagaaatctaagtcattcttagttaccgagagtttgagagtttgaggctagcttaggatacacgagaccctccctaagaacagcagcaaatagtagaggcagatgtggtggtgaacgtctgtgattctagcactcaggaagcagccgaagtcaggaagatcagaaattcaaggggattttcgactacataagaccctttctcaaaaccaaaccaaatccaacttaaagactaaaggtttgttggcatacagggggaactgaggcaggaggcttttgagtttacggtcagtatgggctacagagatccttttttttttttttttttttttttttttaaacaagacaaggaagctgggcacaggaagtggtgcacaccattaattctagcgctctagagaagaggcaggcagatctccatgagttcaaggccagcctggtctacgtagtaagttccagaacaggcagagctacatagtgaggctcagtctcaaaaatccaaccaaccaaccaaaaaccatcaacaacaaagcaagggctggagaagtggctcagtggttaagaatacttgttgaggggctggtgagatggctcagtgggtaagagcacccaactgctcttccaaaggtcaggagttcaaatcccagcaaccacatggtggctcacaaccatccataacaagatctgactccctcttctggagtgtctgaggacagctacagtgtacttacatataataaataaataaatatttaaaaaaaaaaaaaaaaaaagaatacttgttgaccttgcaggggactcaggtttgatatccagtacccacacagcacacataagtgtttgtaactcctgttccagggtatctaatgccctcttcccatatctatgggtaccaggcacatacacagtgtacatacattcatgtaagcaaaacattcatacacattaaataagtctaaaaatactataaacaaaacaagctatttctatccagtgtctgctcttttgtctgggctgtcatataataaaacatggtctcagattcctcttcatacaaatgtgtcataatacgaagcatttcctaatgataagacctactcagggcctggtgtagtggtgctagctttaatcccagccctctggaggccagaggcatgtgggtttctctctgtgtaagtttcaggctaggttcaaacaaacagaacaacaaaaaccaaaacaataaagaagaagattttgagtacaattgaataacaaagactggtcactggggcctgaagagatgggtaggcagttaacagcactgagtgcttttccagaagactccggttcaaatcccagctcccacttggcagctcacaactgtttgtaactccaagatccaactagcaccttcacatagttatacatgtaggtaaaataccaatgcacataaaataaaggttaaaaaaagaaaaagactagttgctaaagggatgtcttggaggtagagtgtttgcttaacgtgcctgatgtcttaggtttgatccacagccctgctgaacagagccttggtcaatgctaaatacagtgttgtgaaagcttgccttctaatttagattcacttttctaacagagaacttgttcagacctgctcagacccagagctggagatcgctctgtaggcgatgggggggggaaaggcagtgggggacttgtgtgcctttcggaggacatgctgcagacagtgaaatgattctatggtaacttcttaacagatctgctgaagcttagccccttggcacctgttatctctgctctacacacccaagacgtctgagtcacagtcactcccgtgtgctctcctaaagtgcatgtgctatctttggtatctgtagggggttggttttaggactctccctccactctgtggatgttcaagccccttagaaggcggtgccacaattgcacatgtacccatgccctcccacgtccttcagatcatctccagcttatcggttgcactcaatacaatgtcaacttgacaagaggactcactcaatacagacgtaatttgtaaagaatcctggggtggggggcaggtgagatgactcggtgggtaaggggttttgctatagtgagtctgtgacacccacggctgagggacagaaccacccttctgcaggttgacacgtgctttggaagcatgagaccctctaacagcaaaacccaaggcagccgagttatttttgaattgtggatgtgaagttgggaagcctatggatatgcagagttggctgtacttcccaccccccccaactgatcaattgtaatttatgcagaggcagccaagctcacccttggaattctcctgttcctttcttagatactcgctacaagctggagggtcacacggtactgtacatccctgcagaggccgtacagatggaccctgaggtggtggtaaaggacaaagagctggtacagcggctagagagtgagtggcaggcattgccaagtgtctgggtccaaggggtggggacggggacggcagctccagctgctgagagaggagctggtgacacaactggggagcagaaaaggaaacacaagagcccccccccccaacccccgcagcctccatgatccactggacgaggcagatcaaggaagtgctgagtgcccaggagtctgtggagaccggagagaacttaggccctttggaggagatcgagttctggcacaatcgctgcatggacctgtccagcatcagcaagcagctggtgaagaagggtgtgaaacacatcgagtccatcctgtttctggccaagtcatcctacttgacgcccttcaggaagctggcccagcagatccaggttgagtggatccggggccctggggcttatcaaaacatgggtagtggctggggtgggggcaagaggaggaagccaggcaactaatcacagtgcacagactggccgggcactgtgggcttagagaggacacgagtcgtgcttgaaggtctccaaggagcttgacgtttaggtaggaagatatccaattagtccccgaggagatggtggtcccttcagtgagctcggcactccagcgcagctgagaaaatagagtttaggtaaaagagggcttaaagattgcacggagctgaggataagcttgtgtaattcagtcaggagagtttcaaaacaaacctgtaaaaagtgcatttcctgtgactggctgactatgctggtgctgggtcccccaggaggtgcctgctcttccttccccaggggatgggtggaggggtgggatttcaaccagacattgagggaattgagctgtaatgagccgggcaagcctaaaaccctcattgagacagcaaggggaccgggtgaccttagtggatgtgggaggggagtgacacccaggcagttagccaacaactctgaatatccactttgtacagagttcttcatttcattggaacaggcaccagccctgggtttagggaattcccagcctgaagccttcataggaagcagcacagaagagctggggacagtggcaaagtgcttgccctgcatgcacgagaccccggggtcaatttccacatggaataaactgtagcatgcactggtggaggctcagaaattcaaggtcatcctcagctacatagttaatttgatactagcctagactatgtgagaccccatctcaaaaaaaaaaaaacccaaaacaaaaaaccaaaacacaagtggagggcttgagagatggctgagaggtcaagagtattagatcctcttgcacgggacccgggttcagttcccagcactcacatggccgctcagaaccatctataactacagttccagaagatccaacgctctcttctagcctcctaaggcatgtcatatcaaatataggcaaacatgcaggcaaaacacccacacacataaaaataactattttttaaaagcaagtgaatatgcaaacactggtcctgaaatgataattaatggagaggagttattgggggaggttgcccggaagatgaagacagatggaaagctgaacctgtttttgtttgtttgtttgtttgttttttggggtgtgtgtatgtgtggtatacacatgttcatgtgggtgtgtatacatgtgtatgtgtggtttatacacatgttcatgtgggggtgtgcacatgtatgtgtggtctatgcacatgttcatgttggcgtatgcacatgtgtgtgtgtgtggtctatacacatgttcatgtgggggtgtgcacattgtgtgtgtgtgtgtggtctatatacatgttcatgtgggggtgtgcacatgtgtgtggtctatgcacatgttcatgtgggggtgtgcacatgtgtgtgtgggctatgcacatgttcatgagcgggcgtgcacatgtgcagaccagaggagatcactggctatcatcctcaatcgttcttcactctgttttattttttatttttgttttttagagacaaaggtttctctgtgtagctctggatgtcctggaactctctctgtagatgcagtctgtcctcaaactcagagatccccctgcctctggctcctgagtgctgggaacttaatttaaaaaaaaaaatcgtttattttatgtgcatgggtgttttgcctgaatgtctgtctaccacatgcatgcagtgctcaaggaagccagaagaaggcatggggtcccacagaactggagttacggatggttgtgagctgtcatgtggccgtgggaacagaacctataggtcctctacaagagtagccagtgcttctaactgctgagcagtctctccaactccatgttatatgttagtcaggtctctcgctgatccacacctattgacctagtgtcactggtcagccagcaccagggacctgccttgtcttttcccaccaagccagggctgggattagggacacaggccactgtgcacagcttttacatggatgctgggaatctgaattcaggtcctcatgtttgcacaacagcaagccctttatcaactgggccctctttccaggcccctaaatctgtttctcccacatggataatagtactcctggtttctctttatggataggatggctctcgacaagctcagtccaacctgactttcttgtccatcctgagggaaccctaccaggagttggccttcatgaagcctaaggacatctctgagaagctcccgaagctgatcagcctcatccgaatcatctgggtcaactccccccactacaacactcgggaaaggctgacggcgctgttccggaaggtgtgcggatgcagagcataggggtggggacggggtcccgggcagacgtgctgtaggaaggcaccagtactggcctgccttttagactttagagatgggcctggcttctgttttcacagaagaacctgaagcaggatgcgggtctcagagagaaagagacagtgagctcaggaagggtagcaaggatagacttgagagggggtgccgcttctcttttttcaaaatggagtttggcagtggagtatgggaaggttgattcaggaagaaactcggttccctgagcagcatgtcaccaagaatgatcaagacagaatttgtacaggagacaaaagggcggtagaggggttgctggagccgggtggtcagagcagtgtgactatagagctggtctaagggcagagcaaagattatgacgaggggcatcccacggagtgtgcctggaggaacgagatggccctcaggagcccaagacctgagcagagttacagaggtcagaaaatggagtggtgggaagaaggcagaatggaggacgttgctctctctgcagatgagcaacgagatcatccgtttatgctgtcactccatctctttggaccgaatctttgagggctatgtcaattctagcaaggaggacctggaaggctgcatttcctgttgtcaggcttggaaagagcactacctgcgtgccgtacagatgcacacccagtaggatggcccctaagatggactgcccctaacatcatttatagaacacccttgacactgtggcgcaggagagactctgactgtttgcatgccttccccttttgtggactatattttttttctagatctgggtgggagtctcttaccccaccccccaccccctcagctaagggtctgtttgaatgcagatgttctggctcctagccctgcagcctcctcctggcctcttccaggagcctcccacgatcgtcacgatcgatcgtatggtctcagaggccaccttctagaagttgggactgtgtcctctgatgttctgctcacctctggtacctcctctcggggttcaaggaaactactcctcagggtctcctttctaaacccaggctcacacagtgaagttttgccagggcagagctcgtcttcggtgtcttggctttggattcagcccatcttctcccccacacaggttctccaatcggggctgggttctggaccagacgagcatatttgctcaagtagatgcctttgtgcagcgctgcaaagaccttattgaggtaggaaagactgccagggtgggaaaatctaagctaatagcagacccttgagtcccttatgagagccaagcatgtggggctgaggttccgcttaagagtctaaagcaggaagttggcttattggctctccctgcataattgtgggtcctccacccattgcctctttttttcttggctcttgccaggcatctcacatttcaatctgcagcccaaattcaccccagtgttctcccccatccagaggactctctagttttcatagacatttgaaggtaaatcagagaactcagggtgcctgggctctcagcaggagccttcaccctgacctctttttaggtatgcgaatgtcagtaccactttgcccgttgggaagacggcaagcaaggtccccttccatgcttcttcggtgcccaggggccacagatcacacgaaacttgctagaaatcgaggacatctttcataaaaatctgcaaacgctgcgagccgtgcgtggcggcatcctggatgttaagaacacctcttggcacgaagactacaacaagtgagggactcgggctgcaaagggggccaggctgggaggcgccttgttcagaggagaccacggaaatgccagggtttggggctgaagggggaggaagattgcaagttgaaggctgtggggacagcctcagggtgggaagggaagcgagagcaacagggagggaagtggttgtttgggttctgggttgcagagtggatgcctgtgcctccttatccccaagtctaaggactctttcctagcactgtctggaggctttcgggatgcaaagcatgcctgagggaagttgatgctcagggcattggggatgctgtcgggaggcaggccagggcactgactcttccctgtgcccttctgaccctgcagattccgtggtggtatcaaggacctggaggtgatgacccagaatctgattacctcggcctttgagttggtccgggacgtagagcacggagtgctgctcttggacactttccacaggctggccactcgggaggtgcgacacccccacctcgttcagccgacttttcttatttccctcgttccgattccctggcttccacatctgcaaagagtgtgcctgctgccgtgtgccgtgtgggggtgagaggttcttctgggatgagagaccaagggagccctagccccaaggagcgtgtccccttgttgcttaggccatcatgcgaacctatgagaaaaaggctgtcgacctctacatgctgttcaatagtgagttagccctggtgaaccgggagctgaacaagaaatggccatatctggagccatacatgactcagtactctggacaggcccactgggtgcggatccttcggcgacgcatagacagagtcatgaacgtaagtgcccggcctcttctgaactgtctttggtgaacaccaagtgtacggactgtgtacagcctgggacgggcagggtgagttcagacagcatccttaggccagtcctcaggcaagccatgatttggtttgcagagctggcaggcgtggtgagtggcacaaaggtcattttaacattctgtatgaaggtagggaggagacataaggttgtcatctgggaagtcagagtaacaggacagggatgtgacctggaggtccagagacctgggccagcagaacctgcgctctctggaaaaacaggaacaaggagcaaggagagggcaggacttttctcttgttgctgagtactgagctcaggccaacctgagctatccagtgagaacctgtcagtactctagctttggggtgcaggtaggggtgaaagctggtggaattccttacctgctgtccttgatttattctgagagaaagtgagggaggctgcagatgactgggctgaggtgggcccggggtgccctgaactagaagccctcaggccctgtgtttctcctccagctgttgtcctgggggtgctcacattgcctctccttgtgcgcccaccttcacagtgtggcgtcctccctctgtagcacagcctcagcctccttccaggggctgaggggtgagcaggtacctgtgtcgcaggtctgtataaatgagcttcccctttgtctcccccacccctacccagtgcctttccggagcccacttcctgccccatattgggactggcgaggagagcatacatacctatcagcagatggctcaagccattgatgaaatggttcgaaaaaccttccaagagtggacagcgacgctggacaaggactgcattcggcgactggacatgtcactgttacgaattagccaggagaaagtgggcatgctggatgtcaactttgacaagtacaggacccaccctggcacctccccctgtccttggtgctagtctcctctcactctcccaagaccttaactcccatcttgggtcccctcttccatccctatctttcctgatgtctgctttaattgaggctggttttcaccatgtagttcaggctggctttgaactagtgatctttggcctcagtatggtgctagaattacagctggactccaccatactcagatgctgtcactgcttcctcttcctcttcctcctcctcctcttcttcctcttctctctcctctttctttttcccccttgagctagggtttctctgtgtagccctggctgttctggacctcactatgtagaccaggctggctacagaatcagatccaccacttctgcctcccctcccaagtgctgggattaaaggcatgcaccactgccacccgatagctatcgcttcttaaatttagtttttccgagattgggactggggtcttaaattcagtcctgagtactgaaaaaaaattagtttttaccgcttatttaaagtaagcaagcaagcagactacaactatgatttttaacaattcaccaatgtactaaactagtgatgtcactgttccggcactagatggcggtgacagctcagctaagtcatctaactctgctcgctagtctgagctttcctaagacagcactctctcccacagctttgaaatgtcattttcacattgttcttttaaaaaggcaactagttcatcaattattaagaatatacagtgagttccaggtgtggtggcccattcttagtatcctagtacaggaagctgaggcaggagagttttgagttgaagaccagcctgggccgcattccaaagcaaaacaaaataaacccccaaaccagacaaacagtgggcacttcgtatgcgccaggaactgatgcagggtgtccctgtcctcaaggggccatgttgtcattctctcggccaaggtttactcaagagcagaaaaggagaaagccggggtggtgaggtgtctgtttcaggggcgtgaatcctctggtgcctcgtcttcctaatcaggagataagtttctatgtggtaggctgggctctcccttgccatcacctgtgtgccctgtggtgagagcccattccggagctcccaggccattgttctagggttggccttagctcataacatctgtatttgctggacaagggtgcagaagggagatggaggtccagggacagatgggactatgttctggacaaccgaaggtgcctgaccaggaagagctgacacacaggaagtggaagaaccaagatggagaggcagcaggaggggtgaggggcagactttagtggggggcgggctttagtgggggttgggggtgcggacactagaagccacacagatgagcagttaaggaacgaagtgtaggaagatgaggtttgggacaagtagtcggggagaggtgggcatcagctccggtgaggttctctggttttgaagctttggcacaaggtagggccaaaagagccataaaattgcctcttatggctagagagatggctcagcagagaacctgggtttggttcccagcacccacgtggtagctcacaaacatctgtaattccagttcccggggacatgacaccttcttctgatctctattggtaccaggtactcacatgatgtacacatatgcaggcaaaacacttacacacatgaaatacaatagataagtcttgcctggcatggtggtgcgtgtctctaatctggtggtgcacctgggaggcagaagtaagtgtttctctatgagttccaggtcagcatggtctacacagggagttacagggcaggcaaatcatatagtaagaccctgtctcaaaaacaaacaaaaagacaaacccaaaaactcgaagttttaaatggcctcttactgatttgagattctgaaaaagaaggaacattaggcccagattatattataactggttatctacatagtatagaagcagattcacagctagttatatatttatatagacaaacggtttaattggttataacatttgcaggctcgtaatagggctgaataccactccccacccctactcctcctccagacagggctcttctgggtaacagctctgactgtcctggaacttgctttgtagaccaggctggtgtgaaactcatggaaatccacctgcttccgcttcccaaacactgggactaagggtgtgtggcaccaccacccagcctagggctggatatccccaaaggtgctatgctagagagtctccctcgtggacaaccgtgggctaacgtgggtgtgagcgtacttggccactctgtcctttctccatcaaatatgagagcagtgtgtagagccagggagacggctctaaaaagtgatgacctcagctccatcccttgaactcaagtggtgggaagagagctgactcccgaaaattgtcctctgacctacacacacacacacacacacacacacacacagacagaggcacacacaggcacacatgcactcacacggacactaaataaataagcctataaatctgaaagtttacattcataatgccatcaaagctgtgaacaaaaataagggattgcatttcaatcatgacattttcctgtcttaagttgatcatgtcagagatttggccccacgctgtacagtcagtgtcttctgcacggctcggctttctagaaggtggcatgagatgcctgtgtgattaggacagatgactgctttagtcatctgctagaaacaggcttttccctcccctgcagcttgtttgtttgtttgtttgtttgtttgcactgcgtatgcagaggtcagaggacaatttgtgggtgtcaggatgttccttgtagtctgtgggtcccagagttggggctcagtggtcaggctgctggcaaggacctttacagctgagctgactccctgaccctgcctgaaatgccttttgcattctctttatgttggtgtttttctctctgtctctttcacacacacacacatacacacacacacatacacacacacacacacacacacatacacacacacacatacacacacacacatacacacacacacacacacacagccttgggacatcatttatgacctagatttatctgaaagccagacaatagctaagcatttcttccaaatagaaggtggttgtgtttctgtccattggcagctgttttctggagaaatataaggtgcctaacaatacatttggtgattttagggcaaaaactgcctcaactcagtaaataatagataagaaagaaaagtctgagctgattaaacccataaaaaaactggagacagtttgactccccacactgattagcaccgctgggagtgcagatagctttatcaggcttacccttcatgttaaggtctggttcgaccttgaagcatacttttgaaatgtccctgacagtcctcagaattagtcagaattatctgactgtcctgggagcctaccaggccctaataggatttatattaccccacaagggcctttccctccatatgtcccaaatatttgaactctgaagcccaaatgggcttttagcacattttctggccagagcagctcagtagattgcacttaatgtgttccaggtgtcccctgcgcttggttgaaagagctgagttatcagccttgtggaccggaggggcggaacttccccagagcaggacagagctctggtgcctgctcaccgttgttgttcccagtgtgtccctctcctcctccttcctcattggcaccagcaccgtgtgtgcactctgggctgtcagtactgccagcctgagtgaccttgttttgctatctttatttcacatttggggctctattataaaacagctttaaaaaaaacatcatcccccaaatggagttggaaagaagttaggtttgtcaatcaaatttgtgctctggaaatttattgacaaaattctgtcaagactgaacatcatttttaaaaagtttaaaaaaacaaaaccaaaccaaaacaaaaaaagccgtgttctttagaacaacctcaggagatactgtccaaattcattctgcggactgacaaaattcgatcatttaccttcaagttatttttgaaaatcctgtcaagatgagaaaaattcagagctattttggtgtgttgttggccagtattccttccccgccgagcttgtccggatagctgtgaatagagacaagttcaacctctccagtttgaaaacatgggagaatgtgtttgactacctgaaatggatctgtgtattcaagccctccacgctctctgatggctatagcaggttttggtgaaactgaccttcggcgcgggtggctactgtgtgacctgcccagccgtgtgcttttgtgttgatgcggtggctcccttcagtagaagcctgggatattcctgtgtggtttgacctctcaaaagggaaagactctactcttagctttcaccacagtgtattgttagaacgattctgttgatctcctactctgtttatttcctcttttttcttttgagacgtcctcaaactctttagcctacgctgtcctagaacttggcggcactcctcctacctcagcctcctgagtgttgggaatgcgatcacataacctcaagcctggctgagcctaatcctcagactgaacttctcatgagtatggataaataagaaggaaaagccgctcctgggttaacaccacccaaggtactgggcgtccatcacggtgttgaaaccacctggataaggcggctgaggtacctttttccttgcttgcatgatatttttgacgttagtaattaatgtttgtttttgttagcacatggttcactgccgttaattcctacaaaccaactaatagaatcccttcagataatatttcccctcaccatctaaggtgccgcacatgtcgtggcctcaccttctctcacgcagcttcatcagtgaatgaaattgtttcgagatctgcttcagaaagtcacatggaatttccccgagtctcttttttatttgtctgtttgacttttttatgccaggcagtggtggtgcacgcctttaattccagcacttgggaggcagaggcaggcagatttctgagttcaaagccagcctggtctacaaagtgagttccaggacagccaggactacacagagaaaccacatctcaaaaaacaaataaacaaacagaaatatttatttattaaggtgtatttatttatatgaatacaccgtagctgtcctcagacacaccagaagagggcatctgagcccattacagatggttgtgagccaccatgtggttgctgggaattgaactcaggatctctggaagagtagccagtcctaacctctgagtcatctctccaacccctatttatttattttatatataaagtaatgagtatactgtggctgtctccagacacaccagaagaggacatcagtcgcttttactgatgcttgtgagtcaccatgtggttcctgggacttgaactcaggacttttgaaagagcaggtagtgctcttaatcgctaagccacctctccagcctttctgtttgacttttaaagtgtcctaccactgaactccaacctcagccctctcgtcatgtattagttagttagttagttagttagttaatcaatcaatcattttctctgacttcctcttcgttggtttccatctttgttttggtcaagcgcatcctttggtagtcttcaggtgatgcacgggagctgcagtctttgagttcatgtacaaaactggcagccactcttttccgccttcatgttagtacacttgcctaggattacagttctaggttgaaaacaatttttcctgatttctgcctttatctcctacttcaaagacattcattaaatatctagtgagctgggcgtggtggcgcacgcctttaatcccagcacttgggaggcagaggcaggcgaatttctgagttcgaggccagcctggtctacagagtgagtttcaggacagccagggttacacagagaaactctgtcttgaaaaagcaaaaaacaaaaaacatctggtgcccactgttgatttgtagttcagaggctcagagggggcttattcattttgaagaaattttatagctttataaataatgcctgttagtgacaatgttccgtgtttaaaaaactcagagacagaaaagcagtttatcttctgcagtttcttaaaatataaattgcaaataaataagcatttgaaatagtttcattctttaaattattctccttttaaagtgaaatagaactctctagagagtttaggatatattatcttttatatcattcattgactgtacaatggataaaaattatatttgtatgtatatatgtatatacatatatataatatctatgtgtacatatgtgtgtgtttgtgtataatgtgtgtgtggtttaatatgtgtgcatttgtttataatgtgtgtataatatatgtgtgcttatatacacatatatgtgtgtctttatatatgtatatatatgtgtgtgtgtatgtgtgtataaagttttgagacagcaccttgtgtgtacaggcaagatggccctgaatttctttttttttaatgtatttatttattatatgtaagtacactgtagctgtcttcagacactccagaagagggcgtcagatctcattacgggtggttgtgagccaccatgtggttgctgggatttgaactcaggaccttcagaagaacagtcagtgctcttaactgctgagccatctctccagcccagccttgaattctttatgttactaaggacgaccttaatgccctgatccctctgcctgtaccatgcatgtgctaggattagaagtgtctgtcgcgctgggcggtggtggcacatgcctttaatcccagcactggggaggcagaggcaggcagatttctgggttcgaggccagcctggtctacaaagtgagtgccaggacagccagggctatacagagaaaccctgtctcaaaaaaccaaaaaaaagaaagaaagaaagaaagaagtgtctgtcaccaggttgcttaattggtcttaaatccatttgaaatttactgtggcataaggaagatgttatagattcaacttgtgttttttatatttttaaatagattgaaagtaagttgaactaatcttgataatttattttctacactgctggtgggtttgtacatgcaaggcaagcacactgccactagctagacccagacatttagtgagttgatatatttataataataataaaaaagtctcccagcaaatctctatttttagattcactcttctggcttattcatgtgcaagaaccaaactgttttaattactggcctcatttctctctcttcttctctctctctctgtctctctctcttagccaattttgatatgtatttctcataagaattttttaaacaatttattttgttctcagaatatttttattagaatatggattaggttaaatttatagcttaggtttaggagagtgaaaatctctatgattttgagtatttttgtacaaagatggcattctccttccagttggtgtccttttgctcatgagtcacttttcagcgtgtacaagtcacttctgttacatcactttccttcagttgcctttgcccttttcctccgtgacaaggtcggtcttattacaatttctatagcaaagaacttttgtcctctgcacccaaatcagaatagattatctcagagctgacattaaattaataaaccatatattttgagtaaaattatccaaaaatacatcttcaataattatagactttacttaatttccgtatataagagccagacatccagacatatactagttttttctagggtcggagggcacacctgcaatcccagctcttggaaggtggaagcaggaggatcgggagttcaaggttagtctcggcttcatagtgagttccaggccagctgaggcttcttgagacaccatttcaaaaacaacaaaacaaacccaaactgctggttttcaacaaaattcatgctaacaacactgtttaagccatactgacttcttagagactgagtgcccgagattccatgttggtctcagccaatgcttctcggagttaagaacatgtcattctgaagaaggagagggtcctttgaggcagcctctctgtctggatgccagtcaggaatatgtcaaatggtgtgtgtgtgtgtgtgtgtgtgtgtgtgtgtgtgtgtgtgtgtgttgtatgtgtgtgtttgtgtgcatgtgtgcacacgcatctgagccaaaggggagcccagtcccagaaataatttagtagcaaatatatacagcttgctgctgtccctggtcatttgacctgactgacccagttttccagtgcttataacctactttcacatggattttgttgttgttattggcgctatttgtttgtttgttttcaagacagggtttctctgcatagccctgagtgctagaatgatctctgtagaccaggctggccttgaactcacagagatccacttgtctctgcctcctcagtgctgggattgaaggcatgcatgaccactgccagtcttaagttattattttatgtgtgtaagtatttgtatgtatgtcagaaggtcaagaagatatgggatcccctggaattggagttacagagggttgttagctgccatgtgggtgctcagaatcgaacctgggtcctctgcaagagcagctggttctcttaagcactgagccatctctgtttgctctaagaatatgtttgattataaagtatagcatgcacagagagacatacttagcctgcatgttcagattaacaaatagctacataaagcactcgtggcctgccatgccgctacagtggagaacattacccgaagtctggaagtcaccgctgagcagtgcagccagtaagagctggtaatgatgtaaacatgttaggtgtttgtataagaactgacattctgagttgaacatggtgtcatatgcctttaatcccagcgctgaggaggcaggggcaggcagatctgggttcaaggccagtctggcctacagagtgagttccaggacagccaggattctgtttttgcttgttagttttgttttgtttttaaagatttattttatttatatgagtacactgtagctgtcttcagacacaccagaagagggcatcggatctcattacaggtggttgtgagatactatgtggttgctgagaattgaactcaggacctctggaagtgcttttaaccgctgagccatctctccagccctaggactctgtctttaaaaaaaaaaaattgactttgttggtctatgttgaaaatttagttatatgaggtccatattcctacagggtgataaccatggctctagccgtttaagatggaatatgtcttctaattttaggcaaatttctattgccatttatcatgacattggagttacatatctccttggatagaactgaatttctgagttttgctttacaaaaacaaaagttagttgttagtggtgggtagggtgttggaaagttgagatcgtgggaggacatgcgtgtgtcctttggaccctgcatacatgtgggcagtgcttttccttggtcgcttcccgtgtgtgccagcttcctgtttgctgttcctcctgggatggctctggtctggggtgatcctgtgttttggaggctgctctcccctgagacaggagctgcaagtgtgacagccatccctcttgtccgtggacacactgagctgggggtgcctgtgggacaagctggggagacctgggaaccgatccgctttcagaggcaacagaagccatgggtttgggtgagtcaccctgggagagggactggaaatgcagaacctttaggggtccccacttaagagggctgtggaggcagcaaatcctttcctgcactctagcaggatcccaagacaccccagagaggacaatcccctctgaaaagaagatcaaaggagagaacctggggctgagagaaaggagagaaggctgggtccaaggaaagtggagtattccccataacatcaaaacctccagagaggggctggagaagtggctgagtagttgagagtgctggctgctcttcctgagaacctgagttccattcccagcacccatatggcgtctcacaaccgtctgtaactatagttctaggggatccaatgccgtcttccagcctcccagaagtggtacgtagatatcacgcaagtaaaacaggcagacacacaaaataaaattaaacagtcattttaaaaagcctgtgcagaagtcagggaatataaggccaagaagccatgtctcgttggacacagctgtgggaactcttagaggaaagggtggagtggggaggcagggctggaagtgaaaggggcttccagaacagttcctgaaagaggcaggctctgagggggcggggcagagtgcaggacctgtaggacacaggagtcaggggagaaggtggtttttattatattatcttttgagattgtggaattttggccatattccaatggtaggaaggaactactgtgttgagggagtagtgggtgtggtagagcttgagggtgtgtctgagggaggactgggttgcaggacagagccccagggagcattagtacaggtaggcgggactctgaggtcataaccctgaagggagcccagccccgagacaggtcagttcacagtctgtagcaggaagcagaggcagctctcacctgacgattttctgctgtggagagaacactagctttgagaggagtggggtttacacagtgattgaagagatatataattgtcagagtttttttttttcccattctgtagactgctgctttgctcaaaccatgctgtctattgctgatatggaaggttttttttttgttttggtttttggtttgtttgtttttcgagacagggtttctctgtgtagccttggctgtcctggaactcactctgtagaccaggctggtctcgaactcagaaatccacctgcctctgcctccctagtgctgggattaaaggcgtgcgccaccactgcccggctcaaaggtttttattttaatgaggtccccattattaatcgttgatcttagtgactttggtattggtgtcctgttcagaaaagcctttcttgagttcaagcctatcatgtactttctattctgtcagattcagggtatctgatcttaggttgaccagatttggagttgacttttgtgcgggatgtatagatacaaatctgttttcattcttctacctacagccatctgactagactagcaccgttgttgaagatgctcttttctccagtgtgggtttgttgttgtttgtttttcttactaaaaatcagctgtcagccagatgtggaggcagcaatgctcctttaattcttgagagacagaggcaggtggagctttgagttcaaggccggcctggtctacatagtaagttctaggacagccagggttacaccaagaaacctgtctcatacaaataaaaacaaaccaatcagctgtctgtaggtgtttggagttatgtccaggtcttcagttttattccgtgggtcaatttgtctgttctcatgcagatatcacagtgtgttttgttaggatcgctctgtgatacaactcaagctctggagatctggaggaaggagtaagagagtaactgggaaggacacaggatgaagcctgaagaggcaggccagctgcttggactaatctgtgatctttatcagcatcactcagctgcagtcacacgactcagcctggaggatgatagatttcacctacaccccaccccctggcctggaacctgagtgtacatcaggtctgcctcaaacttgcttcaatatgtctgcctttgcctcccgcgtgctgggattaaaagcaggcactaacagacctggcttgtgcaggaattcttgtgagatgtttagactaaagaacaagagtggggactggcacacacacacacacacacacaaaaagtggttgagctgcggggctgggactggaggatgttgctcagcgcagttgagagagggtattcgtggagccttgcttccattcccagcatagacaacaaacaaaaaccatgaaataaaggacagcctgtggaggaagtgagcggggaggaaataagtgttgtcgcctgaaggattttgtgaagtcagagagcaggtggtttgtataatcttgaagcagctgggggcagacagctttggacttgaggaagggtccctgggtgtggcagggcagggcagggcagggcagatggaagagtcaaggatgctgggaattgggctgcacacccagcattcccttcactacacaatcaatgtaaaattgataacgggacactttctattttttctctgtgggtgctcttctctacctacgcctccgagtcctccctttttcctgtcttctgagaggtctcagtccactttgccttgttcttatctggatttctgagtgtttctgcggtcattttgaactttgactgtgaagggtagaagcccaaaccaaacacgagacaagaagagaacaaagaatgtgcactgagggatgatgggaaacagcagagctgtcaccaatgcactcagagaaatgagaatccgtaagacaaagtggggtgctgtgggagtggacaccagcatcgctctcaaagctgaatgccgtgctgtgtgtctgcgatctcagcactcgcactcgggagatgggggctggactatcaggagttcagggtcatcctgggtggcctaagatcctctcaaaacactcaagcaagcaaacaagagcccttgcgtgttagaaaaagaatgtaaagactccttccacgtcgtattcccattcaactggtaggaaaggatctggaagctgattggaagcttgggaaggagtgggcagggcttgtcaacagtaaatgttgttgcctgtccatggggcccacgacttgagtattcccaaagtcttcattcttagacatttccccccaggttggtaagaggccacagaaaggaatcttccaaatggggtcctttcctggtgtactgcacgccctcacatacatactgctgtctgctgatagcatggatctctcggtgagcaagactgctagggtcttaaccctgagcttgtgaagggctgtgtacatcccatgcactctcagtatactaccctgcttcctggccctggggtccccagtcagggtcatctcctacttgtcattgtgctgtcctcatcagccaacaaggcttcagccggttgctgtcgccagagagagacccctgctctatagtcagggaaggacagagagaagccgttgcttgaattctccactggtcttcctgtttgaatcccactttcaaagttccttctgttcgggctccttgaacctgcagtcccgtccccccccccccccccaggctcttgggctgtggctcttgccaacttaggagtccccttctggtcctgacccaggtcatctactcttcaatttcctggacttaaactgttttcgacttgtacctgtgggcatttgccccagaaacccagaaattccaaagcttctgtgctcatggttttgggaaggagcaaacaggactctgtccagtctccctctgccacctggaaggcctatttcatgtctgtcaaaacatcccttgtgtgccttgcccccaatcctctctgtgctgctggcagtgccctgagccactctgctttctcctcaggacactcctgattctctttgcggagattgactactgggagcggctgctgtttgagacaccgcactacgtgatgaacgtggctgaacgcgccgaggacctgcgcattctccgggagaacctgctccttgttgctcgagactataacaggtaggcaggcctccatccgcatcccagccttgagttcactgcagctgcagggcaacccagtctcttcctgaggctttccatcctgaaaaaatggcttcccaccaggcggtggtggcacacgccttcaatcccagcacttgggaggcagaggcaggtggatttctgagtttgaggccagcctggtctacaaagtgagttccaggacagtcagggctatacagagaaaccctgtctcaaaaaaaaaaaaaaaaaaaaaaaaaggcttcccatttcctgctcttacatccccgaagccagttctatccctttaaagccatggggtggcttagaagtaacggaatccattgctcacagttctgagagctctggaggttcaagatcaaggtctgggtggatccagtgtcaggtgaagttctctgcctcctggtttctaaatgaccactctcacagtgtcctccgtagcccagtgagacaggagctgtataaggcctcttactcaagataccaaccccattcaagacagcgtcacccttcatggtcgaaccagctcctagcacccgtgataccatagcagaagctaaagatttttttttcttttttcttttttttggtttttcgagacagggtttctctgtatagccttggctgtcctggaactcactctgtagaccaggctggcctcgaactcagaaatctgcctgtctctgcctcccgagtgctgggattaaaggcgtgcgccaccacgcctggcaaagctaaagattttaacaggcagattttgggaagacaatcatacaggtctttctcacctcagtggaagcccaaggggatggaaacatgtagttttgtctgaatgtctagaaaggctgtgttcaatgtggtagccgtcagctgcacgtaggtattcccatttaaattgcagaattaaaaaattccccactggcacacgccatgtttcaagctctccttgactaacattggacagcacacttagcatttgtatttacttattcagtgtgtgtgggtgttctctcggtgcctggtgcccgggaggccggaagagatcagagttacagatggtttgtgaatcactatcatggtaggggcaaggaactgaaccagagtccttagcaaaaacaaacgctcttaactgctgagccatctctccagccctggtgtgcaagtggcgcccagaggacaacatgtggcagtcggttctctccttccactatgtgggccccaggaattgaacaagggtcatccaacttaacggcaagtccctctaaccactgggccaccccaccagtccctggccagcacactgtatataacacatgtactctcacagtttccttagggagctccaggctaggagcctgccaagtttcctggcacgaggagacgccttcgcagtttcctctcccagccacccgtcttccctcgttcacaggattattgccatgctgtccccagacgagcaggccctgttcaaagagcggatccggttcctggataagaagatccaccctggactgaagaagctgaattgggccctgaagggggccagtgccttcttcatcaccgagtgccgcatgcatgccagcaaggtaggccatggccaccagacactgaaggtctcacacacgggtaatcaacgccccggtcttgggtgatggaggaggccccaggaagtattgcaaaataaatgaaaactgctgggggaggacgccctcctccctaacatttggtgttaggaattgatcccgatgtcttgtcttgtcttgtgcatgctaggcaagtgttttatcaatgaaggggagggatttttttttttttttaacttttttaatgttggaaactctggcagagtctaagtgggggagtagaatcaggtccatctaaggtgcccccatggttcaagggggacatgtgtcatagaatttgccacccgtgaccccaggtgcagatgattgtgaacgacttcaaggcctccaccctgaccatcggctggaaggcccaggagatgtcggaactgctgctggtgcacatcactggcaagcaggtgtacagggacctggagttcgaggaggcccagagagagcaccggatggccgcacagcaaaagctggtgaagctgcaccaagatgtggtgaacatcatgaccaactcctacgaagtgttcaagaacgatggccccgaggtaggcatcccgtgaccaggcttctatggcagggaaaacgcgtgtacaccccccttccatgctcctgtggccctttcactaattgcatttttcaaatattcggtgctggtcccacattcagctcaccttcagtgtttcagtgtccttctggcagcatccaagatcttacctctctttccttaaagatttatttatttttatgtttatgggtgtttcacctgcacataagtacaccatgtgtgtgcctgttgcactcagaggctggaggaaagcatcaggccccctggaactggagtgaaagatggttagaagctgccttgtgggtgctgggaaccgaacctggttcctctgcaagaacagctagtgctctaaccactgggcggccccacccaacctggtcctgcatttctgtagctgtctttctcttgttcccattggcccatgctcatttcccaggccctgtgctggtctctccagaggagcctcttcctctcttcctctgcccccagattcagcagcagtggttgctctacaccatacggctggatcacatgatggaggacgccctgcgcctgaacgtgaagtggtcactgctggagctttccaaggccatcaacggggatggaaagaccactccaaacccgctcttcagggtccttgtcattttacagaatgatgtgcggggaggtgggtcacaggtaaggctgcccagcctctgacacctcaaaaactctcataaccccagtcctcagtttcttctaattttttaaaattaatttttaaaaattaaaatataatcacaatatttctccactttattcttctcagtgccttccatgttcccagtttgctctctctcaaattcatgacccctttaactattatatgtgtgtgtgtatgtgtatatataatacatatataaacaaactcagcaggttatatatatataatacaatatatatgtatatttacatattataaatagtctgtttagtgttagggcagaccccttggtattagataaccaattgaggggctctctttttgttttgttttgtttttttgtttttttcaagacagggtttctctgtgtagccctggctgtcctggaactcactttgtagaccaggctggcctcgaactcagaaatctgcctgcctctgcctcccgagtgctgggattaaaggcgtgcgccaccacgcccggcatggctctttcttttaaagttacttacttttcttatgtatgtgagtacatgttagacccaccagaagtgggcatcaggttgctgggaattgaactcaggacctctggaagaacagtcagtgctcttaactgctgagttcctttttaaaatatgtatgggtgtgggtgttttgcttgcgtgtctgtctgtcatgtatgtcatgtatgtgggtgttttgcttgcgtgtctgtctgtcatgtatgtcatgtatgtgggtgttttgcttgcgtgtctgtctgtgtgcgtgatgtgtgtagaggccagagaagggagtgaatcccttagaattggagttacagatggttgtgagccaccacgtgggtactaggaattgaacccagactcctctggaagagcagccagtgctcttagccatnnnnnnnnnnnnnnnnnnnnaccacgcccggcatggctctttcttttaaagttacttacttttcttatgtatgtgagtacatgttagacccaccagaagtgggcatcaggttgctgggaattgaactcaggacctctggaagaacagtcagtgctcttaactgctgagttcctttttaaaatatgtatgggtgtgggtgttttgcttgcgtgtctgtctgtcatgtatgtcatgtatgtgggtgttttgcttgcgtgtctgtctgtcatgtatgtcatgtatgtgggtgttttgcttgcgtgtctgtctgtcatgtatgtcatgtatgtgggtgttttgcttgcgtgtctgtctgtcatgtatgtcatgtatgtgggtgttttgcttgcgtgtctgtctgtgtgcgtgatgtgtgtagaggccagagaagggagtgaatcccttagaattggagttacagatggttgtgagccaccacgtgggtactaggaattgaacccagatcctctggaagagcagccagtgctcttagccatcttgctagcccctcttctctgtacttttaaaggctgactcctcctactcagcctgcaggcccaggtctggggtgttgagccttagaggcctcgaggcttgtgtctccagccagctgtgctgagctcctctgctctctcctgcaggtggaattctccccgactctgcagactctggcgagtgtggtcaatgacataggcagccacctctttgccaccatctctgtcttccgccacctccccgacatcctcaccaaacgcaagatgaatcgagagcccatttatgtacttgtgggtgcgtgggctttgggggggggcacacagtgggcaggctacggggagagaccgaaccccttcacactgggtttggtcgtctctatggctggtgggaatcccagccaaggggccactgaagaaggagcagggacagggaggagactcgaggtaacatgactgatgcctgtgcgtgggtggtgaacaccgggatgggaggtgaacaaggataagttcgagacttgcgctggacttaaaagaggtcttgattcccacggggcagacctctgatcctgtgcaagggacactggtcacacttgcattgctgcctccttacggttctctctcttcctttctttcttctctccttccttccatccttccttccttccttccatccttcttttccctcctccccaaacagggtttctttgtgtagccctggttgtcctggaactcactctgtaaaccaggctggccttgaactcacagagatctgcctgcctctgcctccaaagtacggacattaaagatgtgcactaccatagcccagctattttttttaaattcatgtattattattttatgtgtatggatggtttttgcctaaatgtgtgtctgtgcactgtgggtatgcctggtgcttatcaaggccagaaaaatggtcttggatcccttggaatgaaagttacagacagttctgagcctctttgtgggtgctgggaacagatgcagtgaaggtcagaacttaggaatcttcttctggggctggagagatggctcagtggttaagagcactggctgctcttccagaggttctgagttcaattcccagcaaccacatggtggctcacaaccatctgcaatgggatcagatgccctcttctggtgtgtctgaagagagcgacagcgtactcacatacataaaataaataaatcttaaaaaaaaaaaaagaaagagctttccctccccctcccccctcctcccccttcttcccaggttttccaccattcccatctctagcattttgtccttccccaccaacccttgcaacaatcctctaaacaaccgcacaggtcctcttatcccctgagccatctctccagccccaccaccccacaagtttcccagtgctcatgtttgagcacatgtatttgtggaaacaggtgaagtggaaagtcccaggcagtgcccaggggccaggctgcaaagtgggctggggtgggtgggtgtcaaccagaagcgtctttcttggcccttcgtagagcgagacgaggacatcaggaagatccaggcccagatcagcagtggcatgactaacaatgcgagcctgctgcagaattacctcaagacctgggacatgtaccgggagatctgggagatcaacaaggactccttcattcgccgctaccagcgcctcaacccccctgtctcctcttttgatgctgacattgcccggtgagtatctaagtacagggctcactggaggagactggggaccagggactggggcctgggtgagcagcaggcacggacactgtgcaccctgggcaacaggaaaagaatgccggagaggtccagaaagagctggacaaagtttagggaaggcagttgtttagaggaacattggaagggttggtggggaaggacaaaatgctagagatgggaatggtggaaaacctgggaagaagagggagagagggggagggggaggggaagcactttcactctaagagctctaaggctggacctaaacagaagaggattcctaagttctgaccttcactgcatcttctcgtggtccctaggccatggccatttagtgttgcaaggaagacaagtgcatggttgatagagtgggagccgaagcatgctgggaaggcttggacccagttctaacactgactggctgtgtggtctcaggcaggggttttacggctcccaggcttcagtttcctgtaaaatggttattctgcagcctgtcgtaggatgcgagactgttagatgtacaggagagccctccgtgagctctgagggtatggaaggctcttgctgtgactgtaccggccatggccccattgcaaatgatgaggcacacaggctggggggtggggggcaggggcaggggcaggggcatgccagtcagtgtccattaccataaagaatcaaaaaggaggtttgttttggttcacagtcagggagattttagcccatgaccaatggggccatgctttgggcttgtagatgcactctatagtagatgcaaaggcataaaccttatggcttagaataaaggagagacagatgggggtggggcatgggggtaggggacaaggacaggaattggggggggcataaccccagtgtgggaagactttctactccttcttatttggtctcccctttcccagcgtgttagatgtatgtatatgagagccctctgtgagctctgagcaccaggctgcaggttgctcaccacacagacctttgggggattttgaaatccacagtaaagcagaaagaaagagggtttctggcagaggcagtaggaaaaggattcatgaaggaggctcctgccgagctgtgaattagtgcttcatcaggcggagatggggacatggtgggcacaggggaaaacagcagaggccgagcgaggtgcaggtgggagcccaccagtgaacagaccagtcaaggaggcagacggagggacctccatgcaacagcatggtccccgagacatcctaaggccaccaccatgttatggatgtagatggtcaaagagtcccaggggaaaaaaaaaacaaaaccaaaaaaaaaaaaaccctaaaaacattcgaggtaagcccatctgtagttccagctacacagggggctgaggcaggaggaccacttgtgttcaggagtttgagtccagcctggtaaaatgcaaaagctcttatctcctaaatgaagctcctgaggcaactgagcaactgagtgggaagctgtggtgcaagaccagcctggaccaaggcaactctagggagggggacggggtgctcaggctgaggctgcagttttgtcctgcccagcccttgggaggtggacaccgcttggtgtgggtgatacctggcaacagaaccagctaggactgcaggtttgagtggaaggaaaagagtggagccgtggtgttggggtcacccgtgggggagtaaagcccgcctaacagatgtgtggcctcacagctacacggaggtggcgaacaatgtgcagaaggaagagacggtcctcaacatccagttcgtgatgctggactgctctcacctcaagttctcgctggtgcagcactgcaacgagtggcagaacaagttcacaaccctgctcaaggagatggcagctgggcgccttgcggacctgcactcctacctcaaggacaatgctgaaaagtaaggattgcctgggacacacgggcatgggggcatgtgtgagtgtgtgtgatttgtgtgtgcaggtgtgtgcgcatgtgcatgcaggtgtgtgtgcctgtgtgtgtgcctgtatgtgtgcgtgtgtgtgtgcatgtgtgcatgtgcctctgtgtgtgtgcatgtgtgtatgtacaggtatgtgtgtgtatgcacctgtgcatttgcctgtgcgtgtgtgtgcacgcatgtgtgtgcatgcacgtgtctggggatgtgctttttacctaatcctttctttcctgacttttagaatcagccaccctccccagacgctggaggagctaggggtcagcctgcagctcatggacaccctgcagcatgacctacccaacctggagactcagatcccccccattcacgagcagtttaccattttggagaagtatgaggtgccagttccggacactgtaagttcccgaggtgtttggtccaccccagtctcaagcataaagcagtggtgacagccggtggaggaccttgtccagagaagtgagagaggtgcagaactccagaggacccagtctaactcaaatgatgctgctccccatccgttgatgaccttcttttaggccccagcaacttgagattagtttctaggggatcgatcacgcacacagagcctatttatgaagagtcgggcccagtgaatggagagtggggtgggggtgggggccaagtgttgcccagcatatgtgacgccctggaagcctagtctcagtggggagaggcctgctccatgtgggtcatcctcccttctgttcctcccaggtcctggagatgctggagagcctcaatggggagtggctcaccttccaacaaatcctgctggatagcgagcagatgctgaagaaacacaaggagaagttcaagacaggccttatccatgccgccgatgacttcaagaagaaggcacacaaccttctagaagactttgagttcaaaggtttgccttactccaccgctctccctcctttagtcttggctttgggcactcagcctttaaaatgtcttggggaaggtgaaaacagacggggacatggcccggcacaccagaagtcccggtgggcagcccagcgaagggaaaaagctactgggcaatgtgggatgagctcaccagagctgtgggtttctggttgggagggctgggccggaagtgttcttactttgacttcctgccctccacctttgcagtccagatttggtgaccttccctaagacaaccccacacactccctccttccctttcctctctcctgtgagggcaacagtggaatttgcccacttagttgagggagccacaggctggcctttcaagaggccgtggacctgagcaggggggggggggggtggggggggggtggtggtgtgtctgagccacaccttggcttcctgcagggccgtttaccagcaccgtgggccacacggctgcactggatcagatcgcacagatgcgcgccatgctgatggccatgcgggacgaggagaacaacctccgctccaatctgggcatcttcaagatcgagcagccggtctccaaggacctccagatcctggagaaggtgctgggctgagtggggccccgtagaaaccagggataaataacagggataggacacttctcagggcccgggaatggctaggaccaggctgatacgttagttagcagctttgtgagttttgtttgttttgtttttgtttttgagacagggtttctctatgtagtctgggctgtcctggagcttgctttgtggaccaggctggctttaaactcacagaaatccacctgcctctacttcccaagtgctggaagtaaagtcacaggccaccactgccccatgtttttgtttgtttttttttaaactgagataaaattcacacactagcccaagtatttcccacagtttagtggcaccgaggttattcatagtgctgtgcagctgtcacctctgactctcatttcaaaacatttccatggggtagctgagatcactgggtagctgagaccacggggtagctgaggtcacagagtagctgagatggctcaggtgttgcttgctgtccaagcctagctgtagaggtagagggcaaaaatggacttcataaggctgttatctgacttaaacatgtgcacagtgccacctatgcacttgtatacacacacacacacacacacacacacacacacacacacacaccccacatggagtgtaaagagtgctggctgctgtcttagtattctgttgctgtgaagagacatcatgaccaggacaactcttataaaataaagcatttaattgagggctggttacagtttcagagactatagggagcatggcagcatgcagacaaacatggccctggagaagtagctgagattcctacatccagacccacaaccatcagaacttgagagagagcccctgggcccactgaggcttgtgaaacctcaaagcccacacttcctccagccaggccacgcctcctcatccttcccaagtagtgtcacttcctgatgactaagcatatgagcccatgggaaccatgcttgctttaacccccacattccactccctgacgccccccccccccaattaggcctgtagatagagcataatacaaaaaaatgcattcagtccaacttcagaatttcacattgtaacagcctcaacactgtttcaaaattccaaagtttaaagcctcttttgagactcatggcaatctctaaactgtaactcccagcaaaatcacagtcaaaaagtggatcacgcccggcatggtggcacacacctttaatcccagcactcgggaggcagagacaggcagatttctgagttcgaggccagcctggtctacagagtgagttccaggacagccagggctacacagagaaaccctgtctcgaaaaacaaaaaaacaaaaaaagtggatcacagggtgctggagagatggcttagcaattaagagcactgactgctctaccagaggtcctgagttcaattcccagcagccacatggtggctcacaaccatctgtaatgggatcggatgccctcttctggtgtgtctgaagacagctacggtgtactcacatatataaaataaataaataaatagatctttttttttttaaaaagttgatcacatacttccaacatacagtggcatagaatatccatttccatttcaaagtggagggaagggagcatggtgaggaaataagggaccaaaggacaccatgccagaaagccagcagggccacctccatctcggcatctccatgtctgatgtcaaagcgctcttcagatctccaactcctttcagctttgttggctgcagctcacttctctctcctggactgcttccctccctgttagcggctttcctatggctccggcatctcctgtatcctggggtctccaagacaatccaggcttcaccttcacagcttcacacagtgcctcctctgggcctccatacagggacgccctgacacgtgcctggcctcggtggctttctttagccccagaaggagattcacaacccctttcttgtatccttgatactaaagccagaaccatgtggccaaagctgccgagttctgctgcttgctagaggcagcggctggctcccttattatttacatctgcacagctctctgttattgatgatgttcccttctgagcttaagcctctctgtaactccttatcacaggttggaggttagctgggcggggtcttgccttgaggtcaccgttcttgcacttcctggcattctgtttctccttaaactgtacatttgtattttgttcttgcttagtttgctccttttcattatagatctgcacaggagtggccgctagaaacagcacccagttctaggctctcttgacatctctgtcagcaccggattaatccaaaactcttcagtttatctttgggcagattttttttcccccagagaaggccagagagcagacgtattctttgccaaaatatcacaagactgagttataggcctcttactaatattcttctctgaaaccccttgattctgggcccccacattccacatcaccctcagcacctatcttccatactccggttaggatggcccaccaagccccacttgaagcatctaactgcttttctgtctaaagtcccaaagtcttccacagtcctccaaacaaaagcatggtcaggcccatcacagcagcatcccagtccctgccagctcctcctaatcctccttaagtagtagtatccccgatgactaagtctccggactacatgagcccacaagggtcattcttattcacaccgccgcaactgctcttccagaaggtttgggttcaattcccagcacccatatggaggctcacttagtctgtaactccaggggatccgacaccctcttctagactctagcactacatgtacatggtgcctagacatacatgcaggcaaaacacataacagaaaaaaaaaatcttaaaaaaaaaaaaagatattcttaaaaagtgatttaaggggctggagagatggctcagtggttaagagcactgactgctcttccgaaggtcctgagtccaaatcccagcaaccacatggtggctcacaaccatccgtaatgagatctgatgctctcttctggtgtgtctgaagacagctacagtgtacttaattataataataaataaatcttttttttaaaaaagtgatttaaaaccaaacaaaacaagaggatcacttttctatgggcagacaccctctgtccccttccccctaacaattgctaacctattgtccatgtgtgatttgcctgccctggttgtttccctaccatagaaccaagtgacacgtggctttttgtctctgatttctttcgctcccatagtgggttttttgtttgttttgttttgttttgtttttcgagacaggtttctctttgtgtagccctgactgtcctggaactcgttctgtacaccaggctggcctcaaattcacagagacccgcctgcctctgcctcgtgagagctggagccccggattaaaggcgtgcgccaccaccgcccagctcgcatggtgttctcacaacccatgaatgccgtagcatgtttcggcactccgctccttttctcagctccctaatattccatcggttgtccacaaaccaggggacgggatgtgggttgtttctgcccttgcactgtagggaacagtgtttctgtgaatgtgtgtgcttgtttggacacaggttcctaatggtcgtgggtgtgagcctagcaataaaactgtcagatcatatggcaactctctgaggttttgaggcacagccaagccatttcccacagcagccatgccatgctacattcccaccagcaaacacgaggagtcctatttttttccttggtaactttgccaaagcatattttctcttacagttttttttttttttggttctagccatagtgggtgagaagtggtatcacactgaggttttaatttgcatttccctaagactcaatgttgaggaacatcttgcaggcttagcttttgatgggccctagaggcaagagagcagaagggaaaccgtgaacccatcgctagatggacaagcaagggaactggtgagctgtgaggagaaggagggcaggggctgccatgcctgaggctgtccatttccttccccacccttcccccccccccaccccccggcatcccacccacaggagctcgatgccctccagcaagtgtgggagatcacccgggactgggaggagagctggaaccagtggaagatgggctgcttccagaccctgcagacggaagccatggagtccatggctcatgggctgttccgccgcctcacgagactagccaaagagtacaaggtaagtgggacaggacaggatggagggtgggggcatggccctgccgcagctcagggagtgggtgtgctgcggcagctcgggtgttctgatgtctcccattcacactcaggaccgaaactgggaaatcattgaaacgactcgctccaaaatagagcagttcaagaggaccatgcccctcatctcagacctgcggaatccagccctcagagagaggtgaggcccgccccgcccagctgtgccccctcttgactgtatattctcctggatctttctatttgccccaaggatgtcctttttggtcacttcttatttaatgaggcacgatctgaacccagagcttcccaattccagctaatccagttagctcgcctaccctaccataaggatcttctgtccctgcctcctaagggctgggactaaagacagatgccagacatgaccagcttgttcttggattctgtggatcggaaccctggtcctcagtcttgcacagagagcacctttatccaatgtgcatcttccttggccccactttatttcacttctgaggactgaacccagggcttgtggatgctagctctataccactaagccatatagcacctgctcaaattgagttaaaacttttattttttttaaagatttatttattttatgtatatgagtacaccattgctctcttcagacacaccagaagagggcatcggatcccattacagatgcttgtgagccaccatgtggttgctgggaattgaactcaagacctctggaagatcagtcagtgctttgaaccactgagccatctctccagcccaatttaaaacttttaaattatgttcatttattactttgtgtgtgtgtgtgtgcatgtgtgtgccatagctccagtgtggtggtcagaggatactttgtgggagttggtcctctctcctttatgtgggtgctgtgtggggtggggtcggcagggggtggggtcaggctcagactgtcaggcccaggccaacaagtgcctttctctactgacctatctcgctggctcagatttggtttttagttgacagaaaagcatgtatttataatgcgcagagtgtggtgttgaggatgcatgccctgtgggagagctaccctgacgtagatggtcagcttgcgaatcacctcacacacttgctccttttacctttgtggtgagaatagttgagatttacttttgagggctacatgttcatctctctctctctctctctctctctctctctccctccctctctctctctctctctctctctgtgtctctctctctgtctctgtgtgtgtgtgtgtgtgtgtgtgtgtgtgtgtgtgaaggcttcctacttcctgatctcctagtactggagttacaggcacacttggtcatgaccagcctttcatacggatgctgggctctgaacttcatgcatgcacagaactgcttttacctagggagctatcttcctaacacttaaagtttatcctttgctccttctgtgtagctggaactccacagcctttgaccagctctcccaactctgtccaccacaacccctggaactactatgctccttcctgctttcacgatcgcatttcttcctccccctcttcttttttcttttttaagattttttttttcatttatatgagtacactgtcgtcttcagacacacaagaagaggacatcggatctcattacagatggttgtgagccaccatgtggttgctgggaattgaactcaggtcctctggacgagcagtgctcttaattgctgaggcatctctcctgcccgttttcctcttcttttttgagagaagatcttattacatagccttggctgatataggactggctttgtagtctaagctggccttgatctacctgcctctgctgggcttaaaggcctagcccccttatcttaccttccttcttttttgaagactgaatgatttcccatcatatacctccttttctttttccatgcaatagttagacaatgaagtcaattctatctacaccttggctgttgtgtacagtatcacagtcagcatggggcccatgtgtgcaatcagccactgtcttctgtgtcctgcatccctgcctctttcccgatgtctctctctgtctcctcctgctccaggttatatattatagctaagcctttttttttttcatacaaaaagctttttttgttattgtcgtatccaaaatggtttttgcctttgagcctagtttaagaaaattttccctgtttcaaagtcacaagcacatttgtccactcttcttctggtcgtgtgtataagtctagcctgagccctgagtttataagttatttaagcctaagtctcctcatctacggatgggatgatagcactgtgcagtatgcagtgcttgtgagaatgacagggttgcaggtgaagcactcagcccagcacgtgatctgtcccaggcctgctctgatgtactgcttgtatgcacacctgccttaactccctctccagagaatcaactctgggagactgacacatcaatttctttattccctatggtgcctaagattacaccttagagcctatttagcaagatctgttgaatcatgaattaacaaataaccagaattataaatttccaatgtgaaggagcaagaggagtgattttttttttttttaaatcagtgctgggtgtggaatgcccccctcacacatgctaagcaggagactgagtcacactaaccaccccagggcttgataatgacactgctagcaggccctgcagctggcctgcaggtgagacttcctgttctgggccgcaggcactgggaccaggtcaaagaggaagtccagcgggagtttgatcaggagtcagagagcttcaccttggagcagattgtgaaactagggatggatcagcacgtggagaagattgcagagatctcagcctctgcgaccaaagagctggccatagaagtggtatgaggacgtccccacagagttcacagacttccagtcgtgccgcatttgagggcccctccccagcaccccttacctttgtggactagatacctggttattctgtcccctaatttctcttcacagggattacaaaatattgccaagacctgggattcgactcagctagacatagtaccctacaaggacaagggccatcaccggctcaggtagagagggctccctgaggccggcctgtggggcccgaggtgaggagtgagtgaggctgaaacattgaaaatggttatggttaatgacactgagcctctgtgtcccaggggaacagaggaagtgttccaggcactggaagataatcaggtggccctgtcaaccatgaaggcatctcgattcgtgaaggcctttgagaaggatgtggaccactgggagcgctgcctctctctcattctggaagttattgagatggtcctcactgtgcagagacagtggatgtacctagaggtcagaagtggtcttacccgggctctccctacccctgctccagctctttcttacgtcactgttatcagacacgccagaagaaggcatcagatctcatcacagatggttgtgggctaccgtgtagttgctgggaattgaactcaggacctctggaagagcagtcagtgctcttaactgctgagccatctctccagcccttgtcattggtttctaacagtgactcttctacgcagttgacatctctggtgtgggagcagggagtggagggtggagggtgcgtgagaaacagcctctcatgccgactcgatggtctctcagaatatcttccttggagaggacatccggaaacagctgcccaatgagtcagccctatttgaccaggtcaacaacaactggaaagccatcatggaccgaatgaacaaagacaataacgctctccggagcacccactacccaggtaagagctccgcaggccttcgctggttatacgcatttgaggatcatggtctcctatgcatcatcaccaaaagtgataatgtcatcactatcacgcttaatacccttgtgaccgtgagtagtgatagcaccactacttagtaacacttgctagtattagtcataagtgttattactggttattttcatttttaccgatacttaaggggaatatcacatgatggtctaaagcaagggctgcggagccagctctgggttccaaacccaacacaggctttattggtcgtgtgcatctggcagcttgctccctccatactccagtttcctcatctgccatgggagttgttttaatgaccacaaagaagtggcgactcttccagcacggagtggtggtggtggtggtggtggtggtgatggtgggagctggattgttctcaggggccctgactgaaagccgcttgtcttctctggctgagacccagaggcagcgttctctgaagtggtctaggtactcagagtgactcacagagccacggaaacaacgatcgcactgctgactacaaagaagaagcgtgtcgtccgaggtttccaaatccttctgggatatctaggggtcatctggggtcccccagaggctccaacagcctgcagacactatacatgcttaaaggcgctgggggggggggttctgctggggtcacactcatggtcactggtgtgtcttccaaaggacagaacctgggaagacatggggaaacccctaaggggtagggatgtagacccggaggaaactaggatttctgggacttgtagacagaatgtatcacactcaaaatctcaaattggcctgtgtggtagatctttctttttttttcttttttcttttttctttctttttttgtttgtttgtttgtttgtttaagatttatttattattatatgtaagtacaccatggctgtcttcagacaccagaagtgggggtcagatctcattgaggatggttgtgagccaccaagtgattgctgagatttgaaataaggaccttcggaagagctcttaaccgctgagccatctctccagtcccctttctttctgtctgtctgtctgtctgtctgtctgtctatctgtctgtctgtctttctctctaagatagtcaaagggatgtgtgtttacttcaagaacacagtctttttttttttttttttttttttttttggtttttcgagacagggtttctctgtagccctggctgtcctggaactcactttatagaccaggcaggcctcgaactcagaaatccgcctgcctctgcctcccaagtgctgggattaaaggcgtgtgccaccatacccggataagaacacaatcttaagtttaggctctgcatattctgtgagttgtatgggtgtgtgggtttgtgtagtattgtgtgtttggggtacacacatatggtgtgtgcgtgtggatgccgggggtgtggatgccagtggctgatcttgggtaccttcagctatcatttaccttatcttatttacctgttttattttacctttttattcttttttaaaaagatttatttataacatatacagtgttctgcctgcatgtatgctataggccagaagagggcaccagatctcattacagatggttgtgagccaccatgtggttgctgggaattgaactcaggacctctggaaaaacagccagtgctctttttttgtttgtttgtttgtttgtttgttttttcgagacaaggtttctctgtatagccctggctgtcctggaactcactttgtagaccaggctggcctcgaacacagaaatccgcctgcctctgcctcccaagtgctgggattaaaggtgtgcgccaccacacccggctcagccagtgctcttaaccactgagccatctctccagcccctcttttgattcttgatattgtaatttaattacaacatttctcccttcccttttctctctcccagctctcccacctacccctctgctctccttcaggttcatgaccactgttttcactgattgttattgcatgtgtagtcatgcgtacacatatgttttcctaatcataaccagctcagtccatgtgatattacttgcatgcatgtattcagggctgaccacttggccctggacaaccaattgttgctttcttcctggggagggcctgctcttcacggccagctttcctcagtttcctggattcttcgtatgcggctgcagcctcaagggcttctctccattcaaactggtgtgctcactggtgtctgggagccatgctggtgagaccttatgggtgtggcttcttctcttactaggagacacaacctcacagcaagctccatggtgctctggcttctgtcatccttctgcctcttctctggcagtgttccctgagcctcaggggagagagtgttttgtagatgtgtccattgggcctgggctccgcaactctgcgttctaactggctgtgtttttctggactggtctccatctgctgcaaagagaagtttcctttgatgaggggtgacagtgtaagaacaaaggtttatagattgttgttagtgattgtggtggaatatatagtaagctcgtggttgtagattctcctccaataaccacaacctcactgtcaatgagtagtacgtgtctaggtttccagtatcagacatggtttccctcttgttgagtgggtcttcagtccaactatagagagctgctggttacctccaaggtgtgtgtgccagtgctgcacccttagggtcctgtgctgtgctggtcactgacgtggttcatagactcagagctagtaggactattgtttacccctctccttgggaagcctgcgtgatgctttctggtaccttaaagctagtcctcaggggtcattcaagtcaattccatctcaggagtctctgggccctgtttctgaagtacatgatgtccttagcaatagagactcaccgggcctggggggtaaccattctacctctggcggttgaccaagggtaacagcaatagcctgcagagtttgggagtctcttgaagaaccctggctttgtgttggattctactgccatttcagaggcaggggggggggtcaaaattcaatgatgttaattaaagtgttagtgagctaaagactattagagcagtggccttctgcctcctggtcaagtgccttctgtgctgtgtcacaattgctgtcattgtgtgcctgcgacatgcctttaacaatttggcttgttggattgtgtaagctgtggagtcattttcaagttccagaaactcttgagttgaacagtgaggctccaagttcttaggtataatgggactattgttccaaagactggtgagaagtggagctaacccatatgatgcataattaataatgtacgagtgctccacatgtaatcatgtgtaatgactaaaggaagagtgaggataattattcagaagagctggggctatttctctgccttcagaagcccgatgtcactttgtacctcagccttagaactaggaaaggaagtgggaaaaatgtcacctactgcccttcttcccaggactcctggagacactgatagaaatgaacgcaatcctggaggacattcagaagtccctggacatgtacttagagaccaagcgccacatattcccccgcttctacttcctgtccaatgatgacctgctggagatcctgggccagtcccgtaacccagaggctgtgcagccacacctcaaaaagtgctttgacaacatcaaactgctgaaaattcaaaaggtcagctgaggtggccatgacgggaaggcgggccgggaagtaatggtgatgtcatggtgacgttatggtattcaaggctctggaggggaccatagtctgccagcaggaaagtgacatttgttaatgactgtagagtttcatatacagctttccagaagtggcaacgttgagaggagggaagagaagaaatgacctttaaagggcttgagtcagccgttaagagcactgactgctcttccagaggtcctgagttcaaataccagcaacctcagggtagctcataaccatctctgatgagatttgacaacaccctcttgtggtgtgtctgaagagagggacagtatactcacatacataaaataaataactaaattaaaaaggggggtgttagctgggcagtggtggtgcatgcctttaatcacagcacctgggaggcagaggcaggtgctttctgagttcaaggccagcctggtctacagagtgagttccaggacacccagggctacacagaaaaaccctatctcaggggtgggggtgggggtggggtgggatgggtgttaaattcttctagaaggttacagagagtgaggctaggcatgggtaacttgtctcttctgcaggtcgggggctccagcagcaagtgggaggcagtgggaatgttctcaggtgacggtgaatacattgacttcctccacccagtacttctagaaggaccagtggaggtgagtggtggccaaggtcttagaatcaaactgtcttgaccagcctggtctacagagtcagttctaggacagccagggctacacagagaaaccctgacgccaaaaaccaaaaaaaaaaaaaaaaaagaaaaaagaaagaaagaaagaaagaaagaaaagaaaagaaaagaaaagaaaagaaaagaaaagaaaagaaaaaaaaaaagaaaagaaaggacttcccagggagaacattttcaggagcagcatgaacgtagcagttaccgtttcctcagccactcgtgttcctgactttgtcgtgtcactactccctaaacttaaaggttccaactgatgctctaaccctctgcttcctgcccccacagcctttggagagccatgccagctctagtccagatgcactttccatcctgggtcctcagccctctgcagtctccttccctgcccccgcactccacccccacccccaccccccaacatacacacacacacacattcctgtgccttctctcagggcaacctcagtcctcagcctcggacccttagaccgaggattattttgttttccctagtcgtggcttggtgatgtggagcgggccatgaggatgacccttcgggatttgcttcgaaactgccgcgtggccctcaagaagttcctcaacaagagagacaaatgggtgaaagactgggctggccaggtaagctggagccacacaaatggggggacagtggagctaacagagcagcatgtggaaagacagactccagaggctctcaaacagaggctctctgctcctcctcctgggtctggctctcataccccaagagctggaaccgctgctcctgacccaaggcgcatgcgccatccttcaggcccgcccagacccagtagcgccgggtgctgaaagaggctggaactcgagagctaaaggtaaggcctgccaatcagcttgtgtacctgccttaggtggtgatcactgctagtcagatccagtggacagctgatgtcaccaagtgcctgatgacagccaaagagcgatcagacaagaaaatcctcaaggtcatgaagaagaagcaggtggggagctgagacaggcctggcgttggaacgggtggataagggatgactagaatcacaactggagatgagctggtacgagtgggccagaacacgggtgctctgggacagaagtgtgggggtggggcagggaggagtgcaccatgcagagcagagttaggctctcctgtgtagatgtggatatgggaattcttgggatctggatgcggttggaggtgacctcagcctgggacgtggtgccatccagccttggctacattgatgcttctgttcttgcctgttgccccatcctacaggtgtcaatactaaataagtattcagaggccatcagggggaacttgaccaagatcatgagacttaagattgtggctctggtgacgatagaaattcacgcccgcgacgtgctggaaaagctctacaagagcggcctcatggatgtcagttcctttgactggctcagccagctgcgcttctactgggagaaggtggcgaagacggatcgactcgctcctctcttaggcccagactgacccatcatgcttctgtgcatggacgcgtgctatcttctaacccagacccttggactttcagagcttcctcctcgaaggtttagctctgtcgcaatcccagctcaggagtggccagtggttactccaggcaatactccttctaagtgccacttgatggccactctcagatcccaagcagctatttccatggattggggtgggggaagacatgctgtgtggaacccattttctcttgtggccccaaaccatacccttctctgtagctctaaaccaaaacccttaatccacctgcaaccctcctgacgtctctgagccctgctggtagccatttccacgttccctgaagccccgcccctgaagccccgcctctgtctcattcttttctgttcttccaggatgtggatgactgtataatccgccagaccaacacacaattccaatatggttatgagtacttggggaactctggtcggctggtcatcactcccctgacagacaggtctgctgtgggggggtaaaccggtgttctggggtaggaactgcagagatgacagaatcttccagtcatctggcccaagtcatgtcttaatttctcagatgttacatgacattgaccacggcactgcaccttcatcgcgggggctcccccaaaggcccagcaggtactggaaagacagaaactgtcaaagacctgggcaaggcgctgggtatatatgtcatcgtggtcaactgctccgagggcttggactataagtccatgggaagaatgtactcaggactggcacaggtcagtaccctgcctccccgtcctaaagtcattacacatcttctagtacgtgaaaatcaactaaacctcaaatctagtttgtgcctgtgtgccttgcaaaacagccttgtagcgggcagttctctctctctcatttttaaagatttatttattatatgtaagtgaagacactgtagtgtcgtcagacaccccagaagagggcatcagatctcttatggatggttgtgagccaccgtgtggttgcttgattttgaactcaggacattcagaggagcagtcagtgctcttgaccactgagccatctctctagcccgttgcaggcagttcttacaatcagaaagaaacattgaaacccctttaactccctgagtctcacattgcatgtttgcaaattctgaccatgtaaggattaaatagagcatgcacagaaactgcccagcacacaggaactactcagtgcacacaagttccaacctctagccaacctgttagctgtcttgtctgatggaaagttctggccaaaagtcatgacactgtcgctcaggtcccccatgcaccccctatttcgggtgccacctttgctactaaagcattttcgggaagggtgtgttgggctgtggtctagtggcctgggacacctctcttgctgtagtgacgctgcctctctctcccgctccacagagtggagcctggggctgctttgacgagtttaaccgcatcaacattgaggtgttgtccgtggtggcccagcagatcctgtccatcctatctgccttgactgccaacctcacacgtttctattttgagggctttgaaataaatctggtgtggtcttgtgggatcttcatcaccatgaatcctggtaggtgggaggaacgcggtgacactgggcgagggggcaggagaagcaggcgtctgggataagtattgtgtcctttttccctctctgcaccaaagcctttatctaagaagtatttaactaaagatgactgtgttcatctgtggtctattaatgtgccaaaatccccaaggagtatttagcttaaaggaggaaaggggagctttggttccatggtctctgccatggacaactgttggcgagggcaaggcaggctgtcctggtggtcagggagaatagggcggctccggatgaccagggagaaaagaggcggagggagggagagagggagggataggcatagatgggagaaggaaggacaaagagagagacagaaaggagggagacatttgttggttcatgggtttactccagtgattgacttctttcaagtaggccacaccttctaaagtttctgtagcttttggtctgtgagacatcctctgatgaggtccagaccctcgttatctaatcacttccagcaggctccgcctctggacctgctgcttgaggaacaaagcctttaagggacacttcagatccaaattacagccacggcagaagagaagacacaaggagaggaggaagtagacttcctgtcctccccaagggctcgagaaacacctacttgtcgctatggaagcctagtcttttaaggctgagccaagtttcccaatgggctagctccctgctctgccttctatcccttttggaatatgggagtctccctaatgtatggggttttcagttgcctagctgccccctaggaacagctttgggggaagtgtctaggagagaacacccttagggaagcatcatagctacagctgtgagttctacagggctcatgtgggctccacatagaactcagcagctctgtggtttcagttgaaaacagggccatgcgaaacataatgagagcacctctgaaggaagaagacaggatgaatagggagtcagggctgggatgaggaaggactccatcttggagctggggctggggagaaagttaagggcagggtaaaagttgggtaagtgggacacttgagagaccgattgaggacagggaaacccggttctaaacagacggcttcgtctccaggctatgccggccgcacagagcttccagagaacctaaagtccatgttccgcccaattgccatggtggtgcctgattctacgcttattgcggaaatcattctctttggggagggctttggcaactgcaaggtattctgataatctattccttattttattgttgttccatggaaagaggagcccctgaaggcctcacaatctgtttatcctaccgggagcttagagttctgttagtgggatctgaagccagaggagtatagacggacagatgggtggtggggtgtctgacttccgtgaagccactaaccaataatagcacagcccacaagatctcctacaattgttcagagcacttcctagatgtttcaagtccctgacctaggttctagtgtctacaagtgtccctaaaggggagttgtgggaggtgagctgttgtctcctctgcacggttcccagatcctggccaagaaggtgtacacactgtactcactggctgtgcagcagctctccagacaggaccactacgacttcggcctgcgcgccctcacttccctgttgcgctatgctggcaagaagcgtcgcctacagccagatctgtctgatgaagaggtaggccaaactcatggccctcggatctttgcctcctttgtctctggtctgatgatgtcttcaggaacattttccagcctttcttttccttctccagatagcggtattccatgcacgcctctacccctgccctccccaccacctcatgctttgccccctggctcgcatgattgtccctgttgtgttgctgaggactgactctggcatatccatcgtccttaggtctccctttaaccccacaggttctgctgctctccatgagagacatgaacatcgccaagctgacgtcagtggatgtcccattgttcaatgctattgtgcaggacctcttccccaacatcgagctcccggtcattgactatggcaaggtgcttgctcccccatctcttttacttatttattttaagatttattattattattattattattattaatttaatgtatgtgagtacactgtcgcaggattttcagacacaccagaagagggcatcagttcccattacagatggttgtgaaccaccatgtggttgctaggaattgaactcaggacctctggaagagcagccagtgctcttaaccgctgagccatctctccagcccagccccacctcctttgaaaaagaacgttattttgagttgtgtgtgtctatgtggaggtcagaggacagtttacaggaaccggttctctcctcccaccagctgggtccccgggatcagagttggatcgtcaggaatggctgcaggtgcctttactcgctgctccctcttgctggctcagtatttactctttatcaggctccctgatttcatgagtaactgtgcatctgagaacaggaagtgtgactgtcctgaacttctgtcactcattaggtgtgactttgaatgacacagttggctccacctaggacccacacaaacagcttcctctctgactcatctccttctggagtcctggctcaccgacacttacttacttacttactttcctacttaattaattaatttagaggtggggtgttactatgtaaccctggctgacccacccggaactccctatatagaccaggctggcctcctgctaacaggggttgattggcctactgcctcaccatgggtcaccatgtcgggctcaggtaacttcaactcagcagatccttgaaatcactgaaagcccagctaccctgactggatccactagccctcgcccacctcgcctcctgtcctcatggtgggaactttgaagagagtctctgggagctctgtggtgtgtgagagcagaggaacagaggaggggcagaggcgtcccctcctcgtgttcgtccacacactctgagctgtcctttcagttgaaactgctaaatgctggattaaaaaattcaaagaaatatgtccttttttattacattgcttagatggcaagaattctaggggccttggtgtggtgacagtgagtgaagggactttgtgaggcaagtaggttccaatgctgttttcctgccgtggaattttgtcagtctaaggcaccaggagttggaaggcaagcagcccaagcctgaaggtggaacaacgtaaagcccactgttatagaagtcaggctacagggactcaccctccccatcaactgatgggaaggacaacttacaacctaggaagatctgtgcttgtccaagccctggtggtggcagggagggggtcaaaggattcctgcagtctcttcagctcagcctcacgctgtccacagtcagcattcactctatggtgtaaagtctcaagcttcacctgcagggcaggagaagggggtgtccgttgtcagtgcccccaggcgactggtgggagcaaagggaagaatggcttctggaggagctcagtccagaagagccctgaaggcagcaccagcctgaccgctgcggatggaggttgggaaaaggagctgttcgctgaagccagctagagttgtgtaacaggactctgtcccaggagaagaaaggagctgtatctctaagatctggtgtcttaatggccccgggtgacagagcctcccctgctgagtagaggtgtcgagcctgaggaacagcaggcaggagaggaatgagtcagattaaccagtactgagggaacgtttgcagactagatgctttctttcatctctcggcttaaagaattgaggcatccagacaggcaagtgaaagtattcattctctccggggaattcttctgacccaagaagaatgacagggacatggcataaagatcccaagtgcactgtcgcctgcaggagccccacacacccagccatataaacagaaaatgggagtagaggtaggagaatcaggaattcagggctaaccttggctacataaggaatttgagggtagcctggtctataatacacacacacacacacacacacacacacacacaccacacagagacagagagagagagagagagagagagagagagagagagagaatatgaatatgaatggatgatgtaaggaaaaccaaagctcgctgaacaacctgagagaagagctctggtaggaaggccattaggtgttactagtgggagggaggaggcaagggaggagaggggatgttgagccaaatccctgagacaagagacttttttaaatgcagggcaacagacagtatggtaaagagtttgaaggaaagtattagccctgggagaagcaaggagtctactttgtaagggtttctgagaagaggggtggtcttgtatcacaaggaagcaggcttagtcaatgtatgatgtgtgacctatggtctgcgacagaagtaagggactgggcacattgccattcacgccacacggcaggagtcactctcgataggaggtgggggcttagttaatgtgtgacccagaaaaggtgatggcagtgagactgaccccccttccctccagcctgcaccccaccgtgcgtgtgcgtgtgcgtgtgcgtgtgcgtgtgcgtgtgcgtgtgtgtgtgtgtgtgtgtgtgtgtgtgtgtgtagggggtgtgctggggctgggcttgtccttgtctggctttcatacctatctgcttaggacttggttacctgcagggcctaggttccctaacaaaagaacccgaacaaacaagaaagagcctggtggagaaatagataggccaaggagaggaaatacaaagcaaaccatcaatggcctctgctggggagtggtgggcatctctgcagacacagggactctgggggtgaggaggatagccggtcccctctatgcattcaggtcagcctgggccaccaagactccaccctgaacaatgatcagaattatccaagtgaaattctaatgaaatgctattaagaaaggactatggcagacaaaggggagaagagataggatttaaaggaaaatctaggtgagataacattcaaacaattccaaaagtcacagagaagagcatggagggatgaggtccttgctcacagctaaaggaaatcccacataaacgtggactagaacagtcctttaacaggctgcccctgggaaattctagatattgaacaagaagactatttcagctgtttccaaggaggaaaagaaaaaagaggcaagagactaaaaacaaccacaaaccaggctgttctgtgtctcaacaataatgttaagtatgctaataatggagcagccttcaaaattccaggggtaaataatttctgacttcaaattctgtctcatccaacctatcttatagaaggctagatcagctacactttcaattatgcttatttcaaacaaacaaaaagcctctaatatgttcatgagccgagagaatgtggcctcactaaagtgtaggtacagactatgaaaagttagcagagaagcagacacaggaataccattcgttcaagagaagcttaaataaagcttcaggggttggtcaacagagagcccaagatggcagtcacagggtgagcagagagacagaaggcagtaggaggagatcaaggctatcaagcctcttcagtgcgtgaacccttcctctattgataaataaaatccaaaggcttcaggagtgtgtctaacagagaaattgataagtgatgtgaccatcattcagacactcttaattaactagcagagtttggagttagctttgtgataaggatcttgaaacccaggtaagcaacaggcacagaatctgttagcgccctcggggcaaacacgccatctggaagaaaagtccccgccctgacggtaatcctcgggagtgtctcctacatgagacacacctgaagctgaaggacaaaggcttgggagtctcaggggaggaggtctgccagatcgctacgcatccagagagagctggggaagccaagacagacagacagacagcacagccttcaaggcaaaacgctttactggaaatacaaagtcacctcaagataaaaaaaaaaaaaaaaaaaaaggttcagattgtccaggaagataaaatagattgaatttggatgtacttaagatgcagactcaaaagaactaaagctaaataattggctgagatgtcaggagaaatagataaacccatagaatagaggcgggttttaacctcttagtaagtaaaccaggctgactgaaatttacggtcatggaagatttgaacaacacaacggacaactttgagttgattcatagttgattcataaagagcatatagacactgaacatgtaaaggccatgagtctgcctcaaaaacttgaaggcacccattcagcatatgtattctgactacagtgataactacccttttcagacaaagcaagctttgcatttttatttattattattattattagtgtgtgtgtgtgtatgtgtgcatgtgaaagagtgtgtgtgcatgatctatgtgtatgggcatgcctgccatagcacatgtgtggaggctagagggcagctttgtggagttggctatgaatgaccagagtcagcacaggacacagcagcaagactaagttctcagcaccacgggagatttatttgccccagagggacaaagggcagggaatcagagacagatgagggtgagaatgagggagaagagaaaaggaacaagggagagggggaaagcatagttgctctggaaggacaatggactgcctctggatggagagaagacagatgcggccccataggcaaatgacagtttataaatgggggagaagaacccagtgttaggacgagttggttaattttgattttgaggagtttggtttggtcagcacagcattcaaggtgtaggggtgtctcagatatcttgcccagtattagcagcaggatgtggccttttcttccagactatgctgaagctggctggaccttggtggtcagctaccttttatatttacatgggctctgggggggtcaaaaccccagatcaccatgctggcatagcaaatgcccttggcctcggcaccatcttgccatccctaaagcaaactatagaaagatacaacattaaaaagttaaggaaaggggctggagagatggctcagtggttaaagagcactgactgctcttccaaaggtccgaagttcaaatcccagcaaccacatggtggctcacaaccatccgtaacaaaatctgatgccctcttctggagtgtctgaagacagctacagtgtacttacatataataaataaataaatcttttttaaaaaaagttaaggaaaatatacagacccatgtacagaaaaatataacagacaggctcgcgcttgtgatctcagtccacaggaggtgaggctggagggtaactgctattttgaaggaatcctgggctatataattggctacagagtaagactgtgtctcaaaaaaataaaaatattggagggggtggtggtgactcacacctttaatcccatcactaagaggacagaggcaggcagatctctgggtttgaggccagccaggtcagagtgaattccagatatgccagggctacacagagaaaccctgtcttgaaaactaaaaaccaaaccaaaccaaacaaacaatcctggatgtagatttttttttctgtttctttctggtgagcagttatatgttatatgnnnnnnnnnnnnnnnnnnnnnnnnnnnnnnnnnnnnnnnnnnnnnnnnnnnnnnnnnnnnnnnnnnnnnnnnnnnnnnnnnnnnnnnnnnnnnnnnnnnnnnnnnnnnnnnnnnnnnnnnnnnnnnnnnnnnnnnnnnnnnnnnnnnnnnnnnnnnnnnnnnnnnnnnnnnnnnnnnnnnnnnnnnnnnnnnnnnnnnnnnnnnnnnnnnnnnnnnnnnnnnnnnnnnnnnnnnnnnnnnnnnnnnnnnnnnnnnnnnnnnnnnnnnnnnnnnnnnnnnnnnnnnnnnnnnnnnnnnnnnnnnnnnnnnnnnnnnnnnnnnnnnnnnnnnnnnnnnnnnnnnnnnnnnnnnnnnnnnnnnnnnnnnnnnnnnnnnnnnnnnnnnnnnnnnnnnnnnnnnnnnnnnnnnnnnnnnnnnnnnnnnnnnnnnnnnnnnnnnnnnnnnnnnnnnnnnnnnnnnnnnnnnnnnnnnnnnnnnnnnnnnnnnnnnnnnnnnnnnnnnnnnnnnnnnnnnnnnnnnnnnnnnnnnnnnnnnnnnnnnnnnnnnnnnnnnnnnnnnnnnnnnnnnnnnnnnnnnnnnnnnnnnnnnnnnnnnnnnnnnnnnnnnnnnnnnnnnnnnnnnnnnnnnnnnnnnnnnnnnnnnnnnnnnnnnnnnnnnnnnnnnnnnnnnnnnnnnnnnnnnnnnnnnnnnnnnnnnnnnnnnnnnagagaagagaagagaagagaagagaagagaagagaagagaagagaagagaagagaagagaagagaagagagaagtgaaatagaggctggccatgagcatgtggagagagagtgggggaaggagatggggaaagagtgaaaaagggatgaggggacagagtgtgaacaagaaggcaagaacaagagagaggagtgggagcaagcatccccttttatagtgagtcaggaacaccttgctattgccaggtaactggggtggagcttagacaaaaaaatgctaacagttgtgagctgctgtgtgggttctggaaactaattctaggtcctttgcaagagcagtcaatgctctcaactgctgagctatatcactcagctcaggacagtgagatcttaaagtatagtaaaataattttgttcccaactgtatctctagtactctagtacttggcatagtaccataaagagtcagtaagtagttgttgaatgatgctttaaaaatgtgtagaactacattagatattgtacacatgaggaggctgagtttccaagaaaaaccgactcaaaatgacaaaattgaaagctaggaagccaggctcgctgactctgttcagcgactccagtgtcctctgttcgtatgtgcaggatgtgaatgtgtgtgtgtgtgtctggtgtagctgcatggatgtacacacagaggtcacaaaaggacacagactggcttgatatgtcactctctaccttattcctttgagatagggtctctccctgcccctggagcacggctgctcaccagcaagccccagtgagcctttctctcttagcactgcagttgtagggctgtgtgcagccaggccaagatttttatgtgggtgctgtgggtttgaactcaggtcctcaggattgagcatcaagatactctcctaatgtagccagcttgcctgcctgccttttttcccctcccccctctgtctctccctccctccttcattccttccttcaatgatactgaggatcaaatccatggcctgtgtattctcagcaggcgccctaccatcctacctaccactgtgctatctatagatcccagaacacagtattttccctctggctaggcagttctgggggattaccgagtttgagtgcaaaggaccatagcgtcttttgctgcggttctgctgcgtcttccccagcactgaaagtcccttggctgggctgactcacactctttccttctgcttttctcagctacgggacaccatcgagcaggagatccgagaaatgggcctgcagatcacaccctttaccctcaccaaggttttacagttgtacgaaaccaagaactctcgccactccaccatgattgtgggtggcaccggcagcagcaagaccacctcctggaaaattctgcaggcctctctgacgtccctgtgccgtgctggagaacccaactacaacatcgttagagtgcgcagtggggcagtggcctagctgcaggtgttgggaggggccggacctggatccagggggtcctgggagagaagcaagcaatgagcagtgcaagaacctaagagaggattgggacgggggttgtgggggaagggtattgggagcttgggtttgggcccctcagaagtcccttctggtatcatttttaggagttccctttgaacccaaaggcactgtccttaggggagctgtatggcgagtatgacctcaacaccaacgaatggaccgatggcatcctgtctagtgtcatgcgggttgcctgtgcaggtatccagcaggtcaagtgggtgagaggagaggttggcagctcctgagggaatggggaccctgggaacaggaagccccggcccaccccggccccagtgaggttgaaagatgccaggagaatgccttaagacaaggaagcacgtggtgagggatacaggaggagagggagatggaagcctcttcgtttcctatcatccatctgcatgccacccaagatgagaagccagacgagaaatggatcctttttgatggccccgtggacacgctgtggatcgagagcatgaactctgtcatggacgataacaaagtgctgaccctcatcaatggcgagcgcattgcgatgcccgagcaggtgctactgctacgcagaggggtcccaggccagcctctggggaaggtggccgaggttggggtggggggtggaagggaagctgaggtggaggctggcacactgagagtggattacccagagagagctgggccgaggatccagatccagggaaatctgcaactgaagcaagatgcgaaaggctgcaggtacactccctaggaggggaaggctgacctggccttggcctctaggtcccatcttcggcataggaggcaagggggccattgctaccctggaacaattgtatagtaaagaactttgggactagaaatcactgtgtagacccaggctgtcgtcagcttcatctccactggcccgtgatgtgtggccttcgtagcacgcaccaaggttaatatctcctggggtgtcacgcccacctctctttattctaacctttctttccctctctccttcctctcccccgccccccttttgttcattttaggtagtatctcatgtagcccaggctggcctaggtaataaaggataaccttgattcctgatcttcctgctcctgcctctagtgctcagacaccaggattatataggcatatgtcacccactcttttctttcacgcaagccagagagtactttttttcctaaagataaatttgaatgagctctaatttcttttagaaagtgtcttagtcactgtgctattgctgtgaagagataccgtgactcaggcagctattataaggagaaagcatttaagtgggggctggcttacagtttcagagatttagtctgaaatcatcgaggacgatgagcatggtgatcggcaggcaggcactggagccagagccgggagtgctccatcttgatccaaaggcagagagacagggcctggtgtgagctcttgaaaccttaaagcccacttccggtgacacactccctccaacgaagccatacccacttcagtgaagccacacctcctaatccttctcaagtagtgctgctccctgctgctggctaagccttcatgtatatgagcctggtggtggtggtggggctgttctcattcaaaccaccacagaaagcattataaatctcagtcattattctttttgttccaatttacttggtacaagtcccgcgtaaggcatgggttttgggttgttttgatcactgtgaatgaggtgccgctgctgacgttctgacaagagtctgcatccttaggtgtctctcttgtttgaagtggagaacttggctgtggcctctccagccactgtgtcccgctgtgggatggtctacactgactatgtggacctgggctggaagccttatgttcagtcatggctggaaaagaggccaaaggtaaaaagggaattgaggaggcatgactgactagggcggcctgtagtaaataacagtagatggagcatcccttttcgtgcatatctagacagaagtagagccgcttcaacgcatgtttgaaaagttcatcaacaagatactgagcttcaaaaaggataactgtaatgagctggtacctgtccccgagtacagtgggatcatctccctctgtaagctctacacagtcctggccacacctgagaatggggtaaggagaggagccaaccccgggggcaaaggtggaggggcaaagggctcacagcccacccagtttgggcatagcttaaaacagaaacttagaggagagacataagcagtgactgtgtgtgtgtgtgtgtgtgtgtgtgtgtgtgtgtgtgtgtttatgtgtgtgtgtatttgtgtgtgtgtatgtgtgtgtgtgtgtgtatgtgtgtgtatgtgtgtgtgtgtgtgtgtgtgtgtgtgtgtgtgtgtaagcagagagagatacatgtgctttgatgtttgctgagctgaaagtccagactaggaattctgaattaaatatagcaattagtggcgtagctcagtgacagaggacctgcctcataagtgcagggcagaaagaaaagaaagaagggagggagggagggagggagggaggttgagagaaagaacagcccaagaggggtcatagttccctacccatactgtgcataccatttgatgagaagttctagaaagctttcagaatttttttgttgtttataagtaaaataactaaaattgggggcgggggttggttgaaattaaatcattgcctcagaaatgtttcacattattttttaacgatgttaccaggtaacgaaactagtaatatataatgagcagcagttaagatctctacagtgtaagttattcactacagccaggaatggtggcacacaccagtatcacagcaccgaagagaccctgagtccttggccagcttggtttgtatactgagttcaaggacagcataagctatacagcaagaccctgcctgaaaacaaaaaaaaaaagtcaaaaaccacttaaaaaagaaaaatgagctgggtgtgctggcaaatgcctttaatcccagcactcaggaggcaggggcaggtgggtctgtgagttcgatcccaccccggtctacagagtgagttccaggacagcagggctacacagaaaaaaatttaaaaaaaaaaaaaaagaagaaaaggaaggaaggaaggaaggaaggaaggaaggaaggaagagaatgtgggcagcaatactggccttttctctcaccaatgcctgagcagcacactccaccaagtcctgttgcatctcttccgacacacctacatgttttatcactgaatgttgctcacacatggttgtggggagcaagggtctgctggctgcagcaggctcctgggggagctgtttgcactctcagacctcggaggagcgctttggctgtcactaccaaagccctggctcatctaacaaaccagagagtcacagtatgctctcctgcctgtattttgatgagtaagggttgatataaggccaactcttgtcattctggattggacagaatcctgtgatcccatctttatgttttctgtgcactcctggccagccttgaactatgacaagcctcttacctcagcctccccaagcactgtgactgcaaacatgcgccgcttgccgaggtttatctgcagttataagcatccttatccagaatctgttaccaagaattcctccactctgcctgtgcctctgtgatatgtcagggatgtcagaaggatgctgttggtgggctgtttcccagggaagcttgtgcggcaagcactttatcaactgagccatctcctcagctctgtaaaacttagttgttttgtgtgcgtgtgtatgtgtgtgtgtgtgtgtgtgtgtgtgtgtgagagagagagagagagagagagagagagagagagagagagattgtgtgtgtgtgtgagagagagagattgtgtgtgtgtgagagagagagagagattgtgtgtgtgtgtgtgtgtgtgtgagagagagagagagagagagagagagagagagagacagaaaagtagctgtgtgcgtgttttcacatgtgtgggtacaatttgtagagaggccaaaggctgatgtcaagtttcttcctcaatctgtctctactttacaaaaaaaaaaatttctaggtaaataaagtctttcgattcagctaatctagctggccaggtttcctgggtggcctcctgtcccctctaaacactaggactgtcagtgagctgcaacacccaccgggcatttatgtggttgctcggcatctgaatggggttctcatggacttgaagcaagggcttaacactgagccacactcccaaactccaaaactatatttgtaattgtataaatagtcattgaatttatttatttttaattaggtattactttctccccccttttaaaccatgatctggctgtggggccttgaacttgtgactgttttgccttctcactgctggaattgcaggcccaagccaccacagcagccttctaggctgtttgctcctctcttccttcccaatcttggtttctttccccctccacagaagtaacaactgaagcgtgcttgtttgtctaattctaggtcccttaaagtgctcagccaggggaggtggtgcacaccttaatttcagtgcttggaaggcagaggcaggtggatctctgtgagtttcctaaccatctgggtccacatggggagttccagaccagccagagctatagagtgaaaccttgtctcaaaacaaaacaaaacaaccaaacaaaaatgcttgttgacataaaaccccacagatatccataggtgctgtcctgtttaggaagaaattgtggtgtgcatgatggtgcatgcctttagtctcagcacacaggaggcagacacaggtgagtctccgtgagtttgagaccagcttggtctatatagcaagtcccaggacagccagggctatacagagagaccttgtctcaaaaacaaaacaaacaaacaaacaaaagtctaaaaaatagatcacattacaggcaacatgcttgctcgtctaaccaaacctatgtgtgacattgagttgcatattgccatgtgcagacacacaccattgctttagctgacacatgccattactttagctgtggtagactgcaggtgttgtggactgcagcagttgtggactataactactgtggactgtagctgccatggacttcagctgtggtggatggcaggtgttgtggacgttagctgtggtggacttgagctgtggtggactgcaactctgatagaccacagctgttgcagacagcagctgtggtggacggcagctgttgtggactataactactgtggacggcagctgctgtggactgcagctgctgtggacttcagctgtggtggactgcagctgtggtggacttcagctgtggtggacttcagctgtggtggatggcagctgtggtggacttcagctgtggtggatggcagctgtggtggacggcagctgttgtggactgcagctctgatagagcacagctgttgcagacagcagctgtagtggactgcagctgtggtagactgcagctgctgtgcattattccatggtaaaccctacattttactttcccttcctctactggtagatgtttgggtcatctccaattttttgttttgttttgttttttggtttttgtttttcgagacagggtttctctgtgtagtcctggcagtcctggaactcactctgtagaccagactggcctcaaactcagaaatccacctgcctctgcctcccgagtgctggaattaaaggtgtgcaccaccacgcccggctctccgattttttttttttttttttttttttgcagttacatataggtgaccacattcctgtctccttgaacactcatgagtactcctccagggttagcctggattggccaggtgacagctgtgttatgacttagcctaatagcagctgtgagcaactgcagtgaatcccagagttacctaaaatccatgagtagttatagatgaacttcccacacagaaccaggtaggaagaaggtaggtaaggttctctgccttcttggtacatgctaaaatagatccttatcagtgtggctcctgtatcatgaggagggaagattattctaaggccaattcgccactctgaactgctgaacctcttctcttctccacccaggtgaacccagccgatgccgagaactactcctttatggtggagatgacctttgtgttcagcatgatctggtctgtgtgtgcctctgtggacgaggacggacgcaagaagattgacagctaccttcgagaaatcgagggctcctttcccaataaggtcagggcccttccagccagctgccctgtatgtcttgtcaggacctacagggcacccctctggccctcagactccgcctgacctagcgccttggtgccaccctcattgcccgtcagtctgtgagactcagctccaactgggaagagctggagggacgtctggtgacccaacttgtgtacttgtctcttaggacacagtgtatgaatactacgtgaaccccaagatgcggacttggacgtcatttgaggagaagctccccaagagctggcgttatcctcccaagtgagagcagggtccagggtgcgagcagggcttggtggcagatgtggtggggccagaagccagggtgagctaaagaggagaaagccaattccaggaagagatgaccaggtttaggaagttggatctaggggactcgggacagggtcttcaaggagaatgccacgctcccaagacccagaaggctaatgggttggtgactagaccttggtaacaccagaggaagataaatactaagaggaagaaggaagtgagagctgaactggggcaggccaatggtccttgagacgtggtttctctctttctccagcgcccctttctataagatcatggtacctactgttgatactgtgcggtataactacttagtgagcaccctggtggccaaccagaatcctgtcttactggtgggtcctgtgggaactggaaagacctccatagcccagagtgttctccagtccttgccctccagccagtggtcagtgctcgtcgtcaacatgtccgcacaggtacgtgaggggaggggctcagaccaccaattagctccctgccatcttctctcacctggaactcaagtgctcagcttgccccttatttctcggggggggggggggggaggggggaggggcctcacatcgattgtgtgctttcccaccagaccacgtcaaacaatgtgcagagcatcattgagagcagagtagagaagcggaccaagggtgtgtatgtgccattcgggggcaaaagcatgattacttttatggatgacctaaacatgcctgccaaggacatgtttgggtcccagccgcccctggagctgattcgcctctggattgactacggcttctggtacgatcgtgtgaagcagagcatcaagcacatccgagtaagcatcctgagagagacgagctgtggttcccacctgtggctgggcccctgggccacgccctctcatcgtcccaagttcctccctacacaagagtgctctgctcctttctgaggacccatctatctggctcccaagttactgaccccatccttaactctcctcactgagcccgtctgtaccacagcccatgcttctctcttccatcctcactctcctcctatgggattaagaacatcttactgcttgccccgcccttgccccccttttctctccagagttgttttcctatatagtcctgttacttgcaatgtatgctatgtagatcaggctggtctcttgaactcacagaaatcctcctgtccctgcctcccaagttcagggatttaaggcatgcactactgcggcctgccagcatgcacccccagcatttgcacatggaaacattcagaggcctctggcctagctatcatgaagcctcattaccccatctctcactgtcccacctgtctctctcccttctttgtctttgctctccaggacatgttcctgatggctgccatgggccctcctgggggtggacggactgttatctccccaaggctgcagagtcgcttcaacattatcaacatgaccttccccacggtgaggccatgggggttggggaagggcttgtactgggcaaaaccattccagtcccttagaatgagggactgatgggactgatcaagcaagggggccgagcctccagcagagttgcatacagggagctgtgatacatggcagtgggacccttggcatctgagccaggacagctgcagggtttgtaagcctgccctgctggctctggaatgtggagcctgccgtctccatggccacatagagaatgcctggggctgaaacaaactcagggaggtggaccttacagagttgacagccaaaccagcgccaggggtaggggcagatgaatacaaatgtaaggggactcaaaataagccaataaaacgctgtcaggagaaatattctttttttgttgttttgttttgtttttagttcttgagacaggatctcactaaatgtagtccagaatggcttttaaccctctctagctcagcttcccaaacggcaagtctgcaggtgtgtgtcactagcgtgagtgtcactagtgtgggcatcactactcacatggccctgtctgtcctggaactcactctgtaggccaggctggcctcagattcatagagatagacctgcctctgcctcccaagtgcggggactgaaggcgtgtgccactacgcccagcttacacttgactcttaattaaatattttctttaggttaaaattaatgggcagcaggtaaaggcacggcccgcaggccccgcccccgtggctggaggagaaaggcttcttccccagattggtcctgtgagctccacacgtgctgtgcacacacatggccatgcacatagaaataaaattaactttaaaaaataaaatgagccaggtgtggtggcacacgcctttaatcccagcactggggaggcagaggcaggcagatttctgagttcgaggccagcctggtctacaaagtgagttccaggacagccagggctacacggagaaaccctgtctcggaaaagaaaggaaggaaggaaggaaggaaggaaggaagaataaaatgaatgtaaaaagttcttgatgaacaagatgcccaaatgttacatatagtggtcagtaccgtgccttacagagccatagtgaagcccgagacaagtgaaagcaccagcgttaccggcccatctttagttaggatgtttgtgtttattgcagataggctgcataactttttcatttttaaggattatataatagcatgatgtctcctaactagtggtttatttatttacttactgcctcttcacttgtgctcctgaggggagctctgcatttgcctcacactggtcctggccctggctaccctttgagtttgaggcctctctctaggaatcccagatcatccgcatatttggcaccatgatcaaccagaagctccaggactttgaagaagaggtgaagcccattgggaatgtggtaacagaggccaccctggacgtttacaatacggtggtacagcgcttcctgcccaccccggcgaagatccattacctcttcaacctccgggacatctccaaggtaagcgttggcctgagcccctgctttgactggctcatcctcctcagcatttccttcttaaagtaagccttaggcgctccatggcagggctagagaaacggctcagcggttaacagcactggctacacttacgctggacctgggttctgctgccagtgcctatgtgcaactcacacctgtatctaactccacttcttccactgcacacatgtaatacacagacatacatgtaagactcatacttataaaataaaaagagatcttttaaaaaagaagaagagtggctggagagctggctcagtggttaagagcatttgttcccagggtttaattcccaggacctgcggggaggctcaccacttcctcaggcaccaggcatgaatgcggtgcacagacatacctgcaggcaaaacattcctatgaataaaatagatctaaaaaataagaaggaggaagaagaggaaaaggatgaaggaggaggaggagaaggaggaggaggagaagagggggaggaggaagaggaagaggaggaggaattccatagcagggggctgaggagatgtggggggtcagctatccattgctttctggtcttctgtttgtttgcagtttttgttgttgtttgtttttgtttgtgtttgagacagaatctcgctttgtagctctgactgtcctgaaactctccatgtagaccaggctagccccaaacacacagcatagtgatacacttgctcctgctcctgggtgctgggattgatgcgtgtaccaccacgcttgggtgcttctgctctgtagaggcctgaatttgctctcctgcacccatactgagggactcataacctctgggaacttcagcttttgggaattcaatgccttttctggcccttgttggcatctgcacatatgtcacccccccaacacacacacacacacagagacacacacacacacgttcatatgtacacataacacacacacacacacaaacatatgttcataatacacataacatacacacacacataatctttttaatctttaaggaaataggattcaccgggcagtggtggtgcacgcctttaatcctagcacttgggaggcagaggcaggcggatttctgagttcaaggctagcctggtctacagagtgagttccaggacagccagggctacacagagaaaccctgtctcgaaaaacaaaacacaaaaacaaaacaaaacaaaacaaaacaaaacaaaaaaagaaaatagggttccacagcaaagcacatgcctaaagtcagtctgctgaaatgccacacattctgctcttgccttcggatcttctgcaaagaaactctttcctccctctacttcaatgactgcttcaactttccaggtcttccagggcatgcttagagccaacaaggactttcatgataccaaagccagcatcacaagactctggattcatgagtgtttcaggtgacatgtctgggtgtcctggccagactgtcccccccccccccccccagccccagccttgtcccaactccagccttcacctctggcttgacttcacttcccagactgagatccattccaactatttcccaacagagtcttctctgacagactggtcgatacagcagacatggaagcctttatgggcatcttaagtgacaaactcggtaccttctttgacctcacgtttcatcatctctgtcccaacaaacgccctcccatctttggtgagccaggagctggggcatatttgggccttagggagttggggttagaaggtcagggcatggggctaatggccctaagggacctctggggaggaccaagcattggggatgctgatgtccttctcctgtggcccaggggacttcctgaaggagcccaaggtctatgaagacctggtagacctgacagtattgaagacagccatggagacggccctgaatgagtacaatctgtctccttcggttgtgccaatgcagctggtgctcttccgagaggccattgaacacagtgagcgctcgctgcctcctgcccttctattttccaaccttggtttcccctcgaaggccactcccaaatcaagttctagacatcgttttcctttcaggtccgaccagtgtggcttatttatttattcatttggttttgagacagggtcttgctgtgtagccctagccagcaagcatatcgccggttaaagcaaaccggtcttaaacttgtgaccctctgcctttccctgagattacaggcctacagcaccacacctatccacaagagtgttaaatgggcaaggtgtaggttaagtgctgagttgccatcagagccttaggcaccaccctctccactcttacttcttgacttctctaattcagcctcagaggttttgatccctagcccggggcctagaaattgcttggatttataaacccagtgcgttaccctcaccccgctccccagtcactcggatcgtgcgtgtgatcggacagccccgaggcaacatgttgctggtggggatcgggggcagcgggaggcagagtctggcccgcttggcgtcttccatctgcgattataacacgttccagatcgaggtcaccaagcactaccgcaaacaggagttccgagacggtaaggctgggttcctgaccatgcgcagaggtttcaggatgaaagataagctgcttgagttactggccctggcctttgtgttctgggagtgcttatggctgtgggagggtcctccaactgagaggctcaggatggggagtcgcaagtaagtcttttccttcgcccttcacttgtttggccagatatcaagcgcttgtatcgacaggcaggggtagaactccagaccacgtctttccttttcgtggacacccagatagctgacgaatccttcctggaagacatcaacaacatccttagctcgggcgaagtccccaatctctacaagtctgacgaatttgaagaggtgaagttccttcagttccgagttggttctttggttttcctagctaaccaccagcaccccacagattccacatctgtttctgtagcatccccagcctcccagatcagtccctgtgggctgaagcctgtttctcatcagtcatcccctgagaggcctcactgggcgggcggggttgctttaactcccactccagtctgccagcctaacctgctttcccgctgagactgtggtgagaacttcagtcctctgatacagtgtggtttctgaacagatccagaaccatatcatagaccaggcccgggcagaacagataccagaatcctcggacagcctctttgcatacctcatcgagcgcgtgcggaacaacctgcacattgtgctctgtctaagtcccgtgggagaccccttcaggtgatgcttcctcggttggccggctccccacaggctcccgcctcggcttttggctttctgtgttctttggaagttagtgcgtcccatgtgacttcctccacagtttaggggcgttacccacattgttctggaacagccttttcatcctcccagactcaaagtcttttcccagtaaagaacaactcccctcccccagcttccagaaacgaccttcctgctttccatctgtctctgatggcctttgatggccttgtgcatgaacggtgcggtgtttgtccttttgtgacgcacttccttcactctatgatgtccttgaggttcatctatattgtagcatatgacaagtttccttttctctttttaataagatgaatagaattaacagtatgtgtacaccaaaaaaaaaaaaattttttttaacccattctcagtatgactagatatttcaggaccacggaaacctgaaggaagaggcctagtgtggcagtacacacctatgacctcaggacataggcgggcaaagcgagaggactggtgcaaatctgagaccagtcccggctacatagcaagcatgagagtagccagggtgactgcatatagtatctgcatatgtgatgccctgtcttaatgggacgtgggcagagcagatggagaggcaacgtgggttgccgttttgcttatgtttttatttatggtgtctagtatattttacttagcacagtcaggtgccgtgtagggcattcttcttgggtcaccttaccaaattcctaacaaccttagcatagactgtcaatctcctgctagagatgaggaagctggggtttgagagtgttagattctcctggctcaagatcaacatctagaaaaatgtggatctgagaccatttctcaatgttatgcagagctatctatctctgaggaggtaaatctggagggaggagccgataggaagaggacagggcctttgggtcaccgcaaagcggatggggcatgtgttgctagaaagctaagggcattgtgagtagacttaactctccttgacttcctcctaggaattggattcgccagtacccagccttagtaaactgtacaaccatcaactggttctcagagtggccccgagaggccttgctagaggtggctgagaagtacattataggagtggacttggggacacaggagaatgtgagcctttcctctgacacagccacactccccctcattgctgctccataccctgacctcccattctgtattattggcttcagatccacaggaaagtggcccaaatctttgtcaccatgcactggtcagtggctcagtattcccagaagatgctgttggaactgcggagatacaactatgtcacacccacaaactacctggagctcgtgtctggatataaaaagtacgaaagccaagagacccggagggctggggtgttggtgtctttcgaagatgctgattggtaaagtgatggcctggaaaatatccaggatctggctcaggggacaggctggaggttgtgggcactgtggggggtggaggggcaccgagggtcttagttattcccagaagtgaattagaagaggaactcactcctgttgagaaggcctttcccagagtccctccctggtcttgtctgtcccccaagctataacaccgcctataccctgtctgtccgtatgtcctggacatgtcctgtagttctcagaccaccgtttacatggagtttattataacctttgtaatcctctactctctccctctaatgtcccttcgactggccattcctgtgaaatgggtaggtgagatgacacatgcctatagactccccacactaggaaagctgacatgggaggattatgaattcaaggacagcctggctacatatcacgaccctatctcaaaaatgcacaagggctgggaatggtggctcatgcccttgttctcagctctcaggagacagaggcatggagatccctgagagtccaaggccagtctggtctacaaagtgagttctaggccagacatcgctacatggtgagaccctgtctcaaaatcagtcagtcagtcagtcaatcaatcaatcaatcaatcaaattaaaaccacacaagcaaacagggctagccttagcacacacagcatgctagccttgtgttcctaccacagcataaacctcacagtggtggcctatggtgtaatctcagcactgggaaggcagaagcaggaggatcacaagttcaaggcccacaggggattctagttcagcaccagctaaggccagtttagactatatgaaaccttaacctcaaagcaaaatacggccaaaacaaaacaaaacagtataggcaagcaaagcagataaaaaaaaaacccagaaaatttgaagtgtgattttctactttcatatctaacccagtatttcagtttgaacaccaaatgtgtgggcagatttcccccccaaacaaagcagttcccccccaaaatgaccgtgtgtcctagaatttagcttaatcctacctgtgtactaggagctggattcagattctacgggttaaggtttcagtcccagttctgactcggggaccaaagcccaggcggtttttcctgtgtatccgtccgctcctcggctttgccgagctgtggcttagccgagctgtggcttagccgagatgtggcttagcccagctgtggcacacactatccctggctatggcttagccaagctatggcgcacactgcccctggctatggcttagccgagctatggcgcacactgcccctggctatggcacacattgcccctggctaatgatgaaggatgctttctcttacttgacttctcctgagacaatgtttcgcatatatagcccagcatggctttgaactcactatgtagctgatgccagcctcaaatccatagcaatccttttgccttggcctcggtagtgctggggtcacacgcacgatcccctacatctaccaggattgggtattttaatcaatttttggaggaaaaagcaatttgagccaggcagtggtgtcacacacctttaatcccagcactctggaggcagagacaggcagatctgagttcaaggccagcatggtctacagatggatttcaaaaacaaccagggctacacagagaaaccctgcctctaaataaacacataaatcaataatcaatttgtaagaatgataatcaacatcaattcttatcatgtgctaagcactattttagagtaatataccagccctgtcttcctggacataccaatattctgttcttttctatttgccaaacattttgataaaccctttagtccaggaaatgcccatacctttcttttaaaggaaaaaaaaaatccatatttctagattcttttaaacaacagaaatgtaacaagcctgtggctccattaattcctctatggagagaggcaaaaggggggctcacttgccctcttgggtgggttcatgttttctgaaccattatggtccagccacctgctgcacctgtgggcggtgaaagggccccaggtagaggaagcggtgagtcaaaatgctatttagcaagctgatttcaagcatggtatagagaataaatcagagtaatgagacctgtgaggaatttgttggaaaaagacctgaccagcctatgtatctgtatgagagggcaggaggtgagcacagaaagagagagaggagccgagatgttggagaaaggaagattctgtaggacacctcctacctcggagtctctccctacatacaacttactgaaagctcctctgcaggcttctgggagaaaagcggcaggagctgctggaccaagccaataagcttcgaactggattgtttaagattgacgaaactagggagaaagtcgaagtgatgtccttggagctggaggacgccaagaaaaaagtggcagagttccagaagcagtgcgaagaatacctggtcatcattgtgcagcagaagcgggaagcagatgagcagcagaaggtcctgcgccaccccatggcccgctcctccgcgcccccccccccccaaagagccttcctgcccagcatccttggtttccctgtcttccttctcaccagccctatggctcccacctctgctcaggacacagacggaactctttctcttctttccgtctctaggccgtcactgccaatagtgagaagatcgctattgaggaggtcaagtgccaggcgctggccgacaatgcccagaaggatctagaggaagcattgcccgcccttgaagaagccatgcgggtaccagaggctggcactagatggtgccaggaatggggatgggaccagccttctttgaccccgggagtctctggggaagttgggggtgggggggagaaggtgacacctcagttgggccgtgtccaggaaggactcatcttgccttctgagttctctgagtcagtccctttgctcaggccctagagtctctgaacaagaaggacataggtgagatcaagtcctacggacgaccccctgcgcaggtggaaattgtaatgcaggcagtcatgattcttcgaggcaatgagcccacgtgggcagaagcaaagcgacagttaggtaagccgagggcattgtgagaaaagacttccacttgtccggtgtttattgatcaaatgtagggcatcagaccttcagggaagtgctgcagaggccctggggagcacagggcttaggagggagcgaagacctaaatatgcattagaattctttaggaggacagagcagtagccagctcctcacaccacaatcaaaagaacattgatctgaagccattagaatgcatggcaagagccagaatgccttcgtcccccatggggacaagagcagaaaatgagaaatgactcttctctctgtctcggtttctctgtggctggctctgtctcgctcccttgctctttctctctctgtgtgtacacacaggtacgcgcattgtagggggtgagcctgtatgtgtatgcgtgcttgcatgtgtgtgtgtatgtgtgtgtgtgtgtgtatgcatgcatgtgttgtgtgagacagggaatttgactgagatctggggttcactgatcacctagggtgattgaccagagcactcccgagattctcctatctgtctcccccaatgctgggattctaggtgcttgggaccgtgcctggctttttatttaagtgtttgagattgaactcatgtcttgatgcttgtgctgtaagcactttataggctgagccatctcgcaagcctctggactctatctttattttgtgactttgtctgctttgggttcccacagcagaatgtagtattcccccaccccccacccccgcaccctctcccacccccccaaaggcagttttggcccctagaaagttttggcacatagaaagaatgctatggtgggtgatgtaactgattttgttaagggactaggagaccaggctggggagactgaggaggccttgggggctgagaggacaccagaggaaggagcaagattataaggggtcaaatgtcttggccttgggaactgagaagcgatgaggagctgtggtaaagctgaacgaggagaccacgatcctcctcgatccatccggctgtttggctgaggcctcaaaatgtcctcaggggagcagaacttcatcaagtcattgatcaactttgataaagacaacatctcagataaggtattgaagaagatcggggcctactgcgcccagcccgacttccagcctgatatcattggcagagtctccctggctgctaagtccctctgcatgtgggtgcgggccatggaggtaggtgatggtagaagtgagtgggaagggagagggtggtcctggggaagctggtgtgtgtgtgtgtgtgtgtgtgtgtgtgtgtgtgtgtgtgtgtgtgtatgttggcgggtgagtgggctggcgggtgagtgggttggtggttgatgggagtaaccaatgcctgtctgtctttccacagttgtacgggcgtctgtatcgagtggtagagcctaagcggatccgaatgaacgccgccatggcccagcttcaggagaagcaagcagccctagctgaagcccaggaaaagctgcgagaggtaagcctcaccctggtctttctgcggccattcctctctgtctcagactctttattcccatgttcctccacctaatcccatgcagtaggactctgctgccctacagtgttgtactgtctctcccctgctccatgtcctgtttagatctgtgtgaagcttgggcgattgcacagggtgggagaggctcccagggctctgtcgtctttgtgggcccaggagcccttccagagattgacagagtgggttacctctgtcacagcctttgtaaatacgttgtgggatcttgactaactgcgcgtgggctttgagtaaatctacaacagtgggagggatcaatagtgtcaggatggcaactactggtctggaacagcaggatggtgtctgtgccgcggtcaggttagggctttccaggagctcgaggtgggggttagttactatgtgcagggtagacaagccaggcaacttcctacaagatatgtgcacagtcgactcttaaatcataaagaacagtcaagtgctactatcaaaagaattcagaattctgtcatttgattttttttttaaaatcatatgtttaatagataatacaacacatgtggcggtactcgcctttaatcccagcacttagaagaaaagacaggcagagctccatgagttggaggtcagcctggtctatataatgagttctaggacagccatggagggaggggggagagagagagagagagagagagagagagagagagagagagaggagagaagaggagagatcaaccctgtctcaaacaataacagcaacaacaaaatccctaaataatatactcacattgaaattagttagtttgaaattcaaaaggtacaaaagaatacacaagaaaaagcctttccccacaagaaaacggcccacggaatcaaccaaccagggctcatggggctcacagagaccgtcagggaacctgtgtgagtctgacctaggtcctctgcatatgttatggttgtgtggcttggtgttcttatgggactcctaacagtgggagtggaggagtctctgactcttttgcctgcttttagaaccctttcctccctctggatcaccccattcagccttgatttgagagtatatgccatatatggttggtattctcaggatgcctgcctttttctgaagggaaactgaggtggagtggatctggagtataggagaggttgggggacagggactgagtggaaaggggggagggggaactgtagttgggatgtaatatacgagagtagaataaattctttgtgttttcaagacagggttcctctgtgtagccctgactgtcctggaactcactctgtagaccaggctggcctctaactcaaactcagaaatctgcctgcctcagcctcccaagtgctgggcttaaaggtgtgtgccaacactgcccagcaagaataaattttaaaaagcttctttcccaccttctgctctgtagcacccaacttctctccatgaatgtgcagccaattttcacaaaatcttgtccacccatctaaaactgatctatgttcatatcagtgcacatgcaggggcgcgcgcgcgcacgcacacacacacacgcgcacacacacaagcatacacacacaaatgcacaaacatacatacatatttttacatacttgtgatggtttgaatgagaatagtcccattggttcatatatttgaatacttagcaagaagtggaactctttgaaaggattaaaaggatcaaaaagtgtggtcttgttggaggaagtatgtccttggctgtaaactttgaggttttaaaagcccatgccagagcagaaggcagtagtggcacacaccttcaatctcagcccttgggtggcagaggcaggcaaatctctgaattcaaagtctacatggtgagttccgggcagctgggactatacagagaaacccagtctcgatttaaaacaaacaaacaaacaaacaaacaaaacaaaacaaaacaaaacaaaacccatgccaggccattctctgtcactctcttgctctctctcctctcacttgctagctctctattacccatggatcaaccactgctccagtgctatacctgtctgcttatcaccatggtgaccatagagtaaccctctaaaggagaaagagtaagcccccagttaaatactttttctataaattgccttagtcatatgtttcttcacagaaatagaacagtaagacagcacagcagtgtgtgcgctcgcaaacacacacacacacacacacacacacacacacacatatttatattacgcatactgtctggtgtcttctttgcttacctgtaggatagttgccaatagagctgggctaggcaccatgtttgtgactcgatgatagcctaccccagcccttagctgatctctgtctcttcctatcatggtcatttttactgtccggaaatatagcttgccctctaggcctcttccggttctgcctgtgcagagaagccatccaggctcctaggcatctgtctgtgcacatccctccatccctccatcctgttggcataaccccttcctagctctcacaagccttcttctccctcactgtctcttttcccggaggtcggaggtcagaggtcagagccgcaggtgaggcaaccctcttggaaaggctacttacccagatgagtcacatcctgggacaagccattaagttgttcctttgattttaaacaatggaacctctggagttccgttgctgccaatgattcattccttagataaacagagttcactctgttaggactcttagtggatgagccacacgtgctcaacagcaacagcttggtaagaggaagcaggagagctgtgtgctgtgtgtgtgtgtgtgtgtgtgtgtgtgtgtgtgtgtgtgtgtgtgtgtgtgttgggggaggctatcatctgatcctagatattcaagcctagccagaacaacatggtgagggccctgtctccaaaaacaaacaaacaaaaaaagtaaatgggggtggggtgggagggcaccaacatttttccctcgctgctgataaaggttctgaaacttaagagtcaaatgaatctctttttttttaaattactttttaaaaacttttaattgattctttgtacatttcacatcaggcaccccaatcccactcgtttccccagccttctatatccaccctttgcccttgccacctccctcacaaaagaaaaaggaaagaaaaatctcattgtgaaagctgtagtgtatcacagtgtgtcatacagtgttcccttttgcccatacttcttcacttgtaaacgttcattacagcaacgggttggtctagtttgaagcctctggcttctgctacactcctctcactacagtgttgttgccctgtatcatagagactctgcagatctacagccccttcataccctccagcagttcacagatggagtagatgctggggtgagccagcacagagccctggatctgggcctggctggtagctgagtgtgggtcagtctgccagctctcctgagcccaaaccaccaaggccagctctccaaaacttccccggctagctcacccaatgtggggtctgacaagaagcaaagcctgctagcccactcccatgctaggaggaccatctttagtgtggcgcccaggtcaggcacacggcctgctctcctgagtgagctgctgagggggcagggccagctctcccgctctcccactcttctgaccgaatccatcgcacagcatgaagaagagacagctctcctgctcccatacctttggggccagctctcccatgatgcccaggagagggtggggacagctctacacagttctcatatatggcagcccagcccaggaatatccacctagcctttggtggtgacataacccctctactgcagagctacaaatccagctcttaacttggtggcaacacaggccaggacctcaccatggtcccaggtggcatcactggctactcacatgaggctgttcctcactaccctcaagtctccagttctgcttctcttcatgagcccatgtccttctgcttctctttttcttccgtctctccaccacttacgtgctcctcttaatggcacccgggacctctgggtatctagggtatctcaggactgctgtgctccacctgtgctatatgggatgggggggggggcgtcatcttagacatagtctgtcctccaggctacgtgacctgcttgcttggtttttggttgtttggttttggtttgttttattgaggcaaagtctcctttagcccaggctagccttgaatttgctgtataaccaaggatgaccttgaactctcctgatcctcctgcctctaactcccaaacgcagagattatagatgctggggtcaaacccaaagctctgtgcatgctatgcaagcactcatccaaatgagctgcgttcccagccctctagcccttagtaaacatttttcataggttctcccttccattgcccaggctggccttaaacccactctgcagtcctgagtcactggacttgtcattttcttacgtcagcctctcaagtaattccctgaagcctggcaggaacttcttcacacaaacaaacaaacaaacaaacaaacaaactccgtgttttgtgtggggtttgtactggtacacgccagcacccagagggcagaggtgtcggattttcctggaaccagagtactagacagttgtgagctgccctagcaggtgtcgtgggtgttaggaatcagttcttctcctttttaaattactctgtgtgtgtgtgtgtgtgtgtgtgtgtgtgtgtgtgtgtgtgtgtgacagagacagagacagagagaatgtagaagccaaaggacaagtcacaggagttggttcttcccttccatcctctaggctttgggaattgaattcaagttgtcaaacttggcatcaagggcactgaatcttgctggcttgggatggccaagcagccattgttgctgctgctatttctttcttctctgctctctctcctcctctcttttttctccccactcctcacgattctgttttgggatagtctcgctttacagcctaggtagactagactggccttgaacttgtggggattctcctgctgctgccttttaagccctagagttacaagtaggagccaccatttatgacagagcctcttttggggggttactaatgtcatgcatgaggagtcctctctcatgagcaaatcacctcccaacatcacagcattgaaataactaaataaataaatgcccgtggtcacactttaaaaaagataaactagttttcctaagctagtgtgtctctcccagaaaaagggtatagctgcctatagtggtgcacacctttaattccagtatttggggggcagaggcagggggggtctccatgggtgagctccagcacagctaggactatatggtaagacctcatctaaatcacagaagcctgaggaatgcagaggtggggagggccaggcacagcagttggttatcctgcatcagatggtcagccctgaaaacatacatgagtaatagtgtgtagactgagcaggctatggttgggaatatatatacatatacctacacacatacgcctgtaaacgacaattgaaaatgagatcacaaacttgagttagagcagggaggagtttatgggagaagttagagtgtttctcaacctgtgggtcaagacccccataataattataatagttatgaaatagcgacaaaatgattttatggttgggggccagcacaatgtgaaggactgtattaaacggtcatagcattaggaaggttgagaaccactgctctaagaggaggaaaaggtgggagaaatgatgtcatattataacctcaaaaataaaagaaagaaattattttggatttttgagacagggtttctctgtgtagccctggcagtgctggaactcactctgtagaccaggctggtcttgaactcacagagatccatctgcctcggcttctatagtgctaggattaaattcatgccagaaaaacaattttttttttttaaagagctaaaaggttgtcttagttcaaagtcaggtttctcaatgagtaccatttaggaataaaaagaaacacaaacatttcacctccaatacccactccttctcccggaacaggcgagagggggctggtgcccaggcctgggcaagaagagtcagggcacctacaggttcaggcttgaagttcatttattgatgtgttggacacaataaaaccaccactgctgaaaacaaacaaacaaacaaacaaaccaccagtgatgttttgccaaagaccacagtagaaactcagtagtgcctgaaggaatgagggtcttggaggccatcttggatttagttttgctggagtttcaattatcacgaaactgtgaatttaagtttaatgaggaagcctccatcaataggttatataagagatacaacttaagcaatgagcatttgccacagtagggggtatgaggaaacacacatacattttattatttttttggaggtgagtgtattatagttattttaaaacataaaatttatttacctcgaagtatatatcaagtcttttttttttttttttcttttttttggtttttcgagacagggtttctgtgtagccctggctgtcctggaactcactctgtagatcaggctggcctcgaactcagaattctgccagcctctgcctcccaagtgctgggattaaaggcctgcaccaccaccgctcagctatatcaagtcttttaagcatttttaaaaaattatttcaaaattttctgtgtaaaggtattttgcctgcattatgtgtgtgtgtgccaagtaagtgtctggtacccacagaggccagaagatggcatcagatgccctggaactggaattagagacaattgtgagttgccgtgtgggtgtcgggagtcgaacctggatccttttgcagatcaacaagtgctcttaaatgtggagccatctccaacccacatacagtcggccctgaagtgacgttaaaatgcatccaccatgttatccagccacggcattgctcctaatggaaatcctgatacccttttaacttctgtttcctctgttgtgtctcgggaggtttgattgatgtctctccttatggaagctgaggctgataaagatgtcacagggaagcttttgcctcctcccacccacgcctcctttggcgaccattctcactttggtaacccaggctggcctggcaccatccgtatatcccaggctggccatgaccttgtgatcattctgccttagccacccaagtgccgggatgacaggccaccccactgtgcctggcttcctatctttaactggaaaactgctgacaacagttctgagtggaagttgctggtggtgccgctgaggtcagtaagtgtccaggagtctcgtgggcgagtaagctctgataccagagttgttgtgggcgagcaagctctgacatcagagttggcttgccagcttctcttctgtggcttgtatttttctgctgtgctggagtgtgaacccagggcctggcccatgccttctaccaccgagttactctatatcccagcctcgtacgttgtttaccacgcttcaaaaggtctctgttctctatgcttgagcataatctggtcagtaccaggtcgattctgggctttaagagaagggagggagagagggagggaggaaaatgaagctcatctgacataatagtcacccccccaccccgtcactcactcattgatacacttcaatatgtgggattattttatacacgagggaagcagagcctcaaaaacacaaactgtaggatatgaacatgcgcacagctcctatctagagtctaggcctcctcttataccctgatgaggcagctggcttttgaacttctgagtgattctcctgtttctgcctcccatctttcccgtagagtgctgagattccagatgtgcacctctgcgcgcgcgcgcgagagagagagtgtgtgtgtgtgtgtgtgtgtgtgtgtgcatgtacacacatgtaagcgtgcgagagcatgttcagagtattatgtcaacttcattggccctcaaagagattaactgacccaagggcaggcagcttcaagtggcaaagtcgggatttgacctaaaacagcctggccttgggccctgtgtttctcatctcccacacgccaatcgttcctaggtggcagagaaattggagatgctgaagaaacagtatgatgagaagctggcacagaaggaggagcttcgaaagaaatcggaggagatggagctgaagctggagcgagcaggaatgttggtgtctgggctagctggtgaaaaggcacgatgggaagagactgtgcaggtgagatgggtggtcccacgccactcaggaggtccatctccgtgtccacggagagagagtaggaaaacaagagcacattggctgtagggaatcgagagtagaaatccctccccttctcacgtttgatgagagtatacagggaatggcatcctgaacacatggtgagttccatgcaggaactagaaggcacacaagacctcttagttaacagcttgtcttcctgagagataacagactggggtcatcttgtctctatttcacagaattcctggctccctgcaaggggtagatcttatcagtggataattagcatacacatggctgtccgggaccaggactccagagtgattgagttctcagcctgaagggatttagaaaagggagactagctttgatctagaccagaatcaaaggagcaaaggagactgtctttcaaaacactctagcttatctccaaaggtctgaagccccaggcgcttatacctccctctgtacaccagggcctggaggaggatctgggttacctggtgggcgactgtctgattgcagctgcgttcttgtcctacatgggaccctttctgaccaattaccgggatgagattatcaatcaaatctggatcaggaaggtgagaagggcccaggggttacagggaagcacttggggtgtgcaggcaagagacagagctgctgaattccggctgaattttggggttcttctctcctcagatcagggagcttcaggttccctgttcacctcgctttgccattgataacttcctgaccaatcccaccaaagtccgggactggaacatccaggggttgccctcagatgccttctccacagagaatggcatcatcgtcaccaggggcaacaggtgagagccttgtaggggagggagaggcaggggaggagcagaacctgtctgctgacaggggcttcctctttcaggtgggccctcatgatcgatcctcagggccaagccctcaagtggattaagaacatggaaggaaaccaggtattaggctgggctgccccaggagagtcccaggcctagtcttttctcaaggtcctgcccttggcttgtgtggtcctccctgttgctctcatccatctgtccatcagtccatccatccatccatccatctatcccttgctctctagggccttaaaatcatcgacctgcagatgcatgactaccttcgagttctagaacatgccatccagtttggatttccagtgctactccagaatgtgcaggagtatctggaccccacgctcaacccagtgctcaacaaatctgtagctcgaattggtcagagcctaggcttattgtgggcaggtcctagagacactagggtgggaagtgggggctctttcgggctgcatcccatgaattaggcgtcagtgaagcaggctgagtcacatctcgggcctaggtataagaaggggggtggggcagccttactggatcacagaagactctcgtccttgaccctcccgctgacgcaggtggtcggatgctgattcgaattggtgacaaggaggtggaatacaatcccaatttccgtttctacctcaccaccaagctctccaatccccactataatccagagacttcggctaagaccaccattgtcaacttcgctgtaaaggagcaggtagatttgggctgaagccgggaaggctggagaggccgtaagaaacacgcacacacaaaaagaccaaacttgagctgggtgatggaggacgaggtcttaggaaatctaaacgtgtggcaggggaagatgccatcggcaagggaccctggccctgagtcttgacctcctcagggcctggaagcccagctgctgggcattgtggttcggaaggagcgaccagagctggaggagcagaaggactctctggtcatcaacatcgctgcaggaaagagaaagctcaaagaactagaggatgagatcctgcggtgagaatatcatccccagcccccacccaagcccacccaccttgtctgttcccaatgggcatccaaccagcaccctggggagccaagaggaatcctttccttccagttgaacctccctctcgacttccccctagcttgttgaatgaggccacaggctctctgcttgatgacgtgcagctggtgaataccctccagacatccaagataacggccaccgaggtgaccgagcaactggagaccagtgagaccacagagatcaacattgacttggcccgagaggtgaacccctgcaccctccagtcccgtccctgaccagagccaccaagaagtaacttagatcgtgttcacttgcgacccctccctccccgagctcttgggtttgcctgcctgcccctctgtagtagccctgactctttttgacccctacaggcttaccgtccgtgtgcccagcgggcctcggtgctgttctttgtgctcaatgacatgggccgcattgaccccatgtaccagttctccctggacgcctacatcggcctctttatcctcagcattgacaagagccaccgcagcaataagctggaggaccgcatcgagtacctgaatgactaccacacctatgctgtctacaggtctggtgaccctgcacgaagcccttcagcggtggtgtgagatacaaatctgggggccaaggggttggaaaagagccggctgggtaaattccttgctgtggacacacgaaggcttgacttcagagcccaggcacctacatcagaaactgggtacaagctgggtagtgctgcatgcctttaatcccagcactcgggaggcagaggcaggtggatctttatgagtttcaagaccaatctggtatacagagcaagttccaggacagccaaggttacatagagaaaccctgtctcaccgcatccctcccctcaaaaaacctaacaaccaaccaaccaaccaaccagccaacaaaagctgggtactgtgtggtattcctgtaatcccagtgctggggcgataagacaggtgctacgccattccagacggccggtccagctgaattgatgagctctaggctcagtgagagatcctgcctcaaaaaacaaagtggggagagcaactgaggaaagttaaataaccctgtttctccacatgcactgtgcatccatgcacacccactaccacacatgaacacacacatagatctatacacagtagatacatagacacacacacacacctgatatctgcccccaggttgggattcaggaagtctctggtaggctctgtgattttttgttgttgttgttgttttgtttttttgtttttcgagacagggtttctctgtgtagccctggctgtcctggaactcactttgtagaccaggctggcctcaaactcagaaatctgcctgcctctgcctcccaagtgctgggattaaaggcttgtgccaccacggcccggctgggctctgtgattctttaatcagcttccaaggagctgtcgatcctggtctatttcatctttcattgaatttttaaaacttacattcatttactaattctctgtggaaggcggcatgcacatgtatggcacagccagcctgtgaagatcagtggtcagatgacaggaggccgttctctcttcccagcctgtgggctctaggggatcaaacccaggtccccccaggcttggcagcaggctcctttagctgccgaccaccatggcagcctgtggatcacattttggacagcggagtacttctcttcctggactcctctacagacccatcaagtccagcttgtttcaggtcgagggtggacttgtgttccaccctcttttaccagggtcctcatctttgaatggcacagctgccaacccacgtcacacccatgccagcaacttgaagttgctctaattgaccagctcaaggcagttgctgggttcttcttataggtatttctgatcccgtccccctccctgccccgcctaccagggctggaccttagtgcatattttcacagaaactgcacagcatctctcccccctcccgcccccagtagattaccctgcccctgtgtccctcctagtctgttctccagttgtgggtgtctgtcagactaccaggcatgaaaatgaccctgttgctcctggcttaacctctttagtggttgtcatatcttgagggatcccgaaaggcctctgtgacctggcctccccctgcctcagtttgtcaccagctgtgtgggcagcactgctaactctcaccccgtgtgtgccctttccccctgggcattccttgccctttcctcctgggctttccttgcactgcgagtcttccctggaacactcagctgtgcctctcatgtcaccggataatccctacacacctcaagacacctgctctcaggatcagacacagctgggcaccatgcctttcagttccctagacaccactttgagctcatcatgacggcctctgggtccctatgtcagagcacgctgcctccctgctgagctgtgatttcctcacggacctagaccatagcttacttatctgtgtcttcagggctacagagtgcccagcaagatagtgagagaaaaatcaatgttttgtttatttaatggaactaaatgcctagttatggatggacactgggaaaactcaatctctcaaggcccccggggccttggttgtttccaggaggtttgggttagacgctggctacagtcctcctgggtaaggctgtgaccgttacccactgagcgagcattcgtgcggggcaactcaccccacattcctccaccccctccatcttccctgcccattcctctgtgcctcccaggtacacctgccgaaccctttttgagcgccacaagcttctgttcagttttcacatgtgcgccaaaatcctggagacgtccggcaagctcaacatggatgagtacaacttcttcctgcgtgggggtgtggtgagttggtgggagggcacctccctgcacgggggtcacatggggatggcagcaggtgtgtggaggaggccaagtcagagggagggcagaatcgaaggctccccagaaacgtgagtactcggagcacctggggctgaggggctgacttgttacgtgactctggagacccacttcaagctggtcatctgatcacctcttacatgaaacccaggtatacttgactctcttccttaaaaaaaaaaaaaaagtcagctgagtttcatgtacttataacctcagcaggacagtgaaagatggagacagatgcttaccacccacctagcctgacctagcctaattggctagcttccagttcagggagagatctgatctctagggaataagtgaagagcaatggaggcacccaccatcattctctgcctttcacacacttgcacacctgcacgtacaccacacgcacacgcggcgtgtgcacacacaccaaagtggagggaaaaacacagattttcgtttaaaagcatgagtataagaacagatgggaggagtatgccaacagtgggtgggtttggagctatttctgccactaagccaccagagggcatcagcttcctaaactttaactgttgtgggtatgcagtgcccccccaccatgcatccctcagtaaaggtggctttgcgtccatcttagattcctgtctcctcattaggcattcactctgcttcacagaaaaccaacaccaaacacacacacacacacacacacacacacacacacacaacgggaggagataacttaaaatatcatgttttatttttaattaaaacatagcaattgggctggtgagatggctcagcgggtaagagcactgactgctcttccaaaggtcccgagttcaagtcccagcaaccacatggtggctcacaaccacccataatgagatctgatgccatcttctggtgtgtctgaagtcaactacaatataataacattatacattatattaataatatacaacaataaaaataaatcttaaaaaaacatagcaattgcacagtcttactgggtatagcgtggcttaattttttttttaagataaggttctttatagcttatgctagcctagaatgcactgtatagcccaggctgaccttgaattcctggtcattttcttgtctagcctggcacctgggtgttttggtgacaggcaccatgcctggcttgcaatgaggtgtttcagtatcagtacatacatgtgtatgtgtgtgtgtgtgtgtgtgtgtgtgtgtgtgtgtgtgtgtgatgaccagatcagggtagttggaatattcattaaaacaaacatttagagccgggcatggtggcgtacccctttaatcccagcacttgggaggcagaggcaggcggatttctgagtttgaggccagccccaggacagccagagctacacagagaaaccctgtctcaaaaaaacaaaacaaacaaacaaacaaaaaaccaaaaaaaaaaaaccaaaaaccccaaaactaatacaaacatttgtcttttgttgttgttgttttattttaggaactttccttttgagggttctaggcatcttctctctcttccccaaggtcctggatcgtgaaggccaaatggacaatccatgtaccagttggctggcagatgcctactgggataatatcacagaactggacaaactgaccaacttccatgggctcatgaactcctttgagcagtaccctcgggactggcacctgtggtacaccaactcttccccggagaaggccatgctgccaggtgccaggctgccagcccccgcctcttcggagcccgtttgaccttccctttatccaccccacacccaccccacacactcacaaatgcagcccctgaagattctccacctttgagattccttcctgactgactctcagggctgctgttctctcgtctgcaggtgagtgggagaatgcgtgcaatgagatgcagcggatgctgatcgtccgctccctgcgtcaggaccgagtggcattctgtgttacttccttcatcgtgtccaaccttggctctcgattcattgaaccgcctgtgctaaacatgaaatcggtccgtggttctgccttcttgctcacacagcccagcagcccctgcctgtccacaccctcccctcggtcctgacatcacccctgtgcttccaggtgatggaggactctaccccgagatccccactggtattcatcctgtcccccggtgtagaccccaccagcgctctgcttcagctggcggagcacacaggcatggcccaccgcttccatgccctgtccctgggccagggccaggcccccattgctgctcggcttcttcgagagggtgtgaatcaaggttaatatccctcttggttaggttgctattgctgggataaatcaccttggccaaaggcaacttggggagggaagggtttatttcactcacaattccatatatcatcaaaagcaatgagggcaggaactcacgcagggcaggaacctggaggcaggagccgaagcagaggccatggagggtgctgatgctggcttgtccatcatggcttgctcagcctgcctttctttctttcgtttttcttaatttctttctttctttttaaagatttatttatttattttgagtatactgtagctgtcttcagacacacaccagtagaggccatctgatcccattacagatggttgtgagccaccatgtggctgctgggaattgaactcaggacctctggaagagcagtcagtgctcttaattactgaaccatctctctatctctagccttcagcatgcgctctctcttatttatttatttatttatttatttatttatttatttatttatttcaagacagggtttctctgtgtagccctggctgtcctggaactcactttgtagaccagtctggcctcgaactcagaaatccacctgcctctgcctcccaagtgctgggattaaaggcgtgcgccaccaccgcccgacctgctctcttatagtatccaagagcaccctgcccctgggtggccctccgcacaatgggcttggccctcccccatcaatcattgataaaatactctgctagcttgcctacagccagattttatgggggcattttctcagttgaggctccctcctctctgatgaccctagcttgtgtcagctgaagtaaaactagccagcacagtgttcatctttcctagccacttctcagccccagtctgtttcccaagaacctcccagcccccactatatgatttcagttcctgcttttctagaaatcccagaaataacagacatttaacaccagctccacttcctcgcagggcactgggtgttcctggcaaactgccacctgtctctgtcttggatgcctaatctggacaagttggtggagcaactgcaggtggaggaccctcacccttccttccgcctgtggctcagctctagcccccacccagacttcccaatctccatcctgcaggccagcatcaagatgaccacagagccaccaaaggtatagtggccctagagcggggatcgcctgcactgtagcttacctctcagcaccaaagacaggttccagcctaaatgacagcacaccttcctctgactttggttgtttcctaaaaatcccagctcccttctgggtgtcagacttccagaacacaagacagaacatttctctgatggttgttatatgcccggctcccttctaacgccttcacatttattaactcatttcacactcacaccacatcaggtaagagctgctactcctactttgcaggtaggaggctcaaaggataagttagtcttgcaaagccaccctggggacaaagccccgccccctggggtgtgagctctcacttttctccctcccttcatggagagccccgcccctttctctgctcaagttcccacctcctagacctcagcctctctcttccctctccacctctcccccctccttccttccagctctcctgagaattttgtctctaatctcacaagttcactgctgaatacaatgatattatatacaatgcaacactgaccctttaaagcctgttcttgtcactgggtggtggtggcacactcgtagtgcttgggaggtagaggcaggtggatccctgagttggaggccagccttgtttacaggatgagttccaggacagcctgggatacacagaaaaaccctatctctaaataaataaaccaataaacaaacaagcagaggaataaatctgttcttgtcacactacattgccacaaccacagataccccaaccaactcacacccactccgacacttaagctatttggaaggctgtattggtttttgtggtcctttattatactattgggctactgagctacacatccaacacttggttgtttgagagtgggttttgctgtccatgctggtctcagccttgctatcattttgcctcggtctcctaagtgctggcgttacaggtgggtgaagcaactgccatcctagcttgcttattttagtagctttttattggtcttagttaaaatcaaaatcccctcttttttttttttgctagtttatttaaaaaacaaacaaacaaacaaacaaacaaaaagacagagacagggctgaagagatggcccagtggttaagagctttggctattctgtttccagcagtcaaggagaagctagcagccgccccagggggtccagcacccttttctggcttccaaggtagctacatgcatatgcaacacagaactacgtgcaggcaaaatgcaaataaggattattaagagtttcaaactagacccaggaggtagtggtgcaggctgttaatcctaacacttgggaagcagaagcaggtgggtctctgtgagttcaaggccagcctggtctacagagtgagttccaggacagctgtgactacatagagaaaccctgtcttgaaaaacaaacacattttttgtgggggagtggggatttcgagacagggtttctctgtgtagccctggctgtcctggaactcactttgtagatgaggctgaccttgagctcagaaatccgcctgcctctgcctcccgaatgctgggattaaaggcgtgtgccaccacacccagctacaaacacatttttaaaaaataaatcacaaaatacacacagagaggccactctttaggatgtacacaaggaataaaccctgtttgagcatacttggaagcttttccgcatccatcctgggcccctcggcctcccaaatgctaggattaaaggcatgtgccactcctgccccggcctggccctgccttttttattctgtggggtttttttgctcaatttcaggatcaagttcttggctcagcttttctcattctccattgttactcaaacttcaccagggcgggggtgggtggtcgtggtgggggggagtcctcatcctgatttaccctccagtccccaagctcgggtctagggctgcgttgcctcgtgaggaagcactgtacagcactgtgactccctaaaacacggagttggcttcttccttccataggtccttatccacttttgccttgggtaacactatttttttttttttacacatgtttagtgttaaaatagttgccaaagggggggggggtatgggggacttttgggatagcattggaaatgtcattgaggaaaatatgtaataaaaaaaaagttcagaatagcttataaaaaaaaatagttgccaaaaacacacacgtgagactctggatcccatccctagcatagagaagaaatgtaaacttgaccattttattttagaatgttgcaaggtctgctgtattcccgattggccttgaactcacctgtaatcaccggataatcttgaatacctaaacctcctgcccctctgtcaggaatgtgcctccctagggtgtgcctttatgcctggttgtttttcactttttattccctgccatccagaatattctgaaagcctgtggaaagctatcttatccacttcagtatcattgatttatttatctgtttttacttaatcagtgtgtgtgcaggtgcgtgcgtgctggtccagggggttgggggaggatgtttatgctatggtatgggtttggatgtcagaggacaatgacatagtcatagtcatgacagagtcagcttttaactgccactctgtgtgccaagactgtattcaggtaaagtgctaagcccctttacccacggcaccattgtattggccccttttctttgacaaatcatttcttgggccgcatcctgtagctaaggctatgagagatttccaagaaagcctaactgaggcagatgtgggcccttcccaccatctgataaacccagtgagtgagaatggctcagggtttatctgttagagctgggttacttgagcatgtgagctgagttagtaggaaaaggcatttgctgtccaacctaaatttaatgccctggacagacagggcagatgtagagagccagctcccattaagtgtcctctgacttcaacacctcaaaaacccatctctgagaatggcctagacttcctggttttcctgcctccacttccagagtgctgggaccacaggcaggtactaccactttccccaggtttatgcacgcttgtggaatacttagaactccagcactcattctataaattcaaggccagcctaagttacaaaagacaactctcttgaacaaaaacaacaaaagctcacactttaattctagcattcaggagacaaaagcaggtggatctcttaagtgttgatagccagcctggcctatagagcgcatttgaggacaatcaaggctacacagtggaaaccatgtctcaaaaataaaatttaacaacaacaacaacaaaaaagtcaggtggtattggtaaatgcctttaatccccgcacacgggaggcagaggcaggcggatttctgagttcgaggccagcctggtctacaaagtgagttccaggacagccagggctacacagagaaaccctgtctcaaaaaaaccaaaaaaaaaaaaaaaaggaggaggaggctgaggaggaggaggcggcggcggcggcggcggcaagctaagggctggggaggtggctcagtagctcagagcatttgctgcacgtgcagaggtcctgggctcagtccccactgcccgcctggtgactcacacgcatcctaactccagttccaggacatccaaagctgctgctgatgtccacaggaaccaagcatgcacatggtgcacattcattacacacacaggcaaaacactcacacaccaaataaaaggaacacatcttttcaaaatgatggtttcactctgaaaaaaaaaacaaacaaacatagaacagattgttggcatttgttttgaagggtcttttctcttgcaacctctccagatccagaagccattctctgaatactgtacttttctttataatttcaacacaggacaatgtttcacaaataccaccataccgtatgagttctgtccccagtaagtgctctgcatttgattttgatcctgaacctcatacaccgtgacctaatacaccacacatcctaatctttacggcgatgtgtcttatggcttgtcctttcttttttctattttttctgagacagggtttctctgtgcagccccgctgtcctggaactcactctgtagaccaggctggcattgaacccagacatctgcctgccttaagccgggcatggtggcccatgcctttaatcccagcactcgggaggcagaggcaggtggatttctgagttcgaggccagtctggtctacagagtgagttccaggacagccagggctacacagagaaaccctgtctcgaaaaaaacaaaaaagaaaaaaaaaaaaaaaaaggaagaaatctgccttcctctgcctcccagagtgctgggattaaggtatatgctacctcctcctgccaagctggcctggagcttatgacctcccaagggtaccctcatacttgcaattccatatatatatatcagcagactgatagtttagctcagtggtagaatattttcctggcacaaacaagtctttgagattcagtccctagcattgaaataaaacaagtaacaatgaaacactaattataagtgtacatttctgtctttattcatattttctggcactcacaaattaaattggctctttcatggaggacatcatgattgagagagtttaacacggaggaggggctgggttctgtggcacatatctgttatcctagcattgtcaagaaggcaggaagatatctgtgagttccaggtccacctggtcaacctatatagcaattccagaccagccagagctacacagtgagaacttgtctccaaaaaagaagttggagtggggtggggaggtgggtgctgagggtgtagctcagtggcagtctcattatgcctgacatgttgaagcccaaggttcagtgtccagtactagctccccgagaacagacgacgatgatggtggtggtaagggagaaggtaggattactggtggcacatagtcagtgtagtaaggtcccccacctgcaaccctgtgagtgaatgagcatctctccggacgggcagctcagaggctagttgtactcagtcagctttcttttgctccttcagccagggcctttgtgcagggcctcttccacaacttcccccatatgacactgctggtgtcagggttaagcgtgacaactatcaccctgtagttccttgtcctcagggtctaaaggccaacatgacacgtctttatcagctgatgacagaggcacagtttacccactgctccaagcctgccaagtataagaagctgctctttgccctctgcttcttccattccatattactcgagcgcaaaaaatttttacagcttggctggaatattatttatggcttcaacgactctgactttgaggtttgtgctaacctggggtctcccatgccatctctttcttctcatacttcaatgcgccgtgggatcttttgtgggaatcttggttgccaggaagctgatgttaaacccccactaggagagctcttgccataactatatggcacttgggggcttgggttgggacttcacataggtgtcagagaacctgctgagcctctatctggatgagtatgaagagacaccctgggacgcgctcaaatacctcatcgctggtgtcaactatgggggacatgtcacagatgactgggaccggcgtctgctcaccacctatatcaatgattatttctgtgatctgagcctaacaactcccttctaccggtaaggggggaggggataatacttcagtgggggggggtagtggggggggtaagactgagtgtggggtgaaagggtataagtagaccaaagaccagggttgaatggtgtgtgtgtgtgtgcgtgtatgcacatgcgtgcatgcccagagactagggggttgaaaggaaatggaatttgggaggcagagcatgagctgcagccatagctaaacaaatggggatgcactgagcctggggtccaggctcagcgtggaagctcaggtcttgcaatctgctattctctgctgtgactgcccaggttgtctgtactggacacttattacatcccaaaggacgggagcttggcctcttacaaagaatatatcagcatgctgcctagtatggacccccctgaggcctttggccaacaccccaacgctgacgtggcctcccagatcacagaggcccggaccctctttgagaccctgctttccctgcaaccccagatcacacccaccagggttggtggccagagccgagaagagaaggtaggaagagagatgcccggggagagggcgtgttgaggaagggcagcctagccccgagcttctgcctccctaggtcctagagttggctgctgatgtgaagcagaagatccccgagatgatcgactatgaggggacccgaaagttgctggctcttgacccctccccactcaatgtggtcctcctgcaggagatccagagatataacaagttgatgaagaccatcttgtaagaccgaaggaacactatagaacgtgggaggggaaggagaaagacaaccccactcacggttgggatggctctcccaggcctgcacctctttaatagcctacctgcctccttccactcaggttctccctgacagacttggagaagggcatccagggcctcatcgtcatgtcaacaagcctggaagagatcttcaactgcatatttgatgctcatgtccctccactctggggaaaggcaagctcccaacggctgtcagtcctaaccctgaccctcctcttcacttcatttccaggaggcatatagcagacttcaaagagcctggggttccaacccagacaggttcaatctgtgttgagatctggctctgccattcactgactgcagaccttaacttatagatgtagtcacattaatttctgcaaggatattttaaggataccccactcccaaagactgtccgtggtactcactcagtacctgatctctgcagaacaagcacccttcattcaaaactcggaaatatgaaacgacctgagtgccaagcacagtgctcaaaaggtttcagattattaatttttcaaatcagggatcctcaaccagtagtctatgcaaatattccaagcacacccctgaaaaacccatgagaaatctgaagctcttctggcaccgtgcattttggataaaggataatcttgtagtgatactattattaataagtagctgctattttatgcccccccccccccagttaacttttggagagctttggcgaatgccccaggtgttcttaatactgacagggaaagcactgtggacaaaacaccacatgcaccccctcgttcctcaggtatatccctcacaaaagcccttggcgtcatggacccgggacctggctgtgcgtgtggaacagtttgaaacatgggccagtcgagcccgccctccggtgctcttttggctgtctggcttcactttccccactggcttcctcactgcggtactgcagtctgccgctcgccaaaacaacgtgagcatccagagccggggaggcagcctaggaacgtgcattcattccttctcttccttgggggcctccttcattgtcgccttcaatccacagatctcagtggacagcctctcttgggaatttatagtttccactgtggacgacagcaacctggtgtatccacccaaggtgggaggcggatgggctcgggatgaggagggaaatggaagaaacagtgggaagtggggtgaagaggaggacagaggacttaggtcaaaggtattgtcagcgtagggtctttccctcaactctgtctccatttctctccaggatggagtttgggttcggggcctgtacctggagggtgctggctgggaccgaaagaattcttgtttagtggaggcggagcccatgcagctggtctgcctcatgcccacgatccacttccgtccagcagagagccgaaagaaaagtgccaagggtgggaaactgccccctccctatcccttttggatactaacccatcctccctgctccagttcccaaatgcacttgctctgatcttccaggctccagaatcttacttcttttcttctcccctaggcatgtactcctgtccctgctattattatcccaaccgggcaggcagcacagatcgagcctcctttgtcataggcatcgatctccgatctggatccatgacatctgatcactggattaagaggggcactgctctactgatgagcctggacagctgatgagctcttctctcctccttgagagggtcggaagccctaggaccttgaactaaagctggatctcaggctttgactttagctgaatctagcatatagtgacactctgacagtacctagtggcgctagcggaaaaggtggaagacttgtattggcgctcagtgcagtaaaaaccgtgcaaaaccaagccccaagtctctcaatgatggtgttttaatgtgtgttgggggtggaggaaacctggaggagggagggaagctgggacttaaggaaaggagctgctacaaccagaactgagaagagaaaggtggcctataagaggaggcgtggtcttgaactacttgcccaccaggcctaaaagaaggtgtgaccaagtctcctggaaaggatttgagcaggcggggtggggcttgctttggaagggcgcgcgatgcaaatagaataaaagacttgtcaggtaaggnnnnnnnnnnnnnnnnnnnnnnnnnnnnnnnnnnnnnnnnnnnnnnnnnnnnnnnnnnnnnnnnnnnnnnnnnnnnnnnnnnnnnnnnnnnnnnnnnnnnnnnnnnnnnnnnnnnnnnnnnnnnnnnnnnnnnnnnnnnnnnnnnnnnnnnnnnnnnnnnnnnnnnnnnnnnnnnnnnnnnnnnnnnnntgaagatcctgaatacctgggacccccagaaccaggtaatgggaagccgcagggacttttggaaagagggagaccatctccttgcaagggggaggggcgggacgtcagactctctggagaggtcgggcaaggcatttgattcttgggaaaagcaatgtcagagtcggggcgcaggacatctaagttccccaaaagggaacaaggcaaaggtagtggaaaacccgtggtcttggctctaaaggtcaaaagggcctaaaagtaatcccagtcccgcttgggatggtgaattgacactagggcggggctcagcggtcctgaggaaggagactataggacagtttgcagatagggctatggctaggccctggctcactgagatcagaagcgatcaggcaaagtgaacttccagttacagggccactcaaaggttccctccagctcttttctccggggagatgtgtatgtattctcaactttcaccatccctccaggagcggtagcttttccatctcacagcactccaccgcaccgtctgctctcggcctcgcctggttcgttcctctagttgccggtgccctcctcctcacttttccgtcttcagttccctagccttcactgggctctggccctttctccatgctgaacctttcccacgtagccacgagatggcgaagatgagacgcccaccagagccgagggccatgcgggttggggggggggctatctatagctgtgacacgcacctttgagaaaggtgcgctgaggttcacctttgattccctgtcatctgtctggcacccgcccccggcccaggaaattgtaagcatatgggtaaagtgcagaagctagggacagggcgagagactatgctttttccggcctagaataaacagtggtgaagtggcatttgggttgagttggtcactaaactgcagattcgtttctggcttgtggcctgtgactgtgtcttggaggctggagtgtggggaaggtcgaaggcagaacacctagttcctggcgatgagaactccgagagaaaagaagtaattaattgaggtgcgataggaacggacccagtggttgctcagagtaaggctggtcgaacctccgtcgcttgccagggttgttttctcagttgccagagtaacaggctggggaacgtccaccgccagattcccaaactcactctctccagtccaatcggctttagcggacgtcgactacgtcagggtcctagtgaccaatgggaagctgtcatagagagcctgaaagagggagagggaggaggtggaagggggggtggtggcggtggctacccaggatccgcacgtgcactcccacacgctccactccctgtacaaccccttccactgcacgagcccagacagtctcttgcgcctgcgcggcgagtcgtgtgtgtgtctctccctccctcccccccctttgcctcaggtcgtcagtctgtgtttgcaaactagtccagggttgtgtttctcaacccctgcgggcccagacgtctgggtgggtttgcgctctttagccgggtgtcgactgttaatgtcagcctctcgagggaaggcccgctacctgtgttccccaccgccacccccagctggcgccccaagctcccaggtgggctgggcggagctgtggtttccggccccctaggctcagccgcggctttcccgagctccggcaaagggtgtttccacaaaagaaagggagtgggtacaagcaccccttcccgaggcttaacccacccaggcctagctgcagttagtgacagggcaggacactgtgagaagccccttgtggtcccggtgactttctaggccagagggtcattacgcctattttctttttttcttgtaaattcctgcttttgataggcaaaccagaccttcctcttcccttccttaacatttcctcctcgcacgctctggcgttctttacacctcccttggctcctttcgggctgtccccgtctccactcgtccttttctgcttctccagagggttatataactcttcctctccgcgtgtcctgatttcaactccacagactccgccctggaacggcgcgggaggggcgggagagttggggacccagacagattccggctggcggccagctggggcacaagggatcctgcagatagcagacggagtcccgcgggacttggttggtgccccgtcccttagtctcccgcccctaacccgggatcaagcccagaagaaagaaggcacagtatttccgaggggcgtgtcgggacagtcagaaatgtgggttgggaggtcaaggctggaggctgagaggaggaggcaggcgaatgaccggattccctaggattggttctgctggggttaacagagataaaagcaggacgcctgggttccctccttcgtctcctttttgggttcccagaattcctaaagctattttctcaggaaatttagccagctagcagcttcttcgccctggtaggagtcaaaggtctgtgttcgaggtggcctgggatgatgtcaccagtgcacgtgccccgggacggttgccaggcaatgcgatctcctcccctttccattccctcccacctctgcccagagtcccgttccagtcccgtgccatctctttctcctttcctttcccttggcattagcatcctgcaggtgggaaaccctggcctggagtttcgtgaagggggaggggcgcgggtgtggtgtggcctgaaagactttgcccctttgctggcttgagagaattctgggtcttccccccccttctttttcctagattgccatggaaaaacttcctctccagtccccactaccactcccaccccccgtactccctcccgcgcgcccttggaagtgtctcctggaagtctttttagtttcccacctgctgcatggcccagtgtcaggttgcccctttcccagcttgagctgaagtgggtgtagttgcaagacagctgcccctaagagaggagctgtatgtgggtatacacaccagcccatccctgcgactcccgtcacctcctcttaccaaactgaggagaaagagttaggctgaaaagtcaaggtctttatctgtgtaggtaggtggatcagcttctggtattgcccacttttgagagagaagtccagtgatagttatggctgccctctgttaaatcttggagttggtgatggtattacagagtctcctttcttgtgcctaagaatgtggattgtcggctcaaacctggattctaaccccagctctgccactaaatgggactcgggaaaagtcacaaccttgcagaacctcctatctgcaatctgggacatttaaatatcaatacctaccttctagctgatgggagggggcagtgaaataatttatgcaaagcatttagcacagtggttggtataaaattaataccgaatgagtatcagaaaatacatattattaaatgttgttagttattatagtgggtggacctgtttctaaagtagccctcacaggggattggttaaagagtggagaattctgctacctggagtgtgtgttgtgtgtgtgtgtgtgtgtggggggggggtgtcagggattagcatcgactactttatgtaccttatttgatgtgggctttagcagatttgtattgctttctttaggtttatttttcccctccttaaaaaaaaatagctaagactatattcctttggctgttaaaataattacgttgtagcttgtgattttcaagcgatactctggttccctcccatgttgctctctggagcctttcattttgcaaagggactccacagtttccctagcggggacatggctaggctaaaggggtgtgtaaaggttggggtgggtgggtgggtggagagagactagtggggggaggctgggggagcgggtagttaaaggaagagaccggaagggaggaggagggaagctgctaggtggggagggaggggaagaggaagaggtggaagaaagagaggaggacgaggaggaggaggagggaaggagggggttggggagacctgctacaattctatgtttgactcggggactcaaggacgaggaaaaagagggagggagcaaaagctacaaccccgggnnnnnnnnnnnnnnnnnnnntactctaatacaataataatatcacatctaaaccaataaataatcaacctctaaataaacataaacaaacaccaacatcaaaaaaaaaaaataacacaaatacacaactacaccaccaataaaaaacacccaacaaaacaaacaaaacaattacaacacaaaatacaaacaacactaaaacaaaaccaaaaacaataaaaaccaattctaactttaaaaattgctctaaaagacaaaggagcagcaacaaaagttttgggaaaacatgctaaagttctttgtatgataccgggactaagggacggcaaggaggagggagggaggcagaggctgaaagcgctggggcaggcccaggaggccagaggagggaccgtctcccccggccccccagccccaaataccccccatgatgctaccccctccctacccggactctgggggcaccgccgggggacagacacccagcaggtaaccctggcctggctctccctccccctgtctgattttcttccacaccctcccggacgacccctttccgtctccccgatttcccgggccttgcctttcccccccagccctccttgttccatttctgcgagttgggcttgtcgcctgctggctccgccaccctccgtctcgtgcagcctgactcccttccccccaccccacagtgtgtgctcccctgttctgcccgaggcaccttttggggttctgtctcaatgtttcttaggctggcttcttccgaccagtctcatggggctctgaggaaggagggagtccttattctttaatggctccccccagtctcccttgccccattctcctcgtagcagtctctaggggtgagagaaaaccggaatttggggcctgatggagaggcaggggggctgtgtgttgctggagacagggacagtgagtgtgtgaggagggggtggggatttgttagagaccaggctgcctctctgatgtccctttaaatggcccttacatatctgggggttagggggtggggtggtggcaagctgcctgcctggggggcagggcccttggtttgtccacaccgtcaggggtggaaatgatttaaagggacagccttggtgtggccactgccaccctgtgctggcaggagggggagctggcaggctatgtctacagaggcttggctggtgagcagggcatttgaggctgtctgggactgggcctcaggtctccagtccagttactgtggctggaaaagtgcaagaaggggttgacagcctgccctgagggtgctcagtctaggctttcttcagaaccccatgggtgagccctttgactccatgaccaagaatctgtgagtctgaactacagaacctgtgggccagaaccaggtgggggccactggcagatccgcaggtcagtagggtgacctgggtactttagagctggccccttcagcttccccttttgttgtttggttctttgcacaagaaggccccagcccctcctcctcatgcacatgcccccccacccccaccccagctgttgggcagatgaattacagcctcctgcttggggccaaggctggtaagggattaaagttctgaggttggccctttaaatggctgttggccctcccccactctggtgtccagacacccatcacatacccttctgacccccttggtctggcctgcaaccctccccccctctataggctagcctaccccgtagccacaaattctatcaactgctgggtaagcaccttagtcctgaatttgcttccctgtccagaagggtccagcctctagcatcttttctccagaaggtcctagccaatccagttttctcagctcgctgctgaccactgttccttaagggccttgcttaggtcagaaataacacttccctgggggcagtgtcatcagcaggcacaaaagcttgcagtgcattgcatcatggaggccagaggcctaagtctctggggcagggggaaagatgggggctggaaggccaggaaatggagaggccaggtagagagcccgtgtgtctgggtcctggagaaaacactggtccccaaggagtgagtctgaggtgagggttgactgaggcctaactcctgctatcaacacctgagtcttggccctagacttgtagtaatatacctagctctttgtatctaaggattaggagggaagagagtgggcccctgtcacctccttgggccacatggaggaaggaggtgatggggaaacaggatatggttttggaggtgacatggagggagcctgctgcagaggctacttcctagctcaggcccagtcacagctcttgcggaggaagaaggctcctccctgttgggcccgttcatcttgtctgaccacctgtgccgcttgccagaacctgcctacaccagcctaagggaactggaatggtcagagtccaaaaggtggtgttgactatctggtgtcttgttagggttggaggtagcagaactgaaggcctagggtccacatgccctgggggcaggaactaaggttgcttgacagtagatgtcccctgtagctgggcctgagccagaatatcagtctagtcagaaaagggcgacgtgggttggtactgaggtgccaccctatgcttccttaccacctgaaccaggctgcttcctaaaggaaaggttggaagatggcttttttccaggttgccatggaaaccgaatctcccatctcatctgacctctagagcctggtttctcaatgagggggaccaggaaggaagggaactcctctatcttgggagatcccatctctaactgaaattgttttcttttaggttcccccaggcaccatgtcagcctcatagcaggacccaccccacgacttctgctgtagcccataggacccaccccacttctgctgtaacccactgctggagtgcttgttccatgagacagtccacttccaactccatctggtaagcttggctgctgtcacctccgtcccccacgtccaactcttcaccgcatgtttggaaatctttgctctgatctggttcatgctcactcatcagaatggtccagcccaactctgaacctccccccaacatgtgctgcttgaatggttcagccctccacgttgatggagccccctctatcgcctgtgaatggtttatccctgtacttcacttgcctctctaccacctgaaaacctctcagcccccaccccagtgctgccactaactcatttgcagactgaagaaagctagccagggcttgccagctgaatgtagttgtgagatagcccagaggaatttcttgtgaaggggaaggcatttccccccattcgtggaaagggtgcttaggaattgatgtgaggagatgttacaagccactgccctgagctagcccatgcttgttacggcctcctgcgtatctcgcctctgagtgctcctcggcccattctctctgtggtgcacagtatcaccgtagatttgctttgtgcacttaactcagaacacctgcttttcctcagacctgctgctactggcagctctcttcccgaggcccgcttcatctccctagtagaagggaattttccctaagccagaaaccaaagttctcggattcctcattgcttttccccattgctcactgggtttcttgagtagggctattttttcctatctgtcctgtttagcgtgacagttcgcacattgaggtgcctttgtagatttgtgttgaatgaatgttttaagggaatgtcatgcttcactgccaagaaacctacggcttctgagatctgctgcctcctacccacacctaccctggaggatgagacacttgggatagtaacagaggaaggctggtctaggaggtagcaggcaagggtaaaactgagggagaacaggccagaagtagtgtggaaaatgtagcccacgtgtccgctcatttcagaatgatcttggttgagttgtcgagccttccccagcctgtttcctcgttcccaaaatagggtaatcaaggccctcctctgccaggtttttggggaagagttaaaaggtcaatgtaaaaggtgttttttttttttttgtttgtttgttttttgtttttttaaacacagtgcctaccatttggtaaatgataagcactttgcatcatgataactgcaggaagctgtgagggttcaagtgaggatgtggaggaatggggctgaacctgactgaaggcagacagagtcccaaataatcgactaagcaggaccactgacccagtaagtcaggatccaggggggtaaggagaatccctcaagcctggctccgacgttcccctggctttgagaacgtggaagaaagcacagaaaggcatgtgcacagacagacacacgtgatcgccacagtgctgcagaggcagacccagacaaaagactgagacaggagccaaccagacacacagacaagagacagcctagcagagtcatgtagacagggataatgacaggaacgcgccagacacaggcacagagggagacaagatgagcagatatgcaggtgcaaacagacaccaagacccacacacagtcgaccctgttagactgattggtgaacacaacgcccagtcagaggcagacacaaacacccgcagtgacacatagcgggccagcgcgccggggcaagcactgtcacttctcgatgggggcggggaggggccggcggcgggggaaggctagggaagggaatcccgggcgggcggcctgcccgggtggctgagtcactgcggagccccagcccgcggccctccctctcccaccggctctcccaggtgagaagcgagccggcaacttagtagctttccgccatgcagaaagaagactgtgaaggaatgggacccgcgggggtcggtcctggatccgccccaccttcgagccggtgcgtgctggcttaaatgcatgttcaggaaaaatcgttctgcggggtctggtgtctttggtcgtccagtgtctgcttgcgggtcgcaggcctcgtgccaagcgtccctcttataccccgcgttccgtgagctgcgcggaggggctcttctgacccaagcccagagagagttaagtgggtgtgattgatggagtagttctctcctgggactaagggaggtgtgtgtgtgtgggggggtcggttaaagtcctagagtccagatcccggatgcgggaggcggagcttggctttaccgggagtgcccggatggagagggcgtggtttcgactcaagtggaattaaccctttctgggcggccggcttttgggggctgtaggtcgggttgggaaggctggattgtcagcctcagaagtgtgtcggccatccagcctggccctggacgtgtgcgtctgcctcccgtctgtcttcgaggagtctgtgggtgtctgtctttgtgcttgt

SEQ ID NO: 538 - DNA, 11977 bp, Mus musculus
gttttgccttcaagatggctagcaaagccgagaagaagcgaaaagtggctggccggggaggcgcccgggcaggccgagttgtccgagctcctcagtccactgcaggcccaggagctacagaggcttccctgctccctgatggtcaggagccagagcccgagtctggcaaggaggactctgaagcccttcttcctctcacgaacgatgttgaccggactggcagatgccacgtggacgggggagcacgacatggttctggagcactttgtccaggatcctgcggtgcctgccctcaccatcttcattgaccccgtctttgggttgaagctggagctgggcatgcctgtgcagacgcagaatcagattgtgtacttcattcgacaagccccagttcccatcaccccagagaacttcgaggagactgtgcagtatgggacggtgcggggtgcctacatcccggctttgctccggctgctcagcggtgtctacgtcccccagatttttatgaataagtcttggcctgagagcatccggaatcattttgtttcacacctgcataggtttttggcctctctgacagatactcgctacaagctggagggtcacacggtactgtacatccctgcagaggccgtacagatggaccctgaggtggtggtaaaggacaaagagctggtacagcggctagagacctccatgatccactggacgaggcagatcaaggaagtgctgagtgcccaggagtctgtggagaccggagagaacttaggccctttggaggagatcgagttctggcacaatcgctgcatggacctgtccagcatcagcaagcagctggtgaagaagggtgtgaaacacatcgagtccatcctgtttctggccaagtcatcctacttgacgcccttcaggaagctggcccagcagatccaggatggctctcgacaagctcagtccaacctgactttcttgtccatcctgagggaaccctaccaggagttggccttcatgaagcctaaggacatctctgagaagctcccgaagctgatcagcctcatccgaatcatctgggtcaactccccccactacaacactcgggaaaggctgacggcgctgttccggaagatgagcaacgagatcatccgtttatgctgtcactccatctctttggaccgaatctttgagggctatgtcaattctagcaaggaggacctggaaggctgcatttcctgttgtcaggcttggaaagagcactacctgcgtgccgtacagatgcacacccagttctccaatcggggctgggttctggaccagacgagcatatttgctcaagtagatgcctttgtgcagcgctgcaaagaccttattgaggtatgcgaatgtcagtaccactttgcccgttgggaagacggcaagcaaggtccccttccatgcttcttcggtgcccaggggccacagatcacacgaaacttgctagaaatcgaggacatctttcataaaaatctgcaaacgctgcgagccgtgcgtggcggcatcctggatgttaagaacacctcttggcacgaagactacaacaaattccgtggtggtatcaaggacctggaggtgatgacccagaatctgattacctcggcctttgagttggtccgggacgtagagcacggagtgctgctcttggacactttccacaggctggccactcgggaggccatcatgcgaacctatgagaaaaaggctgtcgacctctacatgctgttcaatagtgagttagccctggtgaaccgggagctgaacaagaaatggccatatctggagccatacatgactcagtactctggacaggcccactgggtgcggatccttcggcgacgcatagacagagtcatgaactgcctttccggagcccacttcctgccccatattgggactggcgaggagagcatacatacctatcagcagatggctcaagccattgatgaaatggttcgaaaaaccttccaagagtggacagcgacgctggacaaggactgcattcggcgactggacatgtcactgttacgaattagccaggagaaagagctcgatgccctccagcaagtgtgggagatcacccgggactgggaggagagctggaaccagtggaagatgggctgcttccagaccctgcagacggaagccatggagtccatggctcatgggctgttccgccgcctcacgagactagccaaagagtacaaggaccgaaactgggaaatcattgaaacgactcgctccaaaatagagcagttcaagaggaccatgcccctcatctcagacctgcggaatccagccctcagagagaggcactgggaccaggtcaaagaggaagtccagcgggagtttgatcaggagtcagagagcttcaccttggagcagattgtgaaactagggatggatcagcacgtggagaagattgcagagatctcagcctctgcgaccaaagagctggccatagaagtgggattacaaaatattgccaagacctgggattcgactcagctagacatagtaccctacaaggacaagggccatcaccggctcaggggaacagaggaagtgttccaggcactggaagataatcaggtggccctgtcaaccatgaaggcatctcgattcgtgaaggcctttgagaaggatgtggaccactgggagcgctgcctctctctcattctggaagttattgagatggtcctcactgtgcagagacagtggatgtacctagagaatatcttccttggagaggacatccggaaacagctgcccaatgagtcagccctatttgaccaggtcaacaacaactggaaagccatcatggaccgaatgaacaaagacaataacgctctccggagcacccactacccaggactcctggagacactgatagaaatgaacgcaatcctggaggacattcagaagtccctggacatgtacttagagaccaagcgccacatattcccccgcttctacttcctgtccaatgatgacctgctggagatcctgggccagtcccgtaacccagaggctgtgcagccacacctcaaaaagtgctttgacaacatcaaactgctgaaaattcaaaaggtcgggggctccagcagcaagtgggaggcagtgggaatgttctcaggtgacggtgaatacattgacttcctccacccagtacttctagaaggaccagtggagtcgtggcttggtgatgtggagcgggccatgaggatgacccttcgggatttgcttcgaaactgccgcgtggccctcaagaagttcctcaacaagagagacaaatgggtgaaagactgggctggccaggtggtgatcactgctagtcagatccagtggacagctgatgtcaccaagtgcctgatgacagccaaagagcgatcagacaagaaaatcctcaaggtcatgaagaagaagcaggtgtcaatactaaataagtattcagaggccatcagggggaacttgaccaagatcatgagacttaagattgtggctctggtgacgatagaaattcacgcccgcgacgtgctggaaaagctctacaagagcggcctcatggatgtcagttcctttgactggctcagccagctgcgcttctactgggagaaggatgtggatgactgtataatccgccagaccaacacacaattccaatatggttatgagtacttggggaactctggtcggctggtcatcactcccctgacagacaggtctgctgtggggggatgttacatgacattgaccacggcactgcaccttcatcgcgggggctcccccaaaggcccagcaggtactggaaagacagaaactgtcaaagacctgggcaaggcgctgggtatatatgtcatcgtggtcaactgctccgagggcttggactataagtccatgggaagaatgtactcaggactggcacagagtggagcctggggctgctttgacgagtttaaccgcatcaacattgaggtgttgtccgtggtggcccagcagatcctgtccatcctatctgccttgactgccaacctcacacgtttctattttgagggctttgaaataaatctggtgtggtcttgtgggatcttcatcaccatgaatcctggctatgccggccgcacagagcttccagagaacctaaagtccatgttccgcccaattgccatggtggtgcctgattctacgcttattgcggaaatcattctctttggggagggctttggcaactgcaagatcctggccaagaaggtgtacacactgtactcactggctgtgcagcagctctccagacaggaccactacgacttcggcctgcgcgccctcacttccctgttgcgctatgctggcaagaagcgtcgcctacagccagatctgtctgatgaagaggttctgctgctctccatgagagacatgaacatcgccaagctgacgtcagtggatgtcccattgttcaatgctattgtgcaggacctcttccccaacatcgagctcccggtcattgactatggcaagctacgggacaccatcgagcaggagatccgagaaatgggcctgcagatcacaccctttaccctcaccaaggttttacagttgtacgaaaccaagaactctcgccactccaccatgattgtgggtggcaccggcagcagcaagaccacctcctggaaaattctgcaggcctctctgacgtccctgtgccgtgctggagaacccaactacaacatcgttagagagttccctttgaacccaaaggcactgtccttaggggagctgtatggcgagtatgacctcaacaccaacgaatggaccgatggcatcctgtctagtgtcatgcgggttgcctgtgcagatgagaagccagacgagaaatggatcctttttgatggccccgtggacacgctgtggatcgagagcatgaactctgtcatggacgataacaaagtgctgaccctcatcaatggcgagcgcattgcgatgcccgagcaggtgtctctcttgtttgaagtggagaacttggctgtggcctctccagccactgtgtcccgctgtgggatggtctacactgactatgtggacctgggctggaagccttatgttcagtcatggctggaaaagaggccaaagacagaagtagagccgcttcaacgcatgtttgaaaagttcatcaacaagatactgagcttcaaaaaggataactgtaatgagctggtacctgtccccgagtacagtgggatcatctccctctgtaagctctacacagtcctggccacacctgagaatggggtgaacccagccgatgccgagaactactcctttatggtggagatgacctttgtgttcagcatgatctggtctgtgtgtgcctctgtggacgaggacggacgcaagaagattgacagctaccttcgagaaatcgagggctcctttcccaataaggacacagtgtatgaatactacgtgaaccccaagatgcggacttggacgtcatttgaggagaagctccccaagagctggcgttatcctcccaacgcccctttctataagatcatggtacctactgttgatactgtgcggtataactacttagtgagcaccctggtggccaaccagaatcctgtcttactggtgggtcctgtgggaactggaaagacctccatagcccagagtgttctccagtccttgccctccagccagtggtcagtgctcgtcgtcaacatgtccgcacagaccacgtcaaacaatgtgcagagcatcattgagagcagagtagagaagcggaccaagggtgtgtatgtgccattcgggggcaaaagcatgattacttttatggatgacctaaacatgcctgccaaggacatgtttgggtcccagccgcccctggagctgattcgcctctggattgactacggcttctggtacgatcgtgtgaagcagagcatcaagcacatccgagacatgttcctgatggctgccatgggccctcctgggggtggacggactgttatctccccaaggctgcagagtcgcttcaacattatcaacatgaccttccccacggaatcccagatcatccgcatatttggcaccatgatcaaccagaagctccaggactttgaagaagaggtgaagcccattgggaatgtggtaacagaggccaccctggacgtttacaatacggtggtacagcgcttcctgcccaccccggcgaagatccattacctcttcaacctccgggacatctccaaggtcttccagggcatgcttagagccaacaaggactttcatgataccaaagccagcatcacaagactctggattcatgagtgtttcagagtcttctctgacagactggtcgatacagcagacatggaagcctttatgggcatcttaagtgacaaactcggtaccttctttgacctcacgtttcatcatctctgtcccaacaaacgccctcccatctttggggacttcctgaaggagcccaaggtctatgaagacctggtagacctgacagtattgaagacagccatggagacggccctgaatgagtacaatctgtctccttcggttgtgccaatgcagctggtgctcttccgagaggccattgaacacatcactcggatcgtgcgtgtgatcggacagccccgaggcaacatgttgctggtggggatcgggggcagcgggaggcagagtctggcccgcttggcgtcttccatctgcgattataacacgttccagatcgaggtcaccaagcactaccgcaaacaggagttccgagacgatatcaagcgcttgtatcgacaggcaggggtagaactccagaccacgtctttccttttcgtggacacccagatagctgacgaatccttcctggaagacatcaacaacatccttagctcgggcgaagtccccaatctctacaagtctgacgaatttgaagagatccagaaccatatcatagaccaggcccgggcagaacagataccagaatcctcggacagcctctttgcatacctcatcgagcgcgtgcggaacaacctgcacattgtgctctgtctaagtcccgtgggagaccccttcaggaattggattcgccagtacccagccttagtaaactgtacaaccatcaactggttctcagagtggccccgagaggccttgctagaggtggctgagaagtacattataggagtggacttggggacacaggagaatatccacaggaaagtggcccaaatctttgtcaccatgcactggtcagtggctcagtattcccagaagatgctgttggaactgcggagatacaactatgtcacacccacaaactacctggagctcgtgtctggatataaaaagtacgaaagccaagagacccggagggctggggtgttggtgtctttcgaagatgctgattggcttctgggagaaaagcggcaggagctgctggaccaagccaataagcttcgaactggattgtttaagattgacgaaactagggagaaagtcgaagtgatgtccttggagctggaggacgccaagaaaaaagtggcagagttccagaagcagtgcgaagaatacctggtcatcattgtgcagcagaagcgggaagcagatgagcagcagaaggccgtcactgccaatagtgagaagatcgctattgaggaggtcaagtgccaggcgctggccgacaatgcccagaaggatctagaggaagcattgcccgcccttgaagaagccatgcgggccctagagtctctgaacaagaaggacataggtgagatcaagtcctacggacgaccccctgcgcaggtggaaattgtaatgcaggcagtcatgattcttcgaggcaatgagcccacgtgggcagaagcaaagcgacagttaggggagcagaacttcatcaagtcattgatcaactttgataaagacaacatctcagataaggtattgaagaagatcggggcctactgcgcccagcccgacttccagcctgatatcattggcagagtctccctggctgctaagtccctctgcatgtgggtgcgggccatggagttgtacgggcgtctgtatcgagtggtagagcctaagcggatccgaatgaacgccgccatggcccagcttcaggagaagcaagcagccctagctgaagcccaggaaaagctgcgagaggtggcagagaaattggagatgctgaagaaacagtatgatgagaagctggcacagaaggaggagcttcgaaagaaatcggaggagatggagctgaagctggagcgagcaggaatgttggtgtctgggctagctggtgaaaaggcacgatgggaagagactgtgcagggcctggaggaggatctgggttacctggtgggcgactgtctgattgcagctgcgttcttgtcctacatgggaccctttctgaccaattaccgggatgagattatcaatcaaatctggatcaggaagatcagggagcttcaggttccctgttcacctcgctttgccattgataacttcctgaccaatcccaccaaagtccgggactggaacatccaggggttgccctcagatgccttctccacagagaatggcatcatcgtcaccaggggcaacaggtgggccctcatgatcgatcctcagggccaagccctcaagtggattaagaacatggaaggaaaccagggccttaaaatcatcgacctgcagatgcatgactaccttcgagttctagaacatgccatccagtttggatttccagtgctactccagaatgtgcaggagtatctggaccccacgctcaacccagtgctcaacaaatctgtagctcgaattggtggtcggatgctgattcgaattggtgacaaggaggtggaatacaatcccaatttccgtttctacctcaccaccaagctctccaatccccactataatccagagacttcggctaagaccaccattgtcaacttcgctgtaaaggagcagggcctggaagcccagctgctgggcattgtggttcggaaggagcgaccagagctggaggagcagaaggactctctggtcatcaacatcgctgcaggaaagagaaagctcaaagaactagaggatgagatcctgcgcttgttgaatgaggccacaggctctctgcttgatgacgtgcagctggtgaataccctccagacatccaagataacggccaccgaggtgaccgagcaactggagaccagtgagaccacagagatcaacattgacttggcccgagaggcttaccgtccgtgtgcccagcgggcctcggtgctgttctttgtgctcaatgacatgggccgcattgaccccatgtaccagttctccctggacgcctacatcggcctctttatcctcagcattgacaagagccaccgcagcaataagctggaggaccgcatcgagtacctgaatgactaccacacctatgctgtctacaggtacacctgccgaaccctttttgagcgccacaagcttctgttcagttttcacatgtgcgccaaaatcctggagacgtccggcaagctcaacatggatgagtacaacttcttcctgcgtgggggtgtggtcctggatcgtgaaggccaaatggacaatccatgtaccagttggctggcagatgcctactgggataatatcacagaactggacaaactgaccaacttccatgggctcatgaactcctttgagcagtaccctcgggactggcacctgtggtacaccaactcttccccggagaaggccatgctgccaggtgagtgggagaatgcgtgcaatgagatgcagcggatgctgatcgtccgctccctgcgtcaggaccgagtggcattctgtgttacttccttcatcgtgtccaaccttggctctcgattcattgaaccgcctgtgctaaacatgaaatcggtgatggaggactctaccccgagatccccactggtattcatcctgtcccccggtgtagaccccaccagcgctctgcttcagctggcggagcacacaggcatggcccaccgcttccatgccctgtccctgggccagggccaggcccccattgctgctcggcttcttcgagaggggcactgggtgttcctggcaaactgccacctgtctctgtcttggatgcctaatctggacaagttggtggagcaactgcaggtggaggaccctcacccttccttccgcctgtggctcagctctagcccccacccagacttcccaatctccatcctgcaggccagcatcaagatgaccacagagccaccaaagggtctaaaggccaacatgacacgtctttatcagctgatgacagaggcacagtttacccactgctccaagcctgccaagtataagaagctgctctttgccctctgcttcttccattccatattactcgagcgcaaaaaatttttacagcttggctggaatattatttatggcttcaacgactctgactttgaggtgtcagagaacctgctgagcctctatctggatgagtatgaagagacaccctgggacgcgctcaaatacctcatcgctggtgtcaactatgggggacatgtcacagatgactgggaccggcgtctgctcaccacctatatcaatgattatttctgtgatctgagcctaacaactcccttctaccggttgtctgtactggacacttattacatcccaaaggacgggagcttggcctcttacaaagaatatatcagcatgctgcctagtatggacccccctgaggcctttggccaacaccccaacgctgacgtggcctcccagatcacagaggcccggaccctctttgagaccctgctttccctgcaaccccagatcacacccaccagggttggtggccagagccgagaagagaaggtcctagagttggctgctgatgtgaagcagaagatccccgagatgatcgactatgaggggacccgaaagttgctggctcttgacccctccccactcaatgtggtcctcctgcaggagatccagagatataacaagttgatgaagaccatcttgttctccctgacagacttggagaagggcatccagggcctcatcgtcatgtcaacaagcctggaagagatcttcaactgcatatttgatgctcatgtccctccactctggggaaaggcaagctcccaacggctgaggcatatagcagacttcaaagagcctggggtatatccctcacaaaagcccttggcgtcatggacccgggacctggctgtgcgtgtggaacagtttgaaacatgggccagtcgagcccgccctccggtgctcttttggctgtctggcttcactttccccactggcttcctcactgcggtactgcagtctgccgctcgccaaaacaacatctcagtggacagcctctcttgggaatttatagtttccactgtggacgacagcaacctggtgtatccacccaaggatggagtttgggttcggggcctgtacctggagggtgctggctgggaccgaaagaattcttgtttagtggaggcggagcccatgcagctggtctgcctcatgcccacgatccacttccgtccagcagagagccgaaagaaaagtgccaagggcatgtactcctgtccctgctattattatcccaaccgggcaggcagcacagatcgagcctcctttgtcataggcatcgatctccgatctggatccatgacatctgatcactggattaagaggggcactgctctactgatgagcctggacagctgatgagctcttctctcctccttgagagggtcggaagccctaggaccttgaactaaagctggatctcaggctttgactttagctgaatctagcatatagtgacactctgacagtacctagtggcgctagcggaaaaggtggaagacttgtattggcgctcagtgcagtaaaaaccgtgcaaaaccaa

SEQ ID NO: 539 - protein, 3906 aa, Mus musculus
VLPSRWLAKPRRSEKWLAGEAPGQAELSELLSPLQAQELQRLPCSLMVRSQSPSLARRTLKPFFLSRTMLTGLADATWTGEHDMVLEHFVQDPAVPALTIFIDPVFGLKLELGMPVQTQNQIVYFIRQAPVPITPENFEETVQYGTVRGAYIPALLRLLSGVYVPQIFMNKSWPESIRNHFVSHLHRFLASLTDTRYKLEGHTVLYIPAEAVQMDPEVVVKDKELVQRLETSMIHWTRQIKEVLSAQESVETGENLGPLEEIEFWHNRCMDLSSISKQLVKKGVKHIESILFLAKSSYLTPFRKLAQQIQDGSRQAQSNLTFLSILREPYQELAFMKPKDISEKLPKLISLIRIIWVNSPHYNTRERLTALFRKMSNEIIRLCCHSISLDRIFEGYVNSSKEDLEGCISCCQAWKEHYLRAVQMHTQFSNRGWVLDQTSIFAQVDAFVQRCKDLIEVCECQYHFARWEDGKQGPLPCFFGAQGPQITRNLLEIEDIFHKNLQTLRAVRGGILDVKNTSWHEDYNKFRGGIKDLEVMTQNLITSAFELVRDVEHGVLLLDTFHRLATREAIMRTYEKKAVDLYMLFNSELALVNRELNKKWPYLEPYMTQYSGQAHWVRILRRRIDRVMNCLSGAHFLPHIGTGEESIHTYQQMAQAIDEMVRKTFQEWTATLDKDCIRRLDMSLLRISQEKELDALQQVWEITRDWEESWNQWKMGCFQTLQTEAMESMAHGLFRRLTRLAKEYKDRNWEIIETTRSKIEQFKRTMPLISDLRNPALRERHWDQVKEEVQREFDQESESFTLEQIVKLGMDQHVEKIAEISASATKELAIEVGLQNIAKTWDSTQLDIVPYKDKGHHRLRGTEEVFQALEDNQVSTMKASRFVKAFEKDVDHWERCLSLIVIEMVLTVQRQWMYLENIFLGEDIRKQLPNESALFDQVNNNWKAIMDRMNKDNNALRSTHYPGLLETLIEMNAIDIQKSLDMYLETKRHIFPRFYFLSNDDLLEILGQSRNPEAVQPHLKKCFDNIKLLKIQKVGGSSSKWEAVGMFSGDGEYIDFLHPVLLEGPVESWLGDVERAMRMTLRDLLRNCRVKKFLNKRDKWVKDWAGQVVITASQIQWTADVTKCLMTAKERSDKKILKVMKKKQVSILNKYSEAIRGNLTKIMRLKIVVTIEIHARDVLEKLYKSGLMDVSSFDWLSQLRFYWEKDVDDCIIRQTNTQFQYGYEYLGNSGRLVITPLTDRSAVGGCYMTLTTALHLHRGGSPKGPAGTGKTETVKDLGKALGIYVIVVNCSEGLDYKSMGRMYSGLAQSGAWGCFDEFNRINIEVLSVVAQQILSILSALTANLTRFYFEGFEINLVWSCGIFITMNPGYAGRTELPENLKSMFRPIAMVVPDSTLIAEIILFGEGFGNCKILAKKVYTKLAVQQLSRQDHYDFGLRALTSLLRYAGKKRRLQPDLSDEEVLLLSMRDMNIAKLTSVDVPLFNAIVQDLFPNIELPVIDYGKLRDTIEQEIREMGLQITPFTLTKVLQLYETKNSRHSTMIVGGTGSSKTTSWKILQASLTSLCRAGEPNYNIVREFPLNPKALSLGELYGEYDLNTNEWTDGILSSVMRVACADEKPDEKWILFDGPVDTLWIESMNSVMDDNKVLTLINGERIAMPEQVSLLFEVENLAVDATVSRCGMVYTDYVDLGWKPYVQSWLEKRPKTEVEPLQRMFEKFINKILSFKKDNCNELVPVPEYSGIISLCKLYTVLATPENGVNPADAENYSFMVEMTFVFSMIWSVCASVDEDGRKKIDSYLREIEGSFPNKDTVYEYYVNPKMRTWTSFEEKLPKSWRYPPNAPFYKIMVPTVDTVRYNYLVSTLVANQNPVLLVGPVGTGKTSIAQSVLQSLPSSQWSVLVVNMSAQTTSNNVQSIIESRVEKRTKGVYVPFGGKSMITFMDDLNMPAKDMFGSQPPLELIRLWIDYGFWYDRVKQSIKHIRDMFLMAAMGPPGGGRTVISPRLQSRFNIINMTFPTESQIIRIFGTMINQKLQDFEEEVKPIGNVVTEATLDVYNTVVQRFLPTPAKIHYLFNLRDISKVFQGMLRANKDFHDTKASITRLWIHECFRVFSDRLVDTADMEAFMGILSDKLGTFFDLTFHHLCPNKRPPIFGDFLKEPKVYEDLVDLTVLKTAMALNEYNLSPSVVPMQLVLFREAIEHITRIVRVIGQPRGNMLLVGIGGSGRQSLARLASSICDYNTFQIEVTKHYRKQEFRDDIKRLYRQAGVELQTTSFLFVDTQIADESFLEDINNILSSGEVPNLYKSDEFEEIQNHIIDQARAEQIPESSDSLFAYLIERVRNNLHIVLCLSPVGDPFRNWIRQYPALVNCTTINWFSEWPREALLEVAEKYIIGVDLGTQENIHRKVAQIFVTMHWSVAQYSQKMLLELRRYNYVTPTNYLELVSGYKKYESQETRRAGVLVSFEDADWLLGEKRQELLDQANKLRTGLFKIDETREKVEVMSLELEDAKKKVAEFQKQCEEYLVIIVQQKREADEQQKAVTANSEKIAIEEVKCQADNAQKDLEEALPALEEAMRALESLNKKDIGEIKSYGRPPAQVEIVMQAVMILRGNEPTWAEAKRQLGEQNFIKSLINFDKDNISDKVLKKIGAYCAQPDFQPDIIGRVSLAAKSLCMWVRAMELYGRLYRVVEPKRIRMNAAMAQLQEKQAAEAQEKLREVAEKLEMLKKQYDEKLAQKEELRKKSEEMELKLERAGMLVSGLAGEKARWEETVQGLEEDLGYLVGDCLIAAAFLSYMGPFLTNYRDEIINQIWIRKIRELQVPCSPRFAIDNFLTNPTKVRDWNIQGLPSDAFSTENGIIVTRGNRWALMIDPQGQALKWIKNMEGNQGLKIIDLQMHDYLRVLEHAIQFGFPVLLQNVQEYLDPTLNPVLNKSVARIGGRMLIRIGDKEVEYNPNFRFYLTTKLSNPHYNPETSAKTTIVNFAVKEQGLEAQLLGIVVRKERPELEEQKDSLVINIAAGKRKLKELEDEILRLLNEATGSLLDDVQLVNTLQTSKITATEVTEQLETSETTEINIDLAREAYRPCAQRASVLFFVLNDMGRIDPMYQFSLDAYIGLFILSIDKSHRSNKLEDRIEYLNDYHTYAVYRYTCRTLFERHKLLFSFHMCAKITSGKLNMDEYNFFLRGGVVLDREGQMDNPCTSWLADAYWDNITELDKLTNFHGLMNSFEQYPRDWHLWYTNSSPEKAMLPGEWENACNEMQRMLIVRSLRQDRVAFCVTSFIVSNLGSRFIEPPVLNMKSVMEDSTPRSPLVFILSPGVDPTSALLQLAEHTGMAHRFHALSLGQGQAPIAARLLREGHWVFLANCHLSLSWMPNLDKLVEQLQVEDPHPSFRLWLSSSPHPDFPISILQASIKMTTEPPKGLKANMTRLYQLMTEAQFTHCSKPAKYKKLLFALCFFHSILLERKKFLQLGWNIIYGFNDSDFEVSENLLSLYLDEYEETPWDALKYLIAGVNYGGHVTDDWDRRLLTTYINDYFCDLSLTTPFYRLSVLDTYYIPKDGSLASYKEYISMLPSMDPPEAFGQHPNADVASQITEARTLFETLLSLQPQITPTRVGGQSREEKVLELAADVKQKIPEMIDYEGTRKLLALDPSPLNVVLLQEIQRYNKLMKTILFSLTDLEKGIQGLIVMSTSLEEIFNCIFDAHVPPLWGKASSQRLRHIADFKEPGVYPSQKPLASWTRDLAVRVEQFETWASRARPPVLFWLSGFTFPTGFLTAVLQSAARQNNISVDSLSWEFIVSTVDDSNLVYPPKDGVWVRGLEGAGWDRKNSCLVEAEPMQLVCLMPTIHFRPAESRKKSAKGMYSCPCYYYPNRAGSTDRASFVIGIDLRSGSMTSDHWIKRGTALLMSLDS

SEQ ID NO: 540 - DNA, 45853 bp, Homo sapiens
tggcttcctgctgcttccaatgtgaatgcacagagtccttggtgcctgctctataagaagagactttccactcagacaaaggcgggcaagcgtgagctgagaattgctgtcctggaaggttgtggggtgagggaaggaaagttctgggggccaggcctctgacatctcttccttgtccaccttaccctcctccccataggttccaggcagagggtggttatgtgctgtaccctcagatcggggaccggctagacctgctctgcccccgggcccggcctcctggccctcactcctctcctaattatgagttctacaagctgtacctggtagggggtgctcagggccggcgctgtgaggcaccccctgccccaaacctccttctcacttgtgatcgcccagacctggatctccgcttcaccatcaagttccaggagtatagccctaatctctggggccacgagttccgctcgcaccacgattactacatcattggtactgctgggcagagggcacgattgagtggggggctcctgatactgagcagagagggagggggacccctgcagccaagagggagatcccagtgccctcaggcagtgttcacaccagggtgtggggccagaatcagggctagattctggagtgccaacctcttcctctggcttttctctcccagccacatcggatgggacccgggagggcctggagagcctgcagggaggtgtgtgcctaaccagaggcatgaaggtgcttctccgagtgggacaaagtgagtggggctgggggacacctcctgggcacgaagggacgttggggcagtacgatcatggttggggcagttgtctcagcccctctctgggtcttcctcatctccaggtccccgaggaggggctgtcccccgaaaacctgtgtctgaaatgcccatggaaagagaccgaggggcagcccacagcctggagcctgggaaggagaacctgccaggtaggaaccaggggctaggcccctgccttccccagcttcctctgctctcagaccccagctgccctgccgtcaccctccctccctcttcagttttgggggcggtgatacaggaaagaggagaagagaggatgggagggtgggaggggaatggaaaccaaatgaggaaaagactcaattagaactaattagccaagtcagtgcttcaatcagtgctgtcagagaagtggggaggactccgtggcaggaagctgaagggctggacacctggattctgagcagagttcggagggggaggagagatggggtccccaaggggcctgggcgctacaagggaagcccatggggacccccagggttgggtgtccaggtgcccaggtggctccttcagtccctccccctctttcctccttcaccccttccctgccaggtgaccccaccagcaatgcaacctcccggggtgctgaaggccccctgccccctcccagcatgcctgcagtggctggggcagcaggggggctggcgctgctcttgctgggcgtggcaggggctgggggtgccatgtgttggcggagacggcgggccaagccttcggagagtcgccaccctggtcctggctccttcgggaggggagggtctctgggcctggggggtggaggtgggatgggacctcgggaggctgagcctggggagctagggatagctctgcggggtggcggggctgcagatccccccttctgcccccactatgagaaggtgagtggtgactatgggcatcctgtgtatatcgtgcaggatgggcccccccagagccctccaaacatctactacaaggtatgagggctcctctcacgtggctatcctgaatccagcccttcttggggtgctcctccagtttaattcctggtttgagggacacctctaacatctcggccccctgtgcccccccagccccttcactcctcccggctgctgtcctcgtctccacttttaggattccttaggattcccactgccccacttcctgccctcccgtttggccatgggtgcccccctctgtctcagtgtccctggatcctttttccttggggaggggcacaggctcagcctcctctctgaccatgacccaggcatccttgtccccctcacccacccagagctaggggcgggaacagcccaccttttggttggcaccgccttctttctgcctctcactggttttctcttctctatctcttattctttccctctcttccgtctctaggtctgttcttcttccctagcatcctcctccccacatctcctttcaccctcttggcttcttatcctgtgcctctcccatctcctgggtgggggcatcaaagcatttctccccttagctttcagccccccttctgacctctcataccaaccactcccctcagtctgccaaaaatgggggccttatggggaaggctctgacactccaccccagctcaggccatgggcagcagggctccattctctggcctggcccaggcctctacatacttactccagccatttggggtggttgggtcatgacagctaccatgagaagaagtgtcccgttttgtccagtggccaatagcaagatatgaaccggtcgggacatgtatggacttggtctgatgctgaatgggccacttgggaccggaagtgacttgctccagacaagaggtgaccaggcccggacagaaatggcctgggaagtagcagaagcagtgcagcaggaactggaagtgccttcatccaggacaggaagtagcacttctgaaacaggaagtggtctggctggaactccaagtggcttagtctgggggatcaggaggtgggaggtggatggttcttattctgtggagaagaagggcgggaagaacttcctttcaggaggaagctggaacttactgactgtaagaggttagaggtggaccgagaaggacttttcccagtcttcagtggcacttcccaagatctcccttcccttgtgctctgtgctgattttaggacagctaagatgactgccatgtgctgtggcaggcctaatttgtcttgttctttcctttccatatcccagtataatctctgttaatcaacaggactaccccaagaacccatgtgctctcccgagtaacccagatggctgtcttgttcattccatcctacatttctgactcctttcagactcaacacagttcccttcttagtgaccaaaatggtggcctactggctggtctagctgacagtggtacttagcaaaggccactgtttccatagtgaccagctgatacctcttcctgccctctagtgtgcaattgggtgttgcctcagtttcctcccagctcagttttattagatcaaagctgttgttgggcaccaggttggccacctcaatcaccagccaagatggttgctttgtccaccagaggtcaagttcacctctctggtgctgtagttcccagctccttcctgatttttctaatcgctccttctggggaacaggaagttgatattgccatggtggcggggtatgccgtcacctcagtagttttactgtaaaagggaaatttgaacaacaaaaaccaaaaaaaataaaaataaaaaacttcaaaagttgacaagaaggctggagaatgactggacttgaattgggacaaaggcttggttagaatggctttcagctgagggttggattgcatgaaaccaaccaaggggggtgggtagggatagggctagtttggagtggtgaggttggcagtgcttggggaggcgaaaatgggctgggcgagaaggcagaggaaggtgtcacctctaggggagggagagagtaatgcaggcaggagtggggtcgccaattcatccatggggacagtctgagtgtcttgctaagccaaagcaccagagacagggtaagacgcaattaggatcaaagtggtaaaaacatgttcacatgttaaagtctattccctaccatccctacccaaggcacttgagaagttttgctgttggggactcatggggagaagggatgtggctgatcagaaggaagtaggaaggactcagggagggacccaggcatcaagctgcgtgtgccctggctccctgtatacccataaccgaggctcttctcccccaaaaagcccaggtgcccagtcccctagacttagccccattctccaaccacaaaagcagccgtcaggagcatcactggagcgagtcagcaggggtcacaacctctgccctccctgcccctcccctgactttaggtcccctcccgctgtctcccatctgcctggaggtcaaggggtccctcttcctctcttctgtccagtgggacccctgctcctccccctccccgtctgagcaagatgcctgggtcttgagaggtgcgggcaccgcaggaggggagttgaaagctgggaggccaggtactgggctgtctggaatttactcttgccttctgagcccacactggagctgcccgaagtggggaggctcgtagggggtggaaaggctggtccttgccccttagtgggggttggttgtcatggcaacatccccttctctacacaatgggaagcccccctcagcctcccgcgtggatggagccgacagccccatcgctggctatcagcctcagggacttggcaaccgtcactatggcaacccagagcccagcaacagggcccactgagaaagggaggggtccaagactggggcagggtggtgtgtgaggggcaagggagatcagggagactccccctccacctacatctagaggcacaggtggagagacaagagggaagagacgtggggataaatagtctccgtgacagacaagcacctcgccaaagcagccaagacatcataacatgctgagagacaggaagacacctggggacagatgcacagccagggagaggaacagcacagactgcacagcgcctgggacacgccccctcagagcgctggcatccagagactccccgcagccccgctcgaatagcacaagaccaacagcctttcacatgtgtagtgacttgggtgtctggagctatttgaaaatgctggtgacttccacgcagaataacacaggccgtcctatttgctttgtggggacaaatacacacacatattcctagagtaacaactgcaacaaaacaactacagcaaaacgactacaggcacaggaagacatttgtttgttcattggtttgttcgttcactcgctcagcagcatgttaaatgctactttgtttcaggcaccggttcaggcgctgggaggacagggtgagtaaggccaggtccccgctttcacaaagtccacatttaggtggggaacgaaataatacaatttcaggtgtgaaaagggatataaacaaaacagaatgacaggatgaggaggatggagagtaaccaggagctgctttatttatttattaatttattaatttatttatttttgagatggaatcttgctctgttgcccaggctggagtgcagtggcgcgatctcggctaactgcaacctccacctcccgggctcaagcgatgattgtcctgcctcagcctcccaagtagctaggattaacaggtgcccgccaccttgcccagctaagttttgtatttttagtagggtcggggtttcaacatgttggccaggctggtctcgaactcctgaccttaggtgctcagcccaccttggcctcccaaagtgctgggatgacaggcatgagccaccgcacccggcctggagctgctttagatgaggaggtcaggaaggtccctttgaaagagatgcccttgatcaggaccttaagtcatgagacaggagtaagccatgcacactggggacgggcatgctagacagaggaacagcaagtgcacgggcacagaggtgagattgtggtgtgtttgggaacagtaagaaggacatcaccaccacatgcatgtttcggatgtgtcctgttcttccctagcctcggcctggaggggagtaagtcacttagggtcttggatccacattaaggaagttgatctcactcagtctcccatccccttgccttttgtttcttgtgtgtctgtgacttgtgttttcctcgtctaaattttaagctctgggagggcaaggatgatgctctgagcttttttgggggctgtggcacagctgctggcagagtccagagcaggaaggcagagcggaagtaaaggaaccgagagggctgggaccacagaagctagagctgtcgccctgccatccccaaaccgcataggattgaggctgtcttggggctgagctgtagagtgaagctcaggctttgccctccttccaaataacggcagctgagggatactattcagcccgaggtgcgtgtgtgtgtgtgtgtgtgtgtgtgtgtgtgtgtgtgtgtgtgtgttgggggtttttagggaaaggggaatggggcaaggagtggcagtgggaatttcttttctttttcttttctttttttttttttttgagacagtctcgctctgtggcccaggctggagtgcagtggtgcaattctcgtgcctcagcctcccgagtagctgggactacaggcatgtgccaccacgcccggctaattttttgtatttttagtagagatggggtttcaccacattggccaggctggtcttgaactcccgacctcaggtgatccacccacctcagcttcccaaagtgctggaattacaggtgtgagccactgtgcctggccttgcagtgggaatttctgatgcggaatggttgacatcatatctggaattttaattagaatgaaaaatggcccttcctaaggggctatatgggccaccgtggacatggggcttgggagagttttgagacctgggagaaatgtcacacggtggtttggaggcaggaggctgtctggcataggctcagagttgggtgggggaaggaaaagggacacagaatgaatgggaatgacaactgggcagccagagagctacttgaaaggtagcagggaaagtggagttctgaagggagttctgaggggaccaggccccaggtaccccaattcccacagggaatcgaagtgttcagttttctggttctccctcttcctccagttgccatcagaaactcaggcaccgcaaccccagtggctggcggggtgatgtcggggggagactgagctgcttcagggggtagcagctggtgagttgggaggaatctgtgtgctcagcaaacagcagcctcagtgcccggtggctgcctcctccctcatcaatcagccccagccaaatgtccttgcattcccaccaccccaaggggactggggctgggccagggtccccaggggagatggggatgggtggggggaggtgaaggggggtgcttggcttcctttcccttggcctctgttctcttctgtcctggaagctctcagttcttcatgtcatggaatgactatcctggcccctaccatcgtgggggcatcagctacaaatcacctgtggggggctgctgggggagaaggatgagtcaggctgtagagtaatctactctggttctcacgggaccagcccagggcacagccggcagggaggctgctggcatagaggccctgtctcccctggcctctgtctctgatgaatgatccggacagcaggccgagaccctgacccctggaatggacctctctttccaccttctcctagcccccagtcctcatcccctgcttccagccaagatccagaggtctggcccccagctcaccccaaatctgctgttccccactagggactggggtctctagaccttagcctctggctccctttccccctcctcagcctttgctcccctccgggacccaggcgtcctgcccactcccttcaccataacaaccattcttttggagttgcttaagactttaatatcatttcattaagtcagcaagttcagagaaggttgggggcacaaagagactgggggtgggcaaaagagggccaaagtaggggggaggcaaggaaagatcccccacccccctctccgtggagatggctctgagaaatcaaatattgacaatgagggaacagaacttattaaatctgggacagggatgtgtgtggggagctgtgggaatggccggatgcctgggttcggagggtaatgaaggttctgggaggaggaaaagggccgtggctgggaggtgcagcaaggctgaggctcgaggtcacaactcttctgccctttcctttgggatgtacacggtcttgcaaccctggctgtttctctagccccgaagagcccctggggaaaagacccccatcatagctagctgtggttgccccgccttcgtcccttccccctacctccacctctgttgatgagcttcagcagcgtttaatcggattgagcagtaattagcaaagcgagatgtttgattacctatttagcataatgtggggggctgggatccgtaggcacagccacagttggggaggggggtttaagaaaagaaatggggtctgtgcaaagttcctttccccgagggacccatgaaccttgcccctgaggctccccaccccacgcctccagcaaattttcactcctttgggacttttccctaggggttctggccaaccacatcacctctgtctgccacccatggcctatctggctagaggaacacctccacgttccatcttagctgtgctagctgtgcagctggttttggggtgggcggtactcctctccttccattcctgctgtcagcaacaggagtctggctgggcaggaggaattattgggggtcggggggagggaaagggttgacacttctgggaataaagatacggtaggtgggagggtgaggtcagcgctgggatagggtgtggttaatccacttgctcttcaggagtaccagggactgccactcctggtagtgccaggctggcataatgagatctgttaggtgtgaacgccaaacagaaaatgggggaactgaggtgccagcttctcttctcctcatccagcaaagaaaatgtcataaatttcgctcctcatggaaatgtaatcagtgggctcgctgctggctttgtcttaattaggcactattgatggaaacagggagggcgccttcccatccccccactcggcttcctccctgtatttcccaggtctccccaaagctcctcccggcaccaggtacagcggtcttccaggcgccttctagcagccccggcccgcagcgccccctggcaccctcggagatgtaccccggccctcatagccctcccctctcgcctcctctctcacgacgcagcctttgttcctatggagagcgaagcccctcccaggcccggtcaccttccccagggagtccccgcctctcatcccccccaaaaaccagcgatgccttcgaaagccaatcctcagattcccaaaactccagttcccgtcttccctccctttccccgccccgcgccgcccccccgcaatcctagaccccaatccgaactaagaagggggaaggagcaggagggcaagggtgctccaggcccggtttttcccccggatccagctgcacccacggctgcctggaaatcctggaacgccttctacatcgcgaatatccctcgccggcctggcgcccggcgccatctgctggacccgttccggctggggcgcacagacctgggcgcggggtcgggcgattgggttctccctgccttttcaatgtcctgcggggcggtggctcactgtctctcgccccagcccttccagctgggtcctgacaccaggccccccgcacccttcggctcgccagatgtggctactttcctttagtcccggagccttcaagccctgggtccctgaggggtagacctgggcggggtggggccgcgaagcagggatccagggcgcctgcgcggaggaggcgggctccgaggggccgcacaccggccactcgcccctccctgcccggggttgccatggggacgcgtgcagacgccggcccgagagggctgcgaggggcaacttcttagagtggcccatcggtcggtctagggaggggagggtcagcgtggcaaggtgtgtgtcgggggcagagggaaggagggaaggagtgctggggagaaggggcagtagtgtcggggtaggaagggacagttgttggggagaagaggcagttgtggagggagagggagcaaggaatatttgtgtgggggagggggaggagaaggggcagttgtgacagctgggggggaagagccattctgaggggaaatttgcctgctggtaaccagtttaaggataccagctgctggtataaatactgctggataaatactgctggatttatactgcaggataaatactgctggcccctgcggtatttcctagtactagagtgagccccgacttagcagagcagttcctcctggggcctgcggtgtgggatcgcgtggtgaaccccacggtgcatgcgcctcaggctctagtttgaggcaggaaagcgcagcttgatgcttctctggagactgatggaggaagcctccttgctgtagttggttttattgatttgctggcctaacagaacgtttttccttggagcaaagtacaaatccttcaagtttgaaattcataacctgagatcaatgcctgtggcagcctgtggggatgaggaaggagagccacaggtgccgttaggctgcagcctaatgaaaagagagtgcccagcgcctcagactttgcgcctgggattctgagcacctgtccgagatccccgcttcctgccatcctacctttctgagagaggcaccactgtgaccttcctcgtgccccaattgctttttcctcatgacacaatttgaaatttatgattggatgacttttgtccttctttcttccaatctgttctcagggcattttgagtcaaataaatgatcctgactgatcttaaccattagcacagagttcctcagccaactctgctaagagacctcagtacacacaaaacagtgttcctgcccctcaggacttcaaagcgatagacccaggtggcaaatactgtttttctctgtttacagatgttgcagattttagtgggattgggaggagcatatttccatttaacttgggaggaaaagaggtacataggaaaatcatcttggtttgcttgaatgattgaacagtgacaaaggatgggggatgtgcaccccttccttgatcctctctcactcactcatggtcctggagggtagagtggatgagggtttgggcaaccacacttcagcttgatagatcttttcctgattatcttatgttctcataccccggggcagagatagaggttctaaatcctcattagtggggtgtctggccatcttttttttttttttttttgagatagagtctcactctgtcagccaggctggagtatagtagcatgatcttggctcactgcagcctctacctctcgggttcaagagattctcctgcctcagcctcccgagtagctggaattacaggcacgcaccaccactcctggctaattttttgtatttttagtagagacggggttttgccatgttggccaggctggtctcgaactcctgacctcaggtgatccacccggctcggcctcccaaaatgctgggattacaagcatgagccaccgcacccagcctggccatcatctttaactcccatttgttcctagtgccttgagggactgactttgatttttagcccagtgccccgaagacagtaggatatcctagggaaaaacagcaaggcctcccaggcccctgtggagtacagagcccttgtggttaatggagcagggtgtgggtaccaccagaaaagatgatcatattgagtttcagtcaatttatgaattcaaaagggactgcttgtatcagggggctggttcaggggtggtatctgcttgtagactctccactcctgtatacctgtaggttttgcctgcacgatgtccagcaaagctgagaagaagcagcgattgagtggccgaggaagctcccaggcaagctggtcagggcgggccactcgggctgctgtggccacacaggagcaggggaatgccccggctgtcagtgagccagagctgcaggctgagctccccaaggaggagcctggtgggtacttgctggggcagaggatgcttagcaatggagggtggggaaagtcagaggggcttggaggcattttagggctggggagcaggcgctgttgcttctgggcaggaaacgggctaagtgacgcccccagccatggaggttcagcagccctgccactgagtcctttttttgtatgtcttcctcctggccagcctcatccttgttctttctgtcttaaaatttcccacaatataccaggagttcaccaaccagtcctttctctagcctcttcctccttatttcaagtgttcctggttgctcctaccccactgaagagggtttgatctcttcctttttcccattttcaccctgggtggcaaaacaaataatgtttttctcccattaagcccatcaccatggagactcagcctgttttgccaccctttgaatccaaagcccggctgatgctttctaccatctgttgagggctgttctatctccgccctcattttggcagggacttggtagactgcggaggttcaggttcaggatgacaggaaagaagtctagatctagggaggaaagagtttaacgaggcagcctcttgtggctttgacctgagggattcctttcctgtgggtgagccggagccagtaaggttggaaggtttttggtagttgttgctattgctgggatctccctgagagcactggtcagtgtagacaggactatgagctaagtgtagacctccttctttacctggagctcctttacactgatagtagcttgtgaaatagaatccccttctaaaattaaaggttgagaggttaagcgtgggcatgggagaaaagtccctgggccataagaacttgcattaggttccaggatcttagaaatgtgcagaatgtatccttctgagttctgaagtgctcaggtgaaagcagttaaaatgggattgctcgctgctaggaggagtaggggaagatgggagggaagacagtgaggttcagtatggagaatcctctggggaggtaagggaaggagctttaaaatgaatgtgttggccttcgaacagcaaggatttctgcctctcccagctccaagctttcttttctttctttcttttttttttttttttttttttgagacaaattctcactctgtctcccagcctggagtgcattggcataatctcagctcactgcaacctctgcctcccgggctcaagtgattcttgtgcctcagcctcccaagtagctgggattacaggcatacaccaccatgcccagcttattttttttatttttttgagacagagtctctctcagttgccaaggctagagtgcagtggtgcgatctcagttcactgcaacctccacctcctgggttcaagcgattctcctgcctcagcctcctgagtagctgggattacaggcgtgtgccaccacacccggctaatttttgtatttttagtagagatggggtttcaccatgttgcccaggctggtctcgaactcctgtcctcgagtgatccacctgcctcggcctcccaaagtgctgggattacaggcgtgagccaccgcacccagtctcccctggcctagttcttgcctggaacctgaatgccagcagttttcccaagggagttggatcatctcacctactcacctactactaagctccggaatcgcctgttccatcttttcacgccttcctgcctcggcctctgtgcctcattcccctcttagttttcctttctggaagccagagggagtttcctgttcctcatggtcttttggttatatctcatttgttccttcctcctttcagcccctggggaatgggaaagccaccagttttaccccaatctcctgtgtgactagtagatcaggaggcagagaaacagagccgctgggttttatgggagtcagagtgggtgtggcagaactgaatgctcagcaggccagtggtttggagaagggctgattcctatgagccccaacttctccatgtgggaagaggagtgggggaagatggagggccagaagctgtatgcctggaataacctcagtactaaccgccttcattccctcacccctaccccagttagtgtttgttttatttttattttttggagacagaatcttgccctgtcacccaggctggagtgcaatggcgtgatctcggctcactgcaacctctgcctcccggattcaagcaatcctcctgcctcagcctcccgagtagctggaattacaggcacccgccaccatgcctggctaattttttgtatttttatagagacgggggggttcaccatcttggccaggctggtctcgaacgcctgacttcgggcgatccaccagcctcagcctcccaaagtgctgggattacaggtatgagccatcgtgcccggcccccagtcagctttttacattaaattgacagagaattcactgactctaaaatttacctttttaaagtctacagttcagtggtttttggtatattcacaaagctgtgcaacgttcccactatctaattttagaacatttttatcccgccaaaagaaagccactttaagcaccttgagaaattggcaccaggtgactcctatatctttacttgtaagttgcatcagagcctcgtcttttagcagtcactcctgattcccccttcccccgcagatcccaggaaccgctcatctattttctgtctttatggatttgcctatgctggacatttcatcgagtggtctctcatgactggcttttttcacttggcactgtgttttcgaggatcatccatgttgtagcatgaaccacaccgccatgccttctgatggctgaataatagcccactgcatgtttatatcaccttttgtttatccattcctctgttagaagacactgagctgttgccaccttttgcctattgtgaataatgctgctacgaatgctgtaatgcaaatctctctttgagtccttgctttcaaggtctctacctagaagtggaattgctgggtcattgggtggctgtgtttagctttctttcttttctttcttttcttttctttccttttttttttttttttttttttgagacagagtcttcgctctgttgcccaggctggagtgcagtggcgcaatctcggctcactacaagctccgcctcccaggttcacgccattctcctgcctcagcctccagagtagctgggactacaggctcccaccagcacatctggctaattttttgtattttttagtagagacggggtttcaccatgttagccaggatggtcttgatctcctgacctcatgatccgcccgccttggcctcccaaagtgctgggattacaggtgtgagccactgtacccggcttttttttttttttttttttttgagacagggtctcactctgtcactcaggctggagggcagtggcacgattatggctcactgcaacctctgcctcctgggttcaggtgattctcctgcctcagcctcccaagtagctggaattacagacacccgccaccacacctggctaattttgtatttttagtagagacggggtttcactatattggccaggctggtctcaaactcctgacctcaggtgatcctcccgcctagtactcccaaagtgctaggactacaggtgtgagccaccgcgcccagctgactgtgtttaactttccaagaaatgccttcctttttgtatgtttattcttcctagagccacggttggagggacctcaagcacagagtgaagaatcagtggagcccgaggcagatgtggtaggcttgggtcttccctgtggcagatattcctcccccaaaactggtgaatcaaaggatcagttgtggatggcacatgaggaattctctcttgtctgccacttcttctacttgctctctgctgttagcctactcaccacaaatccagttcactgagtaaaagacaaagtcatctgtgccttcgccaggacagaggagggctttaagtaaggcgcaggtctctcttgtctccccaccttgggtcaaactgtgatgagcttattcatcatgcgggtgaacacctgaacaagttgaatgagctgggaagatattgtcctaattggatactaatttctaagacatgctctttccacctttccttcagttctttcctttggctgaagaatttacagaagctgcttcagtcactttgagaaatggcactaaatgacctctgcttctttatttccaagttgcatcaaagcctagtcatgaccatagttacctgggtgagaagaatagagtgatgaccttgacatttttcaaaaagggaaagaaaagtaataactatcgaagaaaaaaatggcaagagacagaaaagtaaaatagagaaaataagactcatggtgttactgcccaaacacatttaatattaatatttgatatgtctggccagacacggtggctcaagcctgtaatcccgcactttaggatgccgaggtgggtggatcacctgaggtcaggatttgagaccagcctggccaacatagtgaaaccccatctttactaaaaatacaaaaattagcagggtgtggtggcggatgcctgtaatcccagctactcgccaggctgagacaggagaattgcttgaacccgagggcagaggttgcagtgagccaagatcgtgccactgtactccagtctgggcaataagagcaaaactctgtctcaaaacaaacgaacaaacaaaacccaaaaaaacaaaaaaacaatattttgatatatcttttacttttgtgcacaggtttgtaagtttgtttgtttttgtataatcctaactttatcatatgttacttttttttttttttttctgagatggagtcttgcttccgtcgagcaggctggagtgcagtggcatgatcttggcttactgcagtctccacctctggggttcaagtgattctccctccttagcctcccaagtagctgggattacaggcatgcaccaccacgcccagctaatttttgtatttttagtagaggcggggttttgtcatatcggccaggctggcctcaaactcctgacttcagctgatccacctgcctcggcctcccaaagtgctaggattacaggtgtcagccaccgtgcctagcccatatgttatgattttgtattaaaccttttcacaaaacattttatttgtattattattattttttgagacagagtcttggtctgttgcccaggctggagtgcagtggcacgatctgggctcactgcaatctccgcctcccaggctcaagtgattctcatgtctcggcctcctgagtagctgggattacaggcacacgccaccatgctggggtcatttttgtatttttagtagagacggggtttcatcatgttggccaggctggtcttgaactcctgacctctggtgatccgcctacctcggcctcccaaagtgctgggattacaggtgtgagccactgtgcctggccttctttgttattttatttgtatttgacttcaagtgaatatatatatatatattttctttttgagacagagtcttgctctgttacccaggttggagtgcagtggcgcgatctcagctcactgcaacctccgcctcccgggctcaagcaattctcctgcctcagcctcccgagtagctgggattacaggtgcatgccaccatgcccggctgatttttgtattttttttagtagaggcagggtttcaccatgttggccaggctggtcttgaactcctgaccctgtgattcgcccccaccccccacccccactccggcctcctgaaatgttgggattacaggcatgagccaccacgcctggccaatttttttttatatttgcatttttaaaaatgacatatctatgcaggtccttttgtctatttgtttattgagtttttagtgtttttcttattggttcatcctgtctatatgtattataggaaagattttagatcactattaatttttcttgacctggaaactttaagagagattccttcttccaggaggaaagatgaaaagacttcgcaagttcactgatctgtatcttcatatcttctgatttcctttatttatttgtttgtttatttatttttgagacggagtcttgctctgtcgcccaggctggagggcagtggtgcaatctcgggtcactgcaacctctgcctcccgggttcaagaaattgtcctacctcagcctcccaagtagctgggattacaggaacccaccaccatgcctggctgatttttgtatttttagtagagatggggtttcaccatgttggccaggctggtcttgaatgcctgacctcaggtgatccacccgccttggcctcccaaagcgctaggattacaggcatgagccaccatacccagctaattttttttttttttgagacagattctcactctgttacccaggctggagtgcaggggtgtgatctcggctcactgcaatctctgactcctgggttcaagcgattctcctgccgcagcttcccgagtagctgggattacaggcatgcaccaccacgcccggctaattttgtatttttagtagagacaaggtttctccatgttggtcaggctggtctcgaactcccgacctcaggtgatccacttgcctcggcctcccaaagtgctgggattatagatgtgagccaccgcgcccagccctctttggtgtttttgtgtctttttccctcctcactttttccttaatgttgtaccaattgacttttacctagtattttacacttcttttggactccatcgtgaagaaattgctcctataccctctcccttttccagcttgtggtctccctgctcctaattgcttgatctaggctaatatcctacacattcccttaattcacctttacctttgagatcgagggctgacatttttaaaaactacaggcataaagataatctcttgcattgggtggataatatcccagttttcctctgtgatctgtttgtttgtttgtttgtttgttttattactcttagaggcaagaaatcttatttttctgtttcttccaaagctggaaagctatctttcagtttctcctaaccattctgaacctgtctggcttctctcatctcccatgtcctcacttgtgattgtggatgggaggaatgactcatcctggcagttgtagttactttggccctctgctctccttctgtagaagcccctcttcctttcccgagctgcgctgacaggactggcggatgcagtgtggacacaggagcatgatgccattctggaacactttgcccaggaccctacagaatccatcctcaccatcttcattgacccttgttttgggctgaagctagagctgggcatgcctgtacaggtgcgtaccctacattcccagatcaaaggtggtcctacagagagccgagggctctcagttccttcatcatccttaagtcttgtcatctcctgtgcccacggcctattgagccccactgtgtcaggcaccctacttggtggcaaggataggaagaaggatgacgcaagaacgctgtcatgggctgggcgcggtggctcacgcctgtaatcccatcactttgggaggccgaggcgggtgggcggatcatgaggtcaggagatcgggaacatcctggccaacatggtgaaaccccatctctactaaaaatacaaaaattagccagacgtggtggtgcacacctgtaatcccagctacttgggaggctgaggcagaagaatcgcttgaacctgggaggcggaggtttcagtgagccaagatcatgccactgcactccagcctggtgacagagaaagactctgtctcaaaaaaaaaaaaaaaaaaaaaaaagaatgttgtcctggtctagtggggaagacagacatataagcaaatatttactatagtttgtgatcatgggcaaagctttataggagcgttatgggagcaactaatggagccagtggaattctgggaagccttgatggtggaggtgctatttgagctgggatgaagggtaagtgggattccatcaagactaggtaagagctattcagcaaagaccactctacgtacaaagaaaagagaagtagtgggaagtgatactgaaaggggcttggggtcagcttatgaagggccttgtatattatactcgagaatttggccgctatcccagagagtgctattgaagtcttttatagtttagatagataactatttcaacagtgtggagaatacattagacaagggtagacctagggtagggagacagttaaaagacagatggatagtaaaatgttgctggtagaatctgggtggtggtcatacaggtcatcactgtaaaattctttgaacttttctgtatatatctttgaaaattttggaaaaaaaatgttggaaaacttaaaaggctgttgctttgctcatattggcggcacatatacaaaagtggaaaggatgagattgattggcatggccctgtgaaacaatgacgcaatttgtgaagcattctgcgttgaacatgggcagaagaacttttgccctgtgcactggcagtaatcagccacaaaacaatgaaaaaagatttcattcgcaaaaggaaccacaatttgcaaaatatatttatatttgaatatacattttaatataaaagtatgatttatatgaaggaaaacaactttgttgcaggccgtgaaaaacgatttgaagaaatgaggagccacagcttgtttcggagtaggaatcttaatatcataaagatcattttatataaaaaagtatcatatttggctcatgcctgtaatcctagcacttcgggaggccgaggcaggctgatcgcttgagcctaggagttcgagaccagcctgggtaacatagtgcaaccccatctctacaaaaaacacaaaaattagccaggcatgatggtgcacacctgtagtcccagctacttgggaggctgaggtgggaggatcacttgagcctgggaggtggaggttgcagtgaggtgtgatcacttcactgcactccagcctgggtgacagagtgagaccctgtctcaaaaaaaaatacaaaaacaaaaaacaaaagggccagttgaaacttcctttaaaaattattacccttgaatacctgataaaatgagcaaaaagtaaaactaccgaaaaattaaaaaaaccaaaccaaccaaaaaaacacaaaaaaaccctgagagtaagcaaatttaatctaatacactttaaaaatgggagaccaatgaaaaacatatgcactgagtcaaagaatggtgctcccctggttacatggagtgaacttgagagggtgtaataaaatcttagtaaagagaaagacaggcctgtgcctttagtcccagctactttggaggctgaagccaaaggattacttgagcccaggagttcgaatcaatcctgggcaacatagcaagaccgccatctccaaaaagaaaaaaaaaaaaagagagagagagagaggaggagcctaggtttgtttgtttgtttgttttgagacggagttttgctcttgttgcccagcctggagtgcaatggcgcaatctcggctcactgcaacctctgccttctgggttcaagcgattctcctgcctcagcctcccgagtatatgggattacaggcatgtaccaccacaccaggctaattttgtatttttagtagagatggggtttctccatgttggtcaggctggtctcaaactcccaacctcaggtgatccacctgcctcggcctccgaaagtgctgggattacaggtgtgagccaccacacccggcttgagccgaggtgttttaacaaagatttttcactgccttaaatgagcactaaccacctgtccatttccctgaggcaattctcttaggccaaagaaaagtgaataaaacataaaacacccaaccctttcactttaacttccaggggcaaaaataaactggtctctcacagtgggaggtcaaatcacccacagtacattagagcaaaaagaatgagttcacatgcttgctgcccaagcacgagcaaaatgaaaagaaattgcatggtaactgcaagtgcattacatcaaagaaaaaagaggaacaaagcatgcaaaagaggaaaacataactgaatgaacaggaggagattcctcacaacagtaccatgttctaccacaacttaataagaccagggattcaattaaaaaaaaaaaaaaaagctgagccctgaaatgataaaatgtgagaataagataaaagggagactgcagattttaggaaatgaataaagcagcatgttataaaaccagtagattggaaatagcaaggaactgaatagctaacccagaaaatcctatcactgacagaggagaggcttgaggtaatcaccgtgtatgcagaagaaaaagccaaggacattaacacaattagagaagctaacagatacgaaagactaacatagatgatcttgtatagagagccaacaaatgaaacaatataaatgtaaagataaaatacaagtaatttccctgaaatgcagaaggaactgaatctgggaatcaaaaaggacacactgtattccacaaaatttgttgcacatcttggctaagctactcaattgtaggaaaaattaattccttaggaatatcccctatgcggtaatcctgctaagaatatttaacttgaatctggcaataaggagacaatccaataaatccaaattaagagacatattgggaaaagaaaactggcctggactattagaaatatcaatgccatgagacaatcgcttgaacccgggaggcggagattgcagcaagccaagattgtgccactgcactccagcctgggtgacagagcgagagtctgtctcaaaaaaaaaaaatttaaaatttaaaaagtatgagctgggcacggtggctcacgcctgtaatcctagcactttgggaggccaaggcgggtggattgcctgagctcaggagtttaagaccagcctgggcaacatagtgaaaccctgtctctactaaaaatacaaaaaaaattagctgggcgtggcggtgtgcacctgtaatcccagctacttgggaggctgaggcaggagaatcgcttgaaccagggaggcagaggttgcagtgagccaagatcacgccattgcactcaagcctgggcaacagagtgagactgtgtctcagataaataaataaattaattaaattaaattaaattaaattaaattaaaaagaaaaagaaaatcaatgccatgaaagaaaaaggttggggagtgctttaaaattaaaggatactaagagacatgaccatgtgtgatcttggattagattctggattgggtctttcaaagcagtgagctaatagaactcaaaattgaaagttagtgagaaaactcataatatttttcataatctttttttcttaccaccatagaaagggatcctttgggaagaaacctctcttctggatgaagaaacatttatttgaagctcaggaattcctttatagctacttctatttctttttatttgcttaaattcaagtaaaattaaatttaatagttttaattaaaaacagcttgctcctatttaaaaataatgattttaatttaattttctatatgtatatagctatagaaaaatatgtagaataatgttttctctaatattaacaatattaatttttaggtggtggaattttagatgacattttaacttttatctttgtagttttctgcattgtttcaattatttatatttaacgtatgtcatcttcacaaaaataatagttgttaaacttttaaaaaaatggacatggccgggcacagtggctcacgcctataatcctagcactttgggaggccgaggcaggcggatcacctaaggtcaggagtttgagaccagcctgaccaacatggagaaaccctgtttctactaaaaatacaaaaattagccgggcgtggtggcacatgcttgtaatcctagctactcgggaggctgaggcaggagaatcgcttgaacccgggaggcggaagttgtggtgagctgagatcatgccatcgcgttccagcctgggcaacaacagcgaaacttcgtctcaaaaaaaaaaaaaaaaaggacacaaaatgccaatatttattttatttctgggtagtaagaagacagatgattattaatttcttccttgtgctttactttgtttttaaaattaaataaattgtcagccgggtatggtggctcgcgcttgtaatcccagcgctttgggaggccgaggcagatggatcatctgaggtcaggagtttgagaccagcctggccaacctggtgaaaccccgtctctactaaaaatatataaattagccaggtgtggtggtacgggcctgtaatcccagatactcgggaggctgaggcagaagaatcgcttgaacccggggggcggagattgcagtgagctgagattgcaccattgcactccagcctgagtgacaaagcaagactccatctcaaaaaaaaaaaaaaaaaaaaaaaattgccaagactagtcaaaaaagcactaaaaaacccaaacgaaacaggtgagtctgatattagggtggaaatggcctttctaaatatgtagcagtcagaactttaaggaattttatatttaattacatgaaagatatatgcttttgtacgtaaaccacaaaagccataagcaaaattgaagcatatgtgtaaaattttgggagaaatatatgcaaccaaaatggaaaaccctagacaattgtctcttccttccagtccttctcctttctgctttttccattggctgaagtgcttcctccattccatcctttctttctatcgatccgttcatccatccaacaaacattattgagcatctactctatgccaggcagtgtactaggttctggagcctagttggacaaaatgtacagtccctactctcaaggcatactctctgcatttcctccccacatctctggatatggaatcatatccgtgaaaagaacaggaagcacttcatggcacttccatttagagaaggatcaggataccctgagggacgtgagaaagaactcagccgggcttttgtgactgggtgtcatggctgggcctggagactgaactctgatctgctgtcttccatgcagacccagaaccagcttgtctacttcattcgccaagcaccagttcccatcacctgggagaacttcgaggcaactgtgcagtttgggacggtgcggggcccctatatcccggccctgcttcggctgctcggtggagtctttgcccctcagatctttgcaaacacaggctggcctgagagcattagaaatcattttgcttctcatctgcacaagttcttggcctgcctgacaggtaagtgggaagaccggagtgactagtttctccttagtgtcccccaactgtacaactagtgaagtggtgggtccttcgtctgagcacctgtgtggaggaggaagtattcagcatgcttatcgaattggtagaatagggtacaagatccgccttcttcttcttttttttttttttttttttgagatggagtctcaccctgttgcccaggctggagtgcaatggcgcgatcttggctcactgcaacctctgcctcctgggttcaagcaattctcctgcctcagactctcgagtagctgggattacaggcacatgccaccacgcctggctaattttttgtatctttagtagagatggggtttcaccatgttggccaggctggtctcgaactcctgacctcatgatccacccgccttggccgcccaaagtgctgggattacaggtgtgagccaccacaccctgccaagatccgctttctaatccagacacacttttctgttgtggaacttgttggccagacctgcttcaacttagacttggaaatttctaaaagcacatgtgggggaaagggaaatataggtgctgtggggacactgggaggactcacatgtctcgtggtagagagtgttgaaggcgcgatacagatctttgaccttattttatggcaatttcttgttataactccatgaggtttccctcttgcctttggtcatttcttgatatcaaaaaagcatgagtcaccatttcttctacctgctctcctgaaatgcatatgcttcctggtcccctaccgatcatcaaccgtgattcctacggggccagcaagaactcatcccctctgtccacttccacaaactttcctttccttagacactcggtacaaactggaggggcacacggtcctctacatccctgcagaggccatgaacatgaagcctgagatggtgataaaggacaaagagctggtgcaacggctagagagtgagtggctggcactgctagcatcacctggcgatcacaggggagagggaaaggggaggctcggatgctgacaatggagttgggttaggaggtctctgtcggggttgcggggagtgaaggatgctgttgggaagcagtgtgaagaaacgaaggagattttgtactctcccctgcagcctccatgatccactggacccggcagataaaggagatgctcagtgcccaggagactgtggagacaggagaaaatttaggtcctctggaggagattgagttctggcgcaaccgatgcatggacctgtctggcatcagtaagcagctggtgaagaagggagtgaagcacgttgaatccatcctgcaccttgccaagtcgtcctacttggcgccctttatgaaactggcacagcagatccaggtttgtgagcgaatcaaaggattcaggctcagcaagaagtgggcaatggttgggatgatacagggagctaagtaaggagagggagccaaggcaatcttcgatagcacagactgacccacccagggttcggccttgtacttgcaggagagtataaaatagtagaatagagggtccctaaggagagagacatcaagttaaccaataaatatacatcaagtaccttctgtgagcacaacccctgccacccagctgggaaaataagattacccaaaacaggattactagacagcgtgggagccaaagatgagctcatgtggttcagtccaggaattacaagataaataccttttttctttgtttgaatctgccttccaaggaaaatccaaggaaaagggataaatactttttttctttttcttttcttttttattattatttttgagacagagtctggctctgttgcccaggctggagtgcagtggtgcgatctcagctcactgcaacctctgcctcccaggttcaagggattctcctgcctcagcctcctgagtagctgagattacaggtgcccgccaccaagcctggctaatttttgtgtttttagtagagacggggtttcaccgtgttagtcaggctggtctcaaatgcctgacctcggtgatccacccaccttggcctcccaaagtgctgggattataggcgtgagccaccgcacctggctctttttcttttcttttcatttctttttttttccttttgagacagggtgctggaggctgaagtgcagtggcacgatctcggctcactgcaacctctacctcctgggctcaagggatcctcccacatcagcctcctgagtagctgggactacaggtgtgcaccagcatgcccggctaactgttgtattttttgtagagacaggattttgctatgttgcccaggctggtctcaaactcctgagctcaagtgatccacccacttcagcctcctaaagtgttgggattacaggcgtgagctacctcacccagctcaattgttaattttttttattattataattttgagacagagtcttgctctgtcgaccaggctggagtgcagtagcgcgatctcggctcactgcaacctctgcctcctgggttcaagcgattctcctgcctcagcctcccgagtagctgagattacaggtgcccaccaccatgcctggctagtttttgtatttttagtaaagacggagtttcatcatgttggccaggctggtctcgaactcctgacctcaggtgatccacccgcctcggcctcacaaagtgctgggattacaggtgtcagccacctcgcccggcctaatttttaaattttttgtagagacaggatctcactatgttgtccaggctggtctcaaactcctggtgatcctcggcctcccaaagtgttgagattataggtgtgagccaccacacctgggcaataaacattaaaaaaaaatttgatatgatgtgacaggctgattatgttagtgctaggtcacacaggaggtaagagtggcctgtagaatacagatagaagacctgtcttcctaggtgaaaatttcagctgggcattaagggaattgagccagaactaactggaggagcctaaagccctggctgagaacagggcagtgaaagggaactgggtgacaactatggggacgaatgagagtgatatgcggccagttgatccgacagcaacagagtatccacttagtgcggagtcctgaattcaactggagaaaacagacacaaaatctagaaaaatctagactcgagggaattcttagtctggtaggggagctagggcacacacatgagaaaagaaaagttgacatgtgctaactctggtccgaaggctcacagagacctgaaatgatcgctactgtgtagggctgatgggagggattcctcttagaggcaagtcagaatggggttgaagatggttaaaaagcacttgtgggctgggcgtggtggctcacgcctgtaatcccagcactttgggaggctgaggcaggtggattactcaaagtcaggagttcgagaccagtctggccaacatggtgaaaccccatctctactaaaaatacaaaaattagctgggcgttgtggtgggcacctgtaatcccagctacttgggaggctgaggcaggagaattgcttgaacctggcaggcggaggttgcagtgagctgagatcgcgccattgcactccagcccgggtgacaagagtaaaactccatctaaaataaataaataaataaaagcacttgtgttgaatcagtgctttctagtgcataaatctatttctcatctctctttactgccaggatggctctcgtcaagcacagtcaaacctgacctttttgtcaatcctgaaggaaccttaccaggagttggctttcatgaagcccaaggacatctctagcaagctccctaagctgatcagtctcatccgcatcatctgggtcaactctccccactacaacactcgggagagactgacctcgctcttccgaaaggtgtgcatatgctgagggtgggatggaggggtttatgagggtggccgggttttctgaagcagggggaatgcattcggcagaggatctgtggttgaaaaggtagtgaagattgcccttctgctcagagactgagctcagaaggcttctaccggcatgatctgctttagggttgctcagcattggagcctgggctggactttctgtttctaggtggaggtggcttaggcaggaagaggggcttcagaagaggagttggtggaagacggggaagcagcaggaagaacagacccccaagctgagctgtgtggaaggaaaagctcttcttcccattcctcaagatggagattgcagtgggggagaggggatttaggaaggagcaccggctcttgaggagcagggcctggtgcattcactgggggtgaaaaagccaaagagtgggagaagggacactgagctgagaccttgctgggcagggtggctgcagagctgggctgaggcagagtaaggggccacctaggacaaggagtgggcatggaacccagaggtgtcggcctggccaggggtggagaaccaggggtgggatgagtttcaggagtcaaattaaggagtagggggctgagacatgaagcacgggcagggggatgcagagaaggagttgggtgtcaaggaggtggggacagaggctgtggggactccttctgcagatgagcaatgagatcatccgcttatgctgccacgccatctccctggaccggatctttgagggatatgtctcttccagcaaggaggacctgcaaggctgcattctctgttgtcacgcttggaaagatcactacgtacaggctgtgcagatgcacatccagtatgatacgcctcccctaacatcccatgtctcaactcccttgtcagccctgtaagagggtagattctgacttctttcctgtacactttgtttagcctcttggttgtattttccgagacccaggagtttctacatctggccaaattttctgtctggatacagatactgtatctcattgccctggcttctccttttttgttttttaattttaattttaatttttttttgagacagagtcttggtctgccacccaggctggagtgcagtggcgcgatctcagctcactgcaagctcagcctccgaggttcatgccattctcctgcctcagcctccccagtagctgggactacaggtgcccgccaccatgccaggctaattttttgtatttttagtagagacagggtttcaccgtgttagccagggtggtcttgatctcctgaccttgtgatctgctcgccttggcctctcaaagtgctgggattacaggcgtgagccaccacgccctgcctggcttcttattttaataatctctcctccctgatcccaggaaccctacctggtcttttcctcctatcttgaccccatcgtctaaaattctattatgtatgaatctgctcctagaacttagatgctctgtctcctgtctggttcttctcaccttgagtcttgtcctttgggattcaggagggttgtttctcggggtctgatttttctagggctttccctgaatgcagggctcctggtctaggtttgcatagccagactgctcttgccttccaattcagtcggcctttctcctgacacaggttctccagtcggggctgggtcctagatcagaccagcatctttgctcaggttgatgcctttgtgcagcgctgcaaggaccttattgaggtgggaagactgaagaaccaaaagctaacagcagaccctccagaatccctccccacctcccaccccaggaaccagggcaaacggggcagaggctaaatattgaacttatggccaggcgcggtggctcacgcctgtaatcccagcactttgggaggctgaggcgggcagatcacctgcgatcagcagttcgagaccagcctggccaacatggtgaaaccccgtctctactaaaaatacaaaaattagccgggcctggtggtgcatacctgtaatcctagctgcttgggaggctgaggcaggagaatctcttgaacccgggaagcggaggttgcagtgagccgagatcatgccactgcactccagcctgggcaacagagagagactctgtctcaaaaaaataaaagaaaagaaaattgcacttaccacattggcttttcctgcacaattgtgtgtcctactaccacaccgctttttctggcatttgcctcttatcgctgccctactatttcatatttcattctgtggccaaagttcatcccagcagccccctgcagctggttggccctccctggtttttagatattttcttcttctttttttttttttcacttgccatcactcacagtgatgtttttagacatttgaagctaaaccaaatagcttaggactttggagtttggaaggaaagcaggaaccctcatgctgtcttcttttttaggtatgtgactgtcagtatcacttcgcccgctgggaagatggcaagcagggtccccttccttgcttctttggtgcccaggggccacagataacacggaacttgctggagattgaggacatctttcataaaaatctgcacacgctgcgagccgttcgcgggggtatcctggatgtcaagaacacctgttggcatgaagactacaataagtgagggaaccacaggctgatgccaggcgtgggcagggaaggcagatcaggcagccaagagtgggaggagtggcgagagtatgcaaaggaaatggtggaaggacagatcgggatcagggcggtggcccgggggggggggacaggagagagtgcaggggaggggggtggcagcttgggttgagggttccagagtgagcctttccggacttggatcttggttctgccacataccagatatatgacattgggcaaattactccaccagctgtctccacttcctcctctatgcaatacggttagagatagagcccatctcacagcattgttttgaggattaaatggattcatgtaggtaaagtacttggagtgcctggcacacaggaagccctctgtcctcagcaatgcatgggattcttcctcaggggttggagttgggggcaggcgagggcactcagctgccacatgcctctccaccggtgcaggttccgtgccggaatcaaggacctggaggtgatgacccagaacctgatcacctcagccttcgagttggtgcgggacgtgccgcacggcgtgcttctgctggacaccttccacaggcttgcctcccgcgaggtgcggctgccccgcggcttcctcggcttcccgtcccgcgtgctttcctggagtccctccttccggaggccctcctgcctccacgtgtgcccttctccatgtccagcattcgggcgcctcttgtctttcttctgttccctggcttcggcgtccccgggagtgtgactcccgcagcggggtgcagctttcctctgggatgagtgaccggagggaacccgccttcccgggcacgtcgccagcctcttcctcttcttccctaggctatcaagcggacttatgacaagaaggcggtggatctctacatgctgttcaatagcgagctggccctggtgaaccgtgaacggaacaagaaatggccagacctggagccctacgtggcccagtattccggaaaggcgcgctgggtgcacatcctccggcgtcgcatcgacagagtcatgaccgtaagtgcctggccttctccatattctgtcgtcagtgagaccgccaggagggatgggggatggctcctgagaggttccccaaagagtcttcaggaccagcacctatgtcggtgaggggagtggcaggtccagttcagtgaggtcagtcgtgggttaagatctgcagaggtggtgtgtgaggctggtagaacatgcgccattttaggaatttcttttcttccttcctttcttttttttctctctctctttctttctttctttctttctttctttctttctttctttctttctttcttccctccctccctccctccctccctccttccttccttccttccttccttccttccttccttccttcctttctttttgtttttttgagacggagtctcacactgtcgcccaggctggagtgcaatggctcgatctcagctcactgcaagctctgcctcccgggttcacaccattctcctgcctcagcctcccgagtagctgggactacaggtgcccgccaccgcacccagctaatttttttgtatttttagtagagatggggtttcaccgtgttagccaggatggtctgagtctcctgacctcatgatccacccacctgggcctcccaaagtgctgggattacaggcgtgagccaccgcgcccggcttctttttcttttttctttttttctgagatggagttttgctcttgttgcccaggctggagtgcagtggtgtgatctcggctcaccgcaaccttcgcctcccaggtccaagcgattctcctgccttagcctctcaggagctgggattacaggcatgcaccaccacgcccggctaattttgtatttttagtagagaagaggtttctccatgttggtcaggctggtctcgaactcccgacctcaggtgatccacccaccttggcctcccaaattgctgggattacaggcatgagccactgcgcccggcctcattttaggaatttcatatcaggctgcagaggaggaatagggccagtatctggggtgttgggtcagtagaagatacagcctcatgatccagagacctggacaggtgacacccttacagagcctggtctctctggaaagacagcacaaagaaacaacagaaaaacattgttttaaaactttctggggccaggtgcggtggctcacacctgtaatcccagcactttgggaggccaaggtgggtggatcatttgaagttaggagttcatgaccagtttggccaacatggtgagaccctgtctctactaaaaatacaaaaagttagccaggtgtggtggcgggcacctgtaatcccagctatttgggaggctaaggcaggacaattgcttgaaccctggaggcagaagttgcagtgagccgagatcgcgccactgtactccagcctgggtggtggagagagactctgtcacaaacaaacaaaacaaacaaatgaacacacacaccctttgggaataaaggttgaaagctgttgaggtagtgacctgccatcatgcagctggtgctggtagagagttaggcagcctgcagatagctggaggctggtttgggcctggtggactacgcccaggctaggaagggctgatactggttttcaaccttgtgcctcatatcctgctccttctgtgactgacctttttctcccagctttttttcctaaacaaattctctgtgcttctctttcctcattttgactccttttctcattgcgccttggtctcttcctatcaccttcctttttgactctaccttccttctaagttatcaaaactcaatccatctccatagcaagccttatgcatattgttggggtatgtgcgcatgcgcgcgtgtgtaggtctcagggagatggtggcccctggaggaaggtggcaggccgactccacccacctgttcttcttcccctcagtgccttgctggtgctcatttcctgccccgtattgggactggaaaggagagtgtgcacacctatcagcagatggtccaggccattgatgagctggttcgaaaaaccttccaagagtggacatcaagtctggacaaggattgcattcggcggttggataccccattgctgcgaatcagccaggagaaggcgggcatgctggatgtcaactttgacaagtacaggagccacctggccccttttccctatactccccttctgcagctctcccaagaatttcactcccatcttttgactcctctcttcattattctctctctttctcatacaatatgtttgctatcgtcattttacttttttttttcttcttttatttttgtctctccccacctcccaccctgctatcaacattttaattttacaacttatcttaaaacacaacaaaacaaaacaatgatcggccaggcacggtggctcacacctgtaatcccagcactttgggaggctgaggtgggcgcatcgcttgagcccaggagtttgagaacagcctgggcaacatggcaaaacccagtctctgcaaaaaatacaaagattagctgggcgtggtggcacaagcctgtagtctcagctacttgggagggtgaggtgggaggatcgcctgagcccgggaggcagaggctgcagtgagctgagatcacaccactacactccagcctgggcgacagagtgaccctgcctcaaaaacaaaaatcaaaaaccactccgctatctgactaaaccagtgatgtcgctgttctgccactagatggccataatggctcagctaagtcacccaaaccctgtccctttcctgactgttggtggggctgtcagaccatgccttcttctacagcttcattgttatgaaactgtcatactataattatttaaaatgtaattaatcaattaactaatttattaaaaatatatagtgagcaccttccatgtgtcaggaactgaaataggaacaggcagggaatgtacacaaaggccaagtccctgccctcagggaggttaggctgctgctttctaagtcaacagctctactcttggagtggggcttcctgtccacataagatgctttgaggctgtggctactagtgttggattccactcataaaatgtccatgcttgagcctggccagcatggcgaaaccctgtctctactaaaaatacaaaaattagctgggcattgtggcaggtgcctataatcctagctacttgggaggctgaggcaggaaaatcgcttgaacccgggaggcggaggttgcagtgagccgagatcacgccattgcactccagcctgggcgacagagtgagtctccgtctcaaaaaaaaaaaaaaaaaaaaaaaaatgcttgtggggccaaatgtaggaggggctttgccagagaagtgctgtgtggagacggagtcccagggacagatgagactgtgagtgtttgtcctgggcagcaaaaggtggcccaaccaggggaagagggcacattctggctgagaaaggaagcaaaagaaccaggatggagaagcagagcggagtgtcaggtgagaggggtgaggcagaggcatcagtgaggaggacagggatgttgggagctgcagggatgaggaagccgttgaggagcagagtgtgcacatggctaggtcgagaggtttgagaaaaggcttcgagtagtgagagttgttggagattggctttgctgagcttcctggttttgtgagttatggccaagcacagccacgtaaacattgcctcataaatcaacgataagattctgaagactgagaaactaggccagagttagcctagttacgccatttgcaagcgcataatggggttgaacctgcaagacacattctcccatcgagctgggtacccccaaagttattgtgtcaggggagccgcacagatgcccttggtgtttatggatatgagggcacacagttcaccagctgtcctttttctgtgaaataagggattgtattcaaataacaggatttccttaaacactaatgatcaatctttacatttctttttttttttttcttgagacagagtctcactctgttgcccaggttggagtgcagtggcgcaatcttggctcactgcaacctccgcctcctgagttcaagcaattctcctgcctcagcctcccgagtatctgggattacaggcgcccgccaccacgcccggctaatttttgtgtttttattagagatggtgttttgccatgttggccaagctggtcttaaaatcctgacctcaggtgatctggccacctcggcctcccaaagtgctgggattacaggcatgagccactgtgtctggccaagtatttacatttcaaatatgagagaaaacaaaagttgagacaagaggtaaagaaatgctgtgtgtgtgtaggaggtaggagaggatcaggaaaactaactaataggtactaggcttaatacctgggtgacaaaatcatctgtacaacactctcatgacacaattttacctatataacaaacctgcacatgtacccctgaacttgaaataaaagttaaatttaaaaaaaatgccatatgtggctggcgcagtggctcatgcctagaatcccaacactttggaaggccaaggcgggaggatcgcttgagcccaggagtccaagatcagtgggggcataaacaaaaattagccgggcatagtggtgcatgcctgtagtcccagctactcaggaggctgaggtggaaggattgcttgagcccaggatattgaggctgcaatgagctgtgatcgtgccactgcactctagcctgggcgacaaagccagaccctgtctcaaacaaaaaaaaaaaaaaaagaaaagaaaaaagaaatgccatatgtgagcactggttggtggctacctccttctactcgccaggggtcagccagcgagagtagatacagcatcaacttcagtgctaaacagtctcaagttcaaaccctggagcattttgccacgtgacctcaggcgggccattgaatttctctgagcctgagtttcctcatctacttaaaaaaccctttcctggcattatcgggcagctgatgactcacgcaaaggtcctcacaaagaatgaacaaccaagaagcattcttgcccccttcaaaacaattgcctcataaaacttgatgaagatagtattttcaaaacaaatgtagcagagtgatgtaacagttttagtttttaaaacattttaacctttacaaagggctaatataggcatacagtgtaaaattcaaaagtcattctacaaaaggatagagaatgaaaagcctgctcctctgctgtcccctaggggacccagtttcactctgaagacagtcagtgtttcagattcttgtataatattccaggaatagacatatatgtctacttaagtatccttttttgcataaatagtagtgtactatacatattgttctatatattccaagtgctttcaaaatgattaatttttccattataaaattattgatcattttagaacatttgcaaaatgcagaaaagtagaatgaagaaaaaaatactcctaagaataaccacttttaatgatttggtatatttttatcacttcctccccaccctccatttcatttggttgttttcctttaatcttttaaatctttactgggtattttaaaatgacaaaaacactacatgctcactgttaagaaaaacaaaagattaatgcagaagtatgtaaagaaatggctggcatggtggctcatgcctgtaatcctagcactttgggaggccaaggtgggcagatcacctgaggtcaggagttcaagaccagcctggccaacatggtgaaaccccgtctctactaaaaatacaaaaattagccaggcatggtggcgtgcgcctgtaatcccagctacttgggaggctgaggcaggagaatcacttgaactcgggaggcggaggttgcagtgagccgagaatgcgccattgcactccagcctgggcaacaagagtgaaactttatctcaaaattaaaaaaaaaaaaaaaaagaagcttgtaagggaaaaagtgaaaattcagcacatatccccaatccctagaggtaaccatgattatcatgtaatcaaaaatatatcctgcatatatgaaatagaatcacatcatgaatggcatttttgcaacttgcctttttttttgaatgtggagacagggtcttgctatgttgcccagactggtctggaacttctggcctcaagtgatcctcccaccttggcctcccaaagtgctgggagccactgcaccccgtcacaccttgctttttttttaaggttaacaatctgtgtgggggatctttcattctgtatgtatagaattacttaattctttttcctggcttgcagtatgaaatcatagtatggctgtactgtaatttaatgaaccagtctactattgatggacttataaattgtacagtttctgtaaggttcttgactattccgtgctggtggatttcaactgtgattcccgcactttgttcccttccctctgcagcactgtgtttactgaaatttgaacacagtgtccctctagttaggataaaccaggagacaacttctctgtctgctattatcatctcttgtctggaataccttctgcataatcttgatagtagagcttatcaaggcaactttgggccaaatatttatggcttgggtttatctgaaatccaaataatggcgaaacacgtcttccagatagaagaggtgcctgtttctgtcctttggggattgttttccagagagatgttataggatactttacatttttgtggttttaagataaaactgcctcaatccagtaaataatggaagggaaagaacaccatcacagtgaaggattttgaaagtctgggctcatcaccagtaaagaaatccaagtcagttacagcttccaaaacttattaacacttcaaggaagtgaagataactttatcagatttgctctttgtgttcaagctccagttaagatcttgaaataagcagactgtccaaatgttctgatgttcctcggaattacctggctctcttagacctggagccttccagtccctaatagcactgatttaatcccacaaggggttttggtatcccacctatatcccaaatatttgaactctgaagtccaaattggcttttatcacgttttacggacagaacagcttcacagattgcacttaacacaaacatattccagatgtcatccacaccctggctgaaggagctgtattatcaccctgtgtggagcagagtagaatttcctgagaggaggagacgagatactgaggtctgttttttgttcccagagcttctctctcttttttccccggtcacagagtgccttttccccccgggtcagcccgctctgggctctaaccactcaattcctctggctttcctttctacctctactgcctgaccacttgtttggagataaattatgaagtattttaaaaaagtcatcccccagacagatttttatttatttatttttttgagacaaggtctcactgtgttacccaggctggagtgcactggtgcaatcttggctcactgtagcctccgcctcccgggctcaagcaaccctcccacctcagcttcctgagtactgggaacacaggtgcctgccaccatgcccagctaattttttctatttttggtagagatgggttttcaccatgttgcccaggctggtctcgaactcctgagttcaagccatccacccacctcagcctcccaaagcgttgggattacaggcctaagctaccttgcccagcctcgccacacagatttttttttttttttaaagaaaaactgatatttgtcaatgaaataaaatttgcattctggaaatttcttgacaaacttcagttaaagactgaacatcattcaaagtttctcccaggattttcagctcagcatcaggaaggtattgtctgaattcatcctgttgactgacatattaaacttggataatttgccttaaagttatcttgaaaatcttgccttggccggatgcggtggctcgcatctgtaatcccagcactttgggaggccgaggtgggtggatcacctgaggtcaggagttcgagaccagcctgaccaacatggagataccctgtctctactaaaaatacaaaattagccgggcatggtggcaagcgtctgtaatcccagctactcaggaggccgaggcaagagaattgcttgaacctgggaggcagaggttgtggtgagccgagattgcgccattgcactccagcctgggcaacaagagctaaactccatcacaaaaaaaaaaaaaaaaaaaaaaaaaaaaaaaaaaaaaaaagaaagaaaaaagaaaatcttgccaagatgagagaatgaagaatttgttttggtgcaatgttggccagcatacatgcccaagtaggcttgctcagatgtttatcaacagtgacaaatccaagacatccagtttgaaggacatgataatacgtttatgctactagaaatgtttctgtatctattcacacacttccaatctccccatatcattataacacaactttttgttacattgatgtttagggcttatcttattatgactctattaggattgttcactgctgagttgagtaattttacattgttatagttcttttgcttgtacaatgttttgctcaatttggaatttaaaattgcctcattattaggccaggtgtggtggctcatgcctctaatcccagcacttcaggaggctgaggtgggtggatcacgaggtcaggagttcgagaccagcctggccaacatggtgaaaccccgtctatactaaaaatacaaaaaatagctgggcatggtggcgggtggctgtaatcctagctactcaggaggctgaggcaggagaatctcgcttgaacccgggaggcagaggttgcagtgagctgagatcacgccattgcactgcagcctgggcgacagagcgagactctgtctcaaaaaaagaaaaattacctcattattatcgttattactattattattatttgagatggaatttcgctctgttgcccaggatctctgctctgcttcccaggttcaagcgattctcctacctcaggtgatccacacacctcagcctcccaaagtgctgggattacaggtgtgagccattgtgcctggccacctcattatttttgctagcgcagcattcactatcactaagtcctccaaaccaaccaataaaatccctttgagtagtatttttcctcacaatctgacatgctgggtattggtttcaatgtttttcttagatctgtttttttcctgtcctcctgcttctgtccaactggtgttgttttcaaggcctgttacaaagcagttaccccgggacttccctcagcctctttccttgtttgatttcatgtttcctttgtcttcctcttttttggtttacgcctttgttttgttggtgtgtatccattagtagcttcctaagaaatggtgcaggggaggtaaatcttttgagtttttgcatgattgacaactgttttcctgccctctgcttgttgtacatttggctgggtttggaattctagccgatttatagtaattgtctttggctttggcctctctcttttactttggaggctttccttaaatgcctggtgattcattgctcatttatactttcaagaggcttactcactttgaagatattttagcagttttaaaaataccacatacgttagtggagatcttcagggtttgaaaaaacagcatttcttcttccacaatctcttaaagcctgtatcacaaataagtgagcacttgaaaatcatttcattcttggaggattcttctccaataaagacggtaaaaacacaatcctttgcaaagtttgaaatgtgttattatctccaatattgttaattcagtgtagaaaagactaaaaaaattctagaattttcacctcaatattctttccaaataacatttcagcagtatttagaatgcaaagtttcttgagcatatcttcaggtcgtgggaatgtttatcctttgtgattaaaaagtgcaattttattttaaaagccctgcagattaaaaaaaatcaagttatttatttatttatttattcattttttttttgaggtggagtcttgccctgttgtccagtctggagtacagtggcaccatcttggctgactgcaacctctgcgtcctgggttcaagcgatttctggctaatttttggatttttagtagggatggggtttcaccatgttggccaggctggtctcaaactcctgacctgaaatgatccacccaccttggccttctaaaatgctgaacttacaggcatgagccaccacaccaggccaagatttttttttaattttattttaaaaaatattccatattttcttctggtattttatgattttattctctacatttagatgtttgatccatttgaaatttattttggtgtagagaaagaggtgcagattcaaattgagttttgtatttcattgtttgtttgttttttcctgatggctagagccatctcatttagagttgacccaatctcatttagtgaactactatctttatagtaacacattcccgagtatattcgtgtctattttgggattctctattctggtatctgtctattcatgtgcaggaaccaaactgttttaattattgtcctcattactcttctttcttcagagttttccaggctatatttaatatttatttcccataagaattttagaatcaatttgtttagttccaaaaatagtctcattcctatttttataggaatagagatttggttaaatttataggttaactttagaagaatatctttatgattttgagtctttccaagaatagttgtggggtgtgtgtgtgtgtgtgtgtgtgtgtgcgtgttttgagactgagtcttgttctgtcatgcaggctggagtgcagtgacacgatctcagctcactgcagctaggacctcccaggcttattgatcctcttccgcctcagccccccaagtagctgaaactacaggtgtgaaccaccgggcctggccaacagtgttttttctttcaatttatttaagtcctgccttttccccttaagtcattttacacacacacacacacacacacacacacacacacacacacacacacaatttctgattaatttttggtattttatttttgttgttttaattgttattgtctctttttcttgatgataatatctacctagtcacaatttttgtattgagaactttgatttttataaattaattttgtacctagcaacttttacaaatatgtttaaaatcattttttcctttaaaaacatttttattatgaaacttgtcatagacagagatatacgtaaaacttgtatgttcaggccgcgcgcggtggctcacgcctgtaatcccagcactttgggaggccgaggcgggcggatcacgaggtcaggagatcgagaccatcctggctaacatggtgaaaccctgtctctactaaaaatacaaaaaattagcggggcgtggtggcgggcgcctgtagtcccagctactcaggaggctgaggcaggagaatggcgtgaacctgggaggcagagcttgcagtgagctgagattgcgccactgcactccagcctgggtgacagagcaagactccgtctcaaaaaagaaaaaaaattgtatgttcagtttaactaacaaatcattataaaataacaaaataaaacacccttgcaaactactgcccaagtcaaggattgccaggagtcctagagcctctcccacatgcccactgaataattatttttcaggtgaattgttgttagcacttaaaattcaggagattttacatgaaaaaccaatttctggcctctcttgaaaaatcagaaaatgcatccacactgggcccacatttccagatggcaacaattgcctggagcgtggagcatggctttcttcacgggagcatgtcctcttcagctcaactttaaggccaagcgtcagttgccatttatcatcacacttgagccacacttgccttggaggtaggtgtctgaatttctgaactttgctttagcatattaaaaacagaaggaggttggatgtcggaaagtaaggccgaggaaggatgcatggttctggtgtaggcggtgggatagtacccttccctgaggcaggagcgccaagtttgcagagaagatgatgtgcttgtttctagacacattgagtttgaggtgcttgtgcacgagcaagcagggcagagctatctagtagacagttgcacaacgaagcccagagctcaggttagctgtgcaggtttggggatcatcagctttcggaaggcagccgaagccatgggagtggaagagatgaccaagggggagtgggctggatgtgaagaacctcggggagtccgcattgaagggagctgcaaggaaagcagattctttactgtatccccagcgcctagctgaatgatatttacatgggacactggagagaggaggatactcctactgaaaggaagggcagaaaagaggaccgtggtccagaagctaggga

SEQ ID NO: 541 - DNA, 2574 bp, Homo sapiens
cccgagagggctgcgaggggcaacttcttagagtggcccatcggtcggtctagggaggggagggtcagcgtggcaagccattagcacagagttcctcagccaactctgctaagagacctcagtacacacaaaacagtgttcctgcccctcaggacttcaaagcgatagacccaggttttgcctgcacgatgtccagcaaagctgagaagaagcagcgattgagtggccgaggaagctcccaggcaagctggtcagggcgggccactcgggctgctgtggccacacaggagcaggggaatgccccggctgtcagtgagccagagctgcaggctgagctccccaaggaggagcctggagccacggttggagggacctcaagcacagagtgaagaatcagtggagcccgaggcagatgtggtaggcttgggtcttaagcccctcttcctttcccgagctgcgctgacaggactggcggatgcagtgtggacacaggagcatgatgccattctggaacactttgcccaggaccctacagaatccatcctcaccatcttcattgacccttgttttgggctgaagctagagctgggcatgcctgtacagacccagaaccagcttgtctacttcattcgccaagcaccagttcccatcacctgggagaacttcgaggcaactgtgcagtttgggacggtgcggggcccctatatcccggccctgcttcggctgctcggtggagtctttgcccctcagatctttgcaaacacaggctggcctgagagcattagaaatcattttgcttctcatctgcacaagttcttggcctgcctgacagacactcggtacaaactggaggggcacacggtcctctacatccctgcagaggccatgaacatgaagcctgagatggtgataaaggacaaagagctggtgcaacggctagagacctccatgatccactggacccggcagataaaggagatgctcagtgcccaggagactgtggagacaggagaaaatttaggtcctctggaggagattgagttctggcgcaaccgatgcatggacctgtctggcatcagtaagcagctggtgaagaagggagtgaagcacgttgaatccatcctgcaccttgccaagtcgtcctacttggcgccctttatgaaactggcacagcagatccaggatggctctcgtcaagcacagtcaaacctgacctttttgtcaatcctgaaggaaccttaccaggagttggctttcatgaagcccaaggacatctctagcaagctccctaagctgatcagtctcatccgcatcatctgggtcaactctccccactacaacactcgggagagactgacctcgctcttccgaaaggtatgtgactgtcagtatcacttcgcccgctgggaagatggcaagcagggtccccttccttgcttctttggtgcccaggggccacagataacacggaacttgctggagattgaggacatctttcataaaaatctgcacacgctgcgagccgttcgcgggggtatcctggatgtcaagaacacctgttggcatgaagactacaataagttccgtgccggaatcaaggacctggaggtgatgacccagaacctgatcacctcagccttcgagttggtgcgggacgtgccgcacggcgtgcttctgctggacaccttccacaggcttgcctcccgcgaggctatcaagcggacttatgacaagaaggcggtggatctctacatgctgttcaatagcgagctggccctggtgaaccgtgaacggaacaagaaatggccagacctggagccctacgtggcccagtattccggaaaggcgcgctgggtgcacatcctccggcgtcgcatcgacagagtcatgacctgccttgctggtgctcatttcctgccccgtattgggactggaaaggagagtgtgcacacctatcagcagatggtccaggccattgatgagctggttcgaaaaaccttccaagagtggacatcaagtctggacaaggattgcattcggcggttggataccccattgctgcgaatcagccaggagaaggcgggcatgctggatgtcaactttgacaagtacaggagccacctggccccttttccctatactccccttctgcagctctcccaagaatttcactcccatcttttgactcctctcttcattattctctctctttctcatacaatatgtttgctatcgtcattttacttttttttttcttcttttatttttgtctctccccacctcccaccctgctatcaacattttaattttacaacttatcttaaaacacaacaaaacaaaacaatgatcggccaggcacggtggctcacacctgtaatcccagcactttgggaggctgaggtgggcgcatcgcttgagcccaggagtttgagaacagcctgggcaacatggcaaaacccagtctctgcaaaaaatacaaagattagctgggcgtggtggcacaagcctgtagtctcagctacttgggagggtgaggtgggaggatcgcctgagcccgggaggcagaggctgcag

SEQ ID NO: 542 - protein, 757 aa, Homo sapiens
MPRLSVSQSCRLSSPRRSLEPRLEGPQAQSEESVEPEADVVGLGLKPLFLSRAALTGLADAVWTQEHDAIHFAQDPTESILTIFIDPCFGLKLELGMPVQTQNQLVYFIRQAPVPITWENFEATVQFGTVRGPYIPALLRLLGGVFAPQIFANTGWPESIRNHFASHLHKFLACLTDTRYKLEGHTVLYIPAEAMNMKPEMVIKDKELVQRLETSMIHWTRQIKEMLSAQETVETGENLGPLEEIEFWRNRCMDLSGISKQLVKKGVKHVESILHLAKSSYLAPFMKLAQQIQDGSRQAQSNLTFLSILKEPYQELAFMKPKDISSKLPKLISLIRIIWVNSPHYNTRERLTSLFRKVCDCQYHFARWEDGKQGPLPCFFGAQGPQITRNLLEIEDIFHKNLHTLRAVRGGILDVKNTCWHEDYNKFRAGIKDLEVMTQNLITSAFELVRDVPHGVLLLDTFHRLASREAIKRTYDKKAVDLYMLFNSELALVNRERNKKWPDLEPYVAQYSGKARWVHILRRRIDRVMTCLAGAHFLPRIGTGKESVHTYQQMVQAIDELVRKTFQEWTSSLDKDCIRRLDTPLLRISQEKAGMLDVNFDKYRSHLAPFPYTPLLQLSQEFHSHLLTPLFIILSLSHTICLLSSFYFFFSSFIFVSPHLPPCYQHFNFTTYLKTQQNKTMIGQARWLTPVIPALWEAEVGASLEPRSLRTAWATWQNPVSAKNTKISWAWWHKPVVSATWEGEVGGSPEPGRQRLQ

SEQ ID NO: 543 - DNA, 2558 bp, Homo sapiens
cccgagagggctgcgaggggcaacttcttagagtggcccatcggtcggtctagggaggggagggtcagcgtggcaagccattagcacagagttcctcagccaactctgctaagagacctcagtacacacaaaacagtgttcctgcccctcaggacttcaaagcgatagacccaggttttgcctgcacgatgtccagcaaagctgagaagaagcagcgattgagtggccgaggaagctcccaggcaagctggtcagggcgggccactcgggctgctgtggccacacaggagcaggggaatgccccggctgtcagtgagccagagctgcaggctgagctccccaaggaggagcctgagccacggttggagggacctcaagcacagagtgaagaatcagtggagcccgaggcagatgtgaagcccctcttcctttcccgagctgcgctgacaggactggcggatgcagtgtggacacaggagcatgatgccattctggaacactttgcccaggaccctacagaatccatcctcaccatcttcattgacccttgttttgggctgaagctagagctgggcatgcctgtacagacccagaaccagcttgtctacttcattcgccaagcaccagttcccatcacctgggagaacttcgaggcaactgtgcagtttgggacggtgcggggcccctatatcccggccctgcttcggctgctcggtggagtctttgcccctcagatctttgcaaacacaggctggcctgagagcattagaaatcattttgcttctcatctgcacaagttcttggcctgcctgacagacactcggtacaaactggaggggcacacggtcctctacatccctgcagaggccatgaacatgaagcctgagatggtgataaaggacaaagagctggtgcaacggctagagacctccatgatccactggacccggcagataaaggagatgctcagtgcccaggagactgtggagacaggagaaaatttaggtcctctggaggagattgagttctggcgcaaccgatgcatggacctgtctggcatcagtaagcagctggtgaagaagggagtgaagcacgttgaatccatcctgcaccttgccaagtcgtcctacttggcgccctttatgaaactggcacagcagatccaggatggctctcgtcaagcacagtcaaacctgacctttttgtcaatcctgaaggaaccttaccaggagttggctttcatgaagcccaaggacatctctagcaagctccctaagctgatcagtctcatccgcatcatctgggtcaactctccccactacaacactcgggagagactgacctcgctcttccgaaaggtatgtgactgtcagtatcacttcgcccgctgggaagatggcaagcagggtccccttccttgcttctttggtgcccaggggccacagataacacggaacttgctggagattgaggacatctttcataaaaatctgcacacgctgcgagccgttcgcgggggtatcctggatgtcaagaacacctgttggcatgaagactacaataagttccgtgccggaatcaaggacctggaggtgatgacccagaacctgatcacctcagccttcgagttggtgcgggacgtgccgcacggcgtgcttctgctggacaccttccacaggcttgcctcccgcgaggctatcaagcggacttatgacaagaaggcggtggatctctacatgctgttcaatagcgagctggccctggtgaaccgtgaacggaacaagaaatggccagacctggagccctacgtggcccagtattccggaaaggcgcgctgggtgcacatcctccggcgtcgcatcgacagagtcatgacctgccttgctggtgctcatttcctgccccgtattgggactggaaaggagagtgtgcacacctatcagcagatggtccaggccattgatgagctggttcgaaaaaccttccaagagtggacatcaagtctggacaaggattgcattcggcggttggataccccattgctgcgaatcagccaggagaaggcgggcatgctggatgtcaactttgacaagtacaggagccacctggccccttttccctatactccccttctgcagctctcccaagaatttcactcccatcttttgactcctctcttcattattctctctctttctcatacaatatgtttgctatcgtcattttacttttttttttcttcttttatttttgtctctccccacctcccaccctgctatcaacattttaattttacaacttatcttaaaacacaacaaaacaaaacaatgatcggccaggcacggtggctcacacctgtaatcccagcactttgggaggctgaggtgggcgcatcgcttgagcccaggagtttgagaacagcctgggcaacatggcaaaacccagtctctgcaaaaaatacaaagattagctgggcgtggtggcacaagcctgtagtctcagctacttgggagggtgaggtgggaggatcgcctgagcccgggaggcagaggctgcag

SEQ ID NO: 544 - protein, 788 aa, Homo sapiens
MSSKAEKKQRLSGRGSSQASWSGRATRAAVATQEQGNAPAVSEPELQAELPKEEPEPRLEGPQAQSEESVEPEADVKPLFLSRAALTGLADAVWTQEHDAIHFAQDPTESILTIFIDPCFGLKLELGMPVQTQNQLVYFIRQAPVPITWENFEATVQFGTVRGPYIPALLRLLGGVFAPQIFANTGWPESIRNHFASHLHKFLACLTDTRYKLEGHTVLYIPAEAMNMKPEMVIKDKELVQRLETSMIHWTRQIKEMLSAQETVETGENLGPLEEIEFWRNRCMDLSGISKQLVKKGVKHVESILHLAKSSYLAPFMKLAQQIQDGSRQAQSNLTFLSILKEPYQELAFMKPKDISSKLPKLISLIRIIWVNSPHYNTRERLTSLFRKVCDCQYHFARWEDGKQGPLPCFFGAQGPQITRNLLEIEDIFHKNLHTLRAVRGGILDVKNTCWHEDYNKFRAGIKDLEVMTQNLITSAFELVRDVPHGVLLLDTFHRLASREAIKRTYDKKAVDLYMLFNSELALVNRERNKKWPDLEPYVAQYSGKARWVHILRRRIDRVMTCLAGAHFLPRIGTGKESVHTYQQMVQAIDELVRKTFQEWTSSLDKDCIRRLDTPLLRISQEKAGMLDVNFDKYRSHLAPFPYTPLLQLSQEFHSHLLTPLFIILSLSHTICLLSSFYFFFSSFIFVSPHLPPCYQHFNFTTYLKTQQNKTMIGQARWLTPVIPALWEAEVGASLEPRSLRTAWATWQNPVSAKNTKISWAWWHKPVVSATWEGEVGGSPEPGRQRLQ

SEQ ID NO: 545 - DNA, 29094 bp, Mus musculus
acagaagtctgtgcatagaggccagaggtcaacttttggaaaccactctgggtcctgggggttgaactcaggtcactgggcttgcctggcaagtggtttaacctatggcaccatcttgttgcccttgccctgcttctcctgtttgtgattgaacctgtattttaagttgaaagctgtcattgcatttggtggagaaggggggccttatggcacatacctttaatcccagcatccaggaggcagaggaaggcatctctctaagtttgaggccagtctgctctatttactgagttccagaccagccaaggctacatggcctcaaaaataaaataatgctaaattgaaaattttaaagttgtttttatatttggtgatctcttccctatttagtctttaattattttcatctacatttttttctacaaatcttttttttcctttccttttttttgggtgggggcctatttttggagacaagatctcatgaatcacaggctggtctcaaactcggtatatagatgaggaggatggcctcaaaaacttaacttcctgctctgcctcccaggtgctggtatcaccgtcctgtgcttctatgcctgtctctataaatgtgtaaaaacttaacaggagtttttagaacactgcagcagtttgattgtttggcaacaagcagaagaaaccgaagtgacagttgaaaggtttgtgtttttttcatctaagaagctgcagtagacagttcaggttcctaggaagcccatacatgccgctagcttgctactctgacacacttagagttctagccttgtctttggatccagtgtggagcctctgtttcacaaccaccttctggcaggaagtaaaggaaggtctttgtcccttggctctccaggaaatcccctgaagggttgtcttattcaggatccaaaaatcacacggcccacaaaagcctggggattgtgctaaattcaaaagcactttcccctcctttacgaatacaaaaagcaatccttaaaaatcagaataagtaacaggagaagcacagcgacttaagaattaaacatctgtatgaaaaacttgcaaagtgtgggaaacacgcccacagaacatttggttacttacaacaaaaccaggggagcagtccaaaactcctcacatgattctgtagactcaacgttatgtccccaccaggagcacggagccaggtgccatcggaaggcatctctatacacaaagcaaacgccaatctgctggggaaattggtgacttttgtagaaattccgtgaaggtgacaagctccgccatgtggttcagtttgttacctctgctccatctccagtgcaagcccagcaggtggcagaacctgcaacctgccaccttcccagtctcataacttctctgtccattgtgtcattttaattgatgcaaatacccgccacattctgagctctaacaatgggcagcagctatgatgaagctaccatctatccacagggagagtcttcttaagacaacttttaactccattaatgccagcttgcaaattactacttttccagttaatggaggagggttcaactctgttgctcagttcaaattcatattcagggggcagctatgtgtcctccctggctccccctggccaggttgggagtggaggtgaattccaacagagttgggaccagcaaggctggtctcatgctctgtcctttttggtctggggtcacgactgttggaagatgtatgtgacaccatcacttgaagtgtggtaccactgtctcattgtggatactatgagaatcatactctaaaaatatctatgtgcccggcttatacactggattttatacacaattgatatgttaaacccttgactggaaacatttcatctgtacaaaacagcagctgcatcagattgacaaatgccctaagactgttcctttttaatccacttctccagccacacagagtgacttttgttcacagtctcttggtgcccccttgcgcccagccagggaactgtctcattgttgaagcacaggagaaaacacctcaatgtgtgccggtgtctttctctttcaggcatgtttcctgaattccataccggatcgtcttttccacacaacatccttatcgccgctacacatttcttcaaacccttgccctccacctccaggagatctgtctccttctggcaaacctcagtggtaactgctaggatacacagcctagcttggcaggtgctgtctgacatgtagcattctattctctctcattcttattacttttcaggagaaaaaaccgtaactctctccctcctcccctagacacccccccaccaccaccacgtctttccaagacaagatcatttctctgaatccacaaggtagctcaaaactgtaacttcagctcgaggggatccgatatctgcttctggactctgggcactgcacacacatgatgcacatacaaacatacacgcaggcaaaactctcatacatataagataaaaataaaaatttaaaaataagtactagtggaaaaaagtactcccactatctgctcctgtctcgattaaattaaattagaattttattgagttagatgaggcatggtgttgtgaactgaactggtcacccctctgtcaggtctgtatgatgaaggcctagttcccaatatgactgtgtttggaataaagaagaaccacttcctaggtggacccaactccctgcagttggagtgatcctggccctacctgtaagccacaagcacagtgcacctggatgacaaggaacatttcttcaaaccacctcccaagccggacagcctggttatcaaagctcaggaaagacatgagttttctgggtgtggctcagaactggtccctctggtctccctggtgtgacagttaaccctggagaaggaattgccctttgggtgctttttttttttttttttttggtttttggatacagggtttctctgtgtagcctggctgtcctggaactcactttgtagaccaggctggcctcgaactcagaaatccgcctgcctctgcctccggagtgctggaattaaaggcgtgcgccaccacattctttgcatcttcacagctggaggtgggggttgagtaccaaagattcacctgctgagtgctgccttagtgtgcaagagtcagacaggagtgctacatccaacacattaagatccgaccctgccaatgacccaggagggatctgggtgacaagttacacagagggtgctcaaggaaagctgcctgttctcttggtgctatctgtccttaggagatggtcacgtcagttaaagcaagatgcattttgtgtcagcatcatgtaacgttgggagtggaagctattctgaggtcagcctagctgacaggggagactcaagagtatggagacatcggatggacaggggcaagaagtgtgtacaggtgataagagcatgagagcagctaacagggaaagctgtctgagccagggcccttctgttagatagagcatcccctatctgtggctatgtacctgtgggagaagtgacaaacaaccagagagtcacaaggtcactcaaaccttaagatcattccttttagcatcccaacacaatgccatttaagctcaagaggccaccgaatcgaactaagacaggtgatgtggcccatatgtaattgaaactgcaatagcactaaatctgaaacatctgtcaactaatttgagaaatgtgattttaaaacatgaggagccaggtgtggtggcccatagctgtaatccctgccctgtcagctgccgcagcaggaccaggagctctaggccggcccaggctgcatagatctaatctcaaaaacccaaggtaggcagcctgggcttgaagctctctgttccagatgtttcacaggtgagaggggaaacagggagcaaagcagctgatattttattttattttatacctgtccctttgagaatctagacgtatgctagtcttagtcagggtttctattcctgcacaaacatcatgaccaaaaagcaaactggggaggaaagggtctattcagcttacattttccacattgtggctcatcaccaaaggaagtcaggactggaactcaagcatgtctgggagcaggagctgatgcagaggccatggagggatgttatttattggctttcttcccctggcttgctcagcttgctttcttatagaacccaagactacaagtccagagatggcaccacccacaaggggcccttcctacttgatcactaattgagaaagtgctccacagctggatctcattgggcatttcctcacctgaagctcctttctctgtgataactccagctagtgtcaagttgacacaaaagcaaccagtccaatggtcaaggtttcagtcctacaattttttttttcaagaacccttggggctagagagatggctcagtggtttagagcactgactgcttttccaaaggtcctgagttcagttcccagcaaccacatggtgactcacaacttctgtaaagagatctgatgccctcttctggtgtgtctggaaacagctacagtgtactcatatagataaaataagtttttaaaaacaaaagaacccttacctataaactcaatgctgtgaggatcctgagtctgctagtgtcagcagctgcggggagatgacagcctggtacggccagcagcagactgctctgtccctttcctccttagggacccctactcaggtgaagcccgaaccgtgacttcagcacagaaaagaatttcaggatgatccaatgaaaaaccaagggaggagcgtcactgttcagatactgccctggctagtttttatgtcagcttggcacaggccagggtcagcagagaagaggaaacttcagtggagagaaggcttccattggattggcctgtaggccagtctgtgggacattttcctgagaagtggttgatgtggggggacccagctcactgtgggtggtgccaccccaggctggtagtcctgggttgtataggtgacttagctgaatacaagtctaaaaaggcagtgagcagcgttcctccctggcctctgctgcagttcctgcctccaggttcctgccttgagctcctgccctggcctccttctctgtgacctgtgatggagatgagtaagccaaagaaactctgccctccccatattacttttggtcatgctgtttcatcacagcaatagaaagcaaactaacacaggaatagatatcaggagaaaggacagcgtgcaaccccaaggcttctcaagagagagctatacttaggtgccattgggggtacattatggtccagttgcttcctgagttaccatcttgaaaggacgtaacttgcaataaggtggatttttttttttttttttgagatagggtctcactgtgtagtcctcttctggaactccctatgtagaccaggctagcctcaaactcaagacatccttcttcctctatctcctgagtttggggattaaaggaatgtaccaccacttctgggaaataaggtttaaagattcagcaaagcttaagatttaagtaaagtttaaaaactaaatgctgtacctctagcttcagaaggatccaacggatctggcctgctctggcgcctgtcctcatatgcagatgcatccacagacccagtggacacacacgataataaaaataaatatttttaaaagttaaataaaatctatgctctggttcatttgtttttcttcttcttttctttttttatttatgtatatgttttatttatttgtttgtttgtttattcaatgtatatgagtacactgtagctgtcttcagacacaccagaagaggacatcagatcccattacagatggctgtgagccaccatgtggttgctgggaattgaactcaggacccttggaagagcagtcattgctcttaaccgctgagccatctctccagctcctcatttgtttttcttatcttaaataatttccttttgtaagtgaagatggttttttgtttgtttgtttgtttgtttttgtttatttttgttttgttctgtttttcgagacagggtttccctgtgtagctctggctgtcctggaactcactttgtagaccagactggcctcgaactcagaactctgcctgcagtttgtgctcatttagtaatttcaagactaaaaggtccaaaaaaaaaaaaaatagaaaaagaaaaaagaaagaaagacatacttatgtttggccaggcagtggtggcacacgcctttaatcccagcacttgggaggcagaggcaggcagatctctgagtttgaggccagcttggtctacaaagttccaggatagtcaagactacacagagaaaccttgtcttgaagaaaaacaaaaatattggaaataagatggccacccagggaacgaaaatccatgtgcctggaaacagattttagaggcagtttctcttcacagtatcttttttcaaatcacttagtaaggatcagggcagctgcagtacagtgggcaaatgacaaccccaaataggacaggaagcatttctttccaatccaaaatggaggtctatctaatgtttttcataaatctatgtattcttctccttcagatgactacagttgaaaggcagagctcccttcaacttctgacagtgggacaatagtgtgctgtcaccctactgtggacatcctgtatgaacacaccaaacctatccctcaaccagatcgtttgcataagaatgaagaaacacacaggaacaagtgctgaaaaccaaattagaagaacagcttaagcaagggcccgtgatagaatgactcagcaaggtgctcttcactataaagcatcaccggtacccacatggccagtaccaccaacatcctaagaacctgaatcctcccaaagacaggtgagcactcatgattctctgagcagcaagggaattttgttttgggtcttatttgccagctgagaaaatgcaaatggtatattcattaagatgttatgcggggagaaaaataaaaataccctttcatagaaaaaaccctcaaatattaaacataaaataaaacaaagcattcagtcaataataggcaaataaaatgagcatgcagttctccaaagaagaaatacaaatagtcaacaaatatttagcacccttatccttcaggtaaatgcaaattaaaacctcgttgaggaactaaagaactagccactgaaaagctgctcttgcatagtgaggatgtgagttcaatacccgcataaaagctagggaccgtggcaggtgcttgaaagccttagaaggcagagatgatggatccccgaggctggctgaccagcacctgagaccaatcaggtagccccaagttttagttagagaccctacctcaaaaaacaagacttctagggaatgagatctgaggttgacctctggcttacacacacacacacacacacacacacacacacacacacacacacacagagagcattgtgtgttggagtattgagattccatcttacctttctcaaaagggctgtcatcaagaaaggacatggcagcaaactggtaggctgcagaagaaacgagacatttgcatggtggtggtggtggtgtataaattgtgtagcccctgaagaaatccacatggagatttctcaaaaaaactaaaactacaactcttgtatctgttgtatgatccaaacataccacttctgggctaaggtcacatccaatagagatactggcacatccacatttattgtagcagtattcacagtggatattcacagtagccaacatgtggaaccaacctattgtggtttatgcagctgtaaagaacaatggaattatgtaatttgtagggaactatatcaaactggatatgaacatattgagcaggggttctcaatcttcctaatgcttcagcaaatacagaagtgcattgcctcgtgttgaggcgaccccaaccacaaaattctttccttccttccttccttccttccttccttccttccttccttccttccttccttccttcctcctttccttcctttcttcctccccccctctctttctatgtatatgagtgctctggttttcatgcacaccagatcaaatggctagagactgttatagtcgtgtgtgtgtgtgtgtgtgtgtgtgtgtgtgtgtgtgtgtgtgtgtatgacataaataacccgtttattgcaggctaggcaagtctcaggtggtagggcttctactggtctttcagttccttcagtcttctgatggccgacctcactgtgactgcagaggtggtgttgtaggtccaggccccaatggccactgttttcatgcaggaacccagtgccagatgccatggtttgtctcatcttggtcttgccgcagaaggagcaagtgtacttggtgtgttggttgatttcaattttctttaccattttctggagggaggcaccatagcaggtcccgtatttcccaacgatcccgaccttttggtgcttttagccatgtcgctggacctgaagcccaagcttgaagagctataatattttcaataaaaaaataatgttgctgctttctgcccatggcagaggaagtttcaaagcaacctaatactggctctgtcctgtggttagaaataactcttttatgtggctcaccaatgaaaaacagcaaatgggggcagacatttttaaaaagtacattttgaagaggaaaaacaagagtaccaggattgtgccgagagagataaggagactaaggagaggcttcaggcactgggcaaggcccttccagtgagacttccgacttgggagtggaaaagatctaagggtttctttctgtccctataaagaaacagcaaacgtgaaattctgctgcagatgtgacttaagcgggccacagtccagcccaagctgccagctgacgttggcagtgccatccgagtgtcgctaactttaaagtcatgaagaagacacgagtgaagctgtcatgggatcttcctctgtggtttcagagagctgctgaggctgctgtaaggtagaatagtcctgtgtgtaagccctgaaacccattgtgtgaagcccggactgtgtaggaaccccatgttgttagggagtggggtgggggtgggaggatagagaagagaacgaggtacagagagctgcatcttgtagaagctggaggggcagaacagtccacgtctttctttataccagaaacagaactagagaagttggtgttttcttgctcaggtttagttattccctccctgtgcccccatctctccctttgggaatagtcatgtgtattctgcactgttatattttggagcatcgggattacagttgctcatgggctctggggattcgaactcaggtccttccactgcatggcaagtgctttaactccatgagtcatctccccagcccttacctcagaactagttactcaaaactagttaccccccctgccttttcttcaaatgtcttgtttttatttcatttatttattttgtttaacagtactaggggttgaatttagggcctacctagcacattccaggcaagtgctcgacctctaagccacacccccagcctcctttgccttttctcggttcagatctccttgtttaggtctattacaaagaccatggcttcagaaaagacctgattccttacaaatgttgcttcaaactgcaccaccttcccagatagcaactggaaggaaggactgttcagtcttatttgtatctaatgttcacctctggaccagtcagaaggaaggggataatgtgattagtcaagccagggccaccactgagcataattaattcaaggccagtcctaactgcctcaacctctccctcccccacacagagatctacttcactgggcttggttgctcacttcagcagttggaaggctgaggcaggaggatcaccacattcatagtcacatacgtgctgtgctaaaagaccaaatttattcaagaagagagaaaggccagcaaatagtgcagttcccattgcctgcggaaaacggaaatcacactcaaccttgagttttttgtcaaagcatcactccctgaagccttcctgacctcaaagcaggcctcccctcccccctcgctcctagaagatgacaggcgcaccctaaatctaggaaccggagttgacagactcttggaaagcgggaggtgaggcacaaacgcggctgctcgacacgtccccgcgggaagcgtggcggagtttcgagttttccagcccacggaaacgtcaggggcgcgcagagcggctgctgcggggcggaagtgcatccccggggcccgtctaggaaaccgggaggaccctgcgcgtcagtggtcaagggacacagtgggtttcgcgaggtgcatgggacattccagctagccgaccggccctgtccgaccgggcgaagatggggtgaatgtgggcgagaacggcagacgggaaagctgagacgggcatgggggcgtgggctcgctggccacctgttcctcccgcgagtgcggctcgcgcggattggccgcagtgcgcccggtaccggaagtggccggcgtgggtcgcccgtgacaccagacaacagctgcggttctgtgcgcgccgcggtgcagcgcctcgggcccggcggagggagcgtgggcggcatccgccagcggtgaggcctctctggttccgtcgtgcccgggggaggagggcgcggggctcccggcctggagctggagttctgactgtaggcccgcccctgactcgggtttgctgtgtgaccttggactttatggcatcgggggctcctactcatttgcacacggagagggtggagcctgggcactgtcaggggcccgatcctaattctgcttgcaggccttgtcagccagggaaactggagaagcaggctccgacacgggcatgccaaagacctatgcctatttttcttctctctctctctctctctcatttcattctctaagtatactgctagaacgaatagcaggcaaaaattgggggccccgtggcatgttgtgacctgtgctggcaggcaggacattggcttactaaggttaaagaaagatgatagaattgggactaaagagaagacacagtagttcttgctgctcttccagaagaccctagtttggttcccagaactcaaatcaggcgcctcgtatcatctgtaactcatgtgcacacacatctataactctgtagcaacacacaactacacatagttaagaataataataataatcataaatgagactgaattgagcacagaattgacagagttcccttgatcctggataccaaaggaggaagataaatagtgtcttgggagaaagaacttttcttgttgttgccttagtttgacttttttttttttttttgagatagggtctccctacatatctctggctagtcttgaactcactaggtagatcaggttgacttaagactttcagagatccatctgcttctgtcttccatgtgctgatattaaaggtgtgggtcatcgtgctcggctaagaacttatttttataaaacgttgataccagttatctgtcagacactgctctggtctctttagggacaatggtgaatggaatcttcaattaacctttaaaacaactgcagacattcacccagatagctcagaaacctcacttaatgttttccaggtatcagaaatgtgctaagcactgaggttaacaagatgagtagaatgtcatccttggtcacattgtagaacagtggtgctcagcctgtgaggtgcaacccctctgagacttgaatatcccctttacaatatatacactaccactcgtaatggcaaaattataattatgaagacgcaatgaaaataattttatggtcggaggtcaccacaacgtgtgtactatggggttgaagtggcactaggaaggttgagaaccgctgccctagagaaaagcaaatgcataatgcggtggcatgatgtctgcatgaagaagtaacgcttgttggggcctgcagatcagaaagaggatggaggggactgtccatatcagctgcatcgcgaagatgtttgctaagtccaggaagtgagaatgatttgtttccgaaggcagagaaactttaaagaatggacagtgtttggcctgcaggacactgagcacacctgcagctgccggttgttgttgaagactgtgaggtaggatgtggggaaaggaaacggccacgattaggagagctttgtgagccgtaggaagtattcattctgaaggcctcgaaaagagcaacaaacaggaagtaacatggaaactgtagttaaggaaaggtgagaagggggcgaggggaaaactggcttcagaggaccaaggactccttcctgcagatgttagtgaggacttccggaggaggtgggccttgtgccagatgagtaatggaatttggctaatcctggctcaataatatgtagttttcattagtcactgctcgttagtaaggtgtgctcgtcagaactttctgaatgaggtttctgagacttttctcctccagtgcattgcaaaaacaagtccaggtttgtagagttaaggaccttattctaagctgtagagaccaggtggaggtctgcctgtcatcccccaacatgaaaaccaactgtgttcagcctccttcctcagatggtagtctccatctttagggatagctccttatagattaagagacgggagtcacaaagataggaaatgcttgggaatgtgcagttaggctctgggggcttttctatagaaaatgagtgttcatgtatggctttgtttctgagaacactaagtggagagtggctctgatttctatgggagaggacacctagaaataacactctcattatgttactggcagaattcaaagtaaatataataatgtggaagatgttgtgaatttgagtcccttctctttgttagctttgcttgtttgtgataagggctcattgtaacccaagctagcctcacatttgtattcgtcctgccttagcctcctgagttttaggattacagacatggggtaccacacccagctcccatatccaacttttattctgccttgttttactttgatcaagtgattttccacatcttgtacaggtgtagattttccaaatgctgacttccttaaaaacagaacaaaccctagaaggttgtgagctgggcgggacactgaaggactataatccaggtactcgggctgaagcagcagcgttgcaaggtggaggccagctttggaaacttagtgggagcctgtggcacctagaataagaaataaacagcatgtgatgacacttgcaattaatcccaatacttgggaggcagagtcaggtaggtctttatgagttctaggccagcctggcctacaaacagagctctagaccagatggaactacatactgaaaccctgtctcaaaacaaaacaaaacaaaaaaaaaaacaaaaaaaggaagggctggaagtacagcttagtggttgaatcttgggtttaatctgtagaactctgaggggaaaaatccatcaagaccaaaactatgagataagcaactatagaaggcatgaagatttgaaaaggaaggtcagacagagggaggtgggaagtacatagatgctgaaatacctgctcctgaaaactgttcttggttgggtatttgggagacatttgcttgcagaaataattcttttttatttttattttacacagcatcctgtatgcaatccagactggcttcaattcatgatccttctgcctcttaagtgctgagattaaagagactgtaaaggaatttgtgacagtgcttcccaaaggaaacgatgccatagatagagaagatagtcaccagttcggcatggtggggtgtgcctttagccccagtgctcgggaggcagaaacaggagatctctgtaaaattgaagccatcttgtgagttctaggccagccagacttacattgttccaaaaccagatagtcacaactccataatatatccttagagttacatagattttgaccaaaaaaaaaaaggagaagtctagttttggggtctttccttgctccatgggaaagcatgagaagacgctgggggcttctggcccactttgagggagataacaaagagcttcctaggcttcagggttccagtagagatcacgttctctatatagcccaggctgtcctggaactcactctgtagaccaggctggcctcaaactcagaaatccacctgcctctgcctcccaagtgctgggattaaaggcatgcgccaccaccaccccgcgtttttttttttttttttaattaaaaaaaatgttttacaactatgagtggttgcccgaatacatatatgtgtgtcgggtacctgacggtgcccaaggaaaccagaagaggacatcagacacctcggaactggagttatagatagttatagatagctgtgaagcatcctgcggtgctgggaactgagtctgggcccattgcaggaacagcagccagtgttcttaggcactgagccatctctccagtccactcgctcttctttacactttgatatcacatactaggtgttatggaattcaatcttttaaatattcctcctgtctatttcctcttcattctcactgccactgctgcctgggtctcatttcttttagcctggatgactacactagcccccccagccatcatgtctactgattgtagttcatctattaaatggccactagtatgcacctacgtgacattatgatttaaacagagactagcagggcatggtggtgcacgcctttaatcccagcacttgggaggcagaggcaggtggatttctgagttctaggccagcctggtctacaaagtgagttccaggacagtcagggctatacagagaaaccctgtctccaaaaacaaaaacaaaaacaaaaaacaaaacaaaaaaacagagactataccactcctcagcctcaaatcattccacaagtctactttttctttctttctttctttctttctttctttctttctttctttctttcttccttccttccttccttccttccttccttcctttctttcttttccttccttccttccttccttccttccttccttcctttctttttttctttcctaaagatttatttatttatcacatgtaagtacactgtagctgtcttcagacacactagaagagggcgtcagatctcgttacagatggttgtgagccaccatgtggttgctgggatttgaactctggaccttcggaagagcagtcgggtgcttttacccactgagccatctcaccagccccctttttttttttaaagacttttattaacgggggtagttagagtcatggtttctctgtgtagccctggctgtcctggaactcactctgtagatcaggttgaccttgaactcacagagatccccctgactttgcctccctcatgctgggattaaatatgtgcaccaccacccagccaaatctaaggatgaagttctttgcactgtttattctcccatgagggtcacctttggatttatttagtgattgtgtgtgtgtgtgtatgtgtgtgtgtgtgtctgatctttctttacacatctagtcatttgaccaaactttggcagatgagatagtggtaggcaaaggagtgcacatggtaccattgctttcctctgcatatctgttcctagggcatggtgtgattcttggagcaccacctttgattaggaatataccagcatactcttaagactgggagtctgagctgggaagagccagagaccttcacagttctgtcataccaactgtagaatgcctgcctctggccttcatttatgcaaggcagaaatatgttaatgccttggctaaggcgtggttcttaaaaagctcattattgccaggcatggtggcacatacctctaattccatcactcaggagacaggggctctgagttcaaaccagcctgagttccaggacagccaagactaaacagagagaagaccctgtttcaaaaaataaattgtatttgggcgtagtgtctataatcctgaggcataagtaggaaaatcctgagtgtgagcctcagttagacagagtgagactctgtttaaagaaaaaaaaagtatacatacattattacatgaagtcaagcctacttctaactaatataattgtcctgggaatcttactgtccctgtcacaggagtgagttccaatgacacaatagcaagcctggtgtttgctcagctggcaaacaatgtcgagatcatcctaaaacggctctgtagggagtcagaacctagtgcagttcagcacatttaccctcacttcacccaaaagtaaggggctaagaagttactcttgtgctgttgtatcaccctttgagtaggtaacccctgtgcactgctctttagggctattgggtaatacagataagaaagaatacatcctcttgggggctggagagatggctcagtggttaagagtactgactgctgttcttctgaaggtcctgagttcaaatcccagcaaccacatggtggctcacaaccacccataatgagatctgatgccctcttctggttcatctgaagacagctacagtgtacttacatataataataaataaatcttaaaaaaaaaaaaaaagatgcatcctcttgctcaacactgtgtggctctttcatcttacattcaaaagttgtctctgttaacttatcagtctcttctcttctcttctcttctcttctcttctcttctctctctctctctctctctctctctctctctctctctctctctctttctctctcctttgtttttttgagacagggtttctctgtgtagccctggctgtcctgaaactcactctgtagaccaggctggcctcgagctcagaaatccgcctgcctctgcctcctaagtgctgggattaaaggtgtgcgccaccactgccctgcactttggtttcttctaacccctttcatacaccctttgttaatatggccattaattccccacagtgctttctttatcactttgaattctcctgtaactgacagtgccacacagctcctgccagcatctctgcactgcacacttcctgttgctatcagatgttctgtctcttatgggtttttctcactcctttaggtcagcagcagtctgccattgcctcactggcaggactgtctttgggtcttaccaatgccatgtccaggccctgtgtccccacctgcagtgtcatttagataggacagagcagcctcacatgagtaccctctcttctttcagattgtgatatggggactgagaaaaaggagggacttcccaaggaagaaacttctgaagactccaagccacatgggcaaacagtagaaaaacttgcacaggaggtttgccatggccatgagtttggagaagcaagcgaggaagacatgtcagagggacatttgagagagtcctcgaaagagattatagaaaaaaggtatcctcaggagagacactttgcatctgggttacttatcttcaagaagtcgtcctcaggtgagaaaaccagtgagaatccgagaggctttaatcctaaccctagtgtattgtgtcatggaggtgctgagagggccagcgcatgtgctgcctctggccacaactgcctggggagtatagagcttactaaagctcaggggcctcctgtgggagagaagcctcacacgtgtaaagagtgcgggaaagcttttaatcagaactcacatctcatccagcatatgagagtccatagcggagaaaaacccttcgaatgcaaagagtgtggaaagaccttcgggactaactccagccttcgaaggcaccagagaattcacgccggagagaaaccctttgcttgcactgagtgtggcaaggccttcattcagagctcacatctgattcaccatcacagaatccatactggagaaagaccttataaatgtgaagagtgtggtaaagccttcagtcagaactcagcccttattctgcaccagagaatccacactggagagaaaccctatgagtgtaacgagtgtgggaagaccttccgggttagctcacagctcatccagcatcagagaattcacacagaggaaagataccacgagtgcagtgagtgcggcaaagccttcaagcacagctccggcctcatcagacatcagaaaatccacacgggagaaaagccctatctgtgtaatgaatgtgggaaaggctttggtcagagctcggagcttatccgccatcaaagaatccacacaggggacaagccctatgagtgcagtgaatgcgggaaaacgtttggccagaactcagaaattattagacatatcagaattcataccggggagaagccctatgtgtgcaaagagtgtgggaaggccttcaggggtaactcggagctcctgagacacgagaggattcacacaggggagaaaccctatgagtgctttgagtgtgggaaggccttcaggcggacctctcatctgattgtccaccagagaatccacactggggagaaaccccatcagtgtaatgagtgtgcaagaaccttctgggataattctgagctgttgcttcaccagaagattcatattggagagaaaccttatgagtgtagcgaatgcgagaagacgttcagccaacactcccagctcaccatccaccagagaattcacactggagaaaagccatatgagtgtcaggagtgccagaagaccttcagtcggagctcccacctcctccggcaccagagcgttcactgtagcgagtgatctgcaggccaggaaggtggtgtggggaggctggaggcagacttctccattgctctgtaccggggccctaggatcagatgaagggacagggcctgcccctgcccgtccactgagtgtgtgccagtcgtcggccgaaagtgatgaggcagttttatgaactatttattgagaagtttcagcatactaaattaaatcataaaagttatctccggctttaatcctcctctggcctttccttctgtctgtctccacagggttctgtacatgtgtctagcctaaattgttgttgttctttatgaaaagtggggacgggattcaccattcctaagaaccagagggttgactcaatgtctcctgaaatgttagaaaggtctaacctctccttccactctaacctctccttccactctaacctctccttccactctaacctctccttccactctaacctctccttccactctaacctctccttccactgcttggctttctaacctctccgtccactgcttggctttctaacctctccttccactgcttggctttggatactaacctttccttccgtttctttttttaagcctcaaaatctttcagctatagtgatcatagtgaaaaggcaggaagcttgcatcttctcacacctcctgatagattccttatttatctgaagaggtttctaggaaaaggagaaagtttacaggacaggagccaaaagcctgaaaacccagaggaagacggagaaagagtggaagtcgggctaccgggcagaagaggcttggtagccgctgcccttgctctgcgctgtgtgcagactgcccaggcaggcgcctgccgcaggcccttggtcgcagctcctgctgttgcagccatcctgttaggaagtagtaagcaggatcctgtggcctttctctgccagactgctggccatggtggggagctggatacctggctaaccaggcctggcccttccaacattgagctctcatgaccacccagctgggggctcagggtaacagatggtatgtgaagcctctttggcttgtctgatggtcgtagaatatttttccaacatctctacacgtcttctgtgtcctccaagtctgacacttccacgtttggggtaggcagtggtaacagcaatggcagtaaagaaaacccaggagcctgggctctcatctgagaactgtcccttcgggaaggcccttcagtccctgctgtccggttctctcatctgcagagcaaggggtgttgagttaaatgatctctcaagtctcaaccagcctctaaggaaatagactaatcgcttttcttttcagcactgtgtttaactagtctttttgagccaggcaagcactctaccgctaaactatggccctaaccctccttcgccacctcccgtgccagaaagaatcctgatgagctgtccaggctggtcttttactcactgtgtagcccaggcagaccttaaatttgtgatcctcctgcctcagctccctaagtagttgggatctaagtagttgtctgcctgccaggcttctgaccatcagtatttataattaactctgtgccaggcagtgtgcccgtcagcttacatttgtttctcatggtatgtgtatggtgtgggcacaccttttaaaagtagctttatttaggtacaacttacatcatagggttcgcggtgtgtgttcagttgagtgacttttagtaaattacagagttttggtattttcctcaatgaagtgttctggagtcaagttaaagatgaatgggtttggcgggacagggcgtgtgaggtgatttacctgggatagtattaggtctagagctaagactagtggccactgttgtattggcctctgtgctgtgcacaggcccatcattactgcctacttttaaaccctttgcaccccttttgtccttactagtcaccacctagactttaatacaaagaattgtaaccacatctttgcagatgtgactcagcccagccccgttgtgcagagcaggcgtgttctgtaccctgacaccagttctcaggttcacagcctgccttgagaaaaggctgatcacttgtttcctagatccacaggtcgctccccgggtcagtgtctggcaggggaggctctcgggctggcccaggctgtggcctcactctttactgattgatgttttgttcaggctcaaagggagctgtgctcacaccatctttctcacatgacaccagggcatcacccactgcttttaacttctggtttctgtgttggcatattttacttccaatttcatcccttccgtcatcatatagaaccagcaccttacaagccccatttataatgtgattgaataattacaataaaagttaaaaagccaagtgaaaaccctgtctgaaaaagacatcaacactcctcagacttcccccaaaggaagcttgcacaaagcactaaggacttcactgcgggtgagcgtgctatggagggtgaaggttcgcactgtctgtccttcctgctaggcaatctcctcagaagtcccttcatgttgaaagtagtggtgcagggtttgttttgttatgtttgagacaatctctccatgtacccctggctggcctaaagtttgctgtgtagaccaggctgatcttgaaattggagacttccttgcctctgcctccccgtggtaggattaaagacatgaaccatcatgcccggaccttttctgggctccgtcagtttgggctgttagtgttgttttggtttttggttttgataaccaaatccttccacctaagtccagcacacagttgctttctttttccttcctttcctctcttcttcttttctcctttttagacacatctcaaatagcccagaccaaccatgaactccctttgtagctgagggtgaccttgaacctccgaacctcctgcctcccagagggccgggattacagtcgtgcactgccatccccagctcagggctttgggcatgatagcaagcaccaactgggctctgttctcaactcagtttccttaaaccatcactgcttagcaaaaaggccttttaccccattcgtccacttgaacattagtgacaagtttttcttgtgccttacatgcttggaagagaatgaaggcctcatgttccaaaagaaatttatgtgcgtgttgcctgagaggaattctggttgaggaaatagtcttcatcttacgtttggcatatgcatatcctctgtcctggtctgttgatccctctacctatcacttggttgtttgagggagacttctcaatttccctcatttgccctccttactctcaactcgccctggtgtcccacgtcccactgtagctgtggctagcagtcgtaattctatgcaagcagagtcctgccaaagacaagtcacgagctaacttcagacccactctcaagaaataaagtaggcctctcaggctgaagccattaactgcccagagaaactctgcagaatcttcgaaggtatgtcaacacccgttccctccctcccctaacattttaagcaaataaagtatgtctttgctgatgtcaaaaggtgctgtcttttaaatgcttgtgtgtgtatgtgtgttcatgtgtccactcagtgcccaagattgtgtgtgtatatatatgtatgtacacgaagtacttgtggagtccagaagagggtatcagatgtcttagaactggagttccctctggttgttagacaccacgtaggtgttgggaactgaaccctggatcccagatctttgaaagagcagccagttgtctacttacttactgtctcttacttaactgcccctctctagccccaccaaggtgtcttggtttagagtattagggacatgcctgagacctgctgtcactaaaacacttgcaaaaatcagagtgatagagagttgccactgcagctgtgaaatatcagccagaggtgataattaaaaagcgaacagccaggactaattggctggagagatggctcaccatcattccccacctcagctaatttcaatgcaggtcaggggcattgtgcaaagtcggctctgacaaggcggtctctgaaacagagtcctgtagctcatctggtttacagttgtctcagcaggcctcagccattcatggagcaaagagagcagatcttggtgcacaggtacctggcagagttgagttaatgcatgcctgttgtttgaccttggacccagatgagatacggtgtacaacagtaacagacacggaatggcaagcagcaggatgaaggtcctgggtggtgtgcagcgactccatccctgtgcaccttgcacctctgctctccatccccatgacctctggcctctcttgatctaaggataccaagtcggggccctccttcttgcatacagaggaaatcaggcctaggacccccacgtctgagaacggccacccaagcttccagctccaccagggaatgacactgcacctcactttgaggggcccaacctcagaccccaatattcttgtcaacttccacttccagagcgctctccaagttgagggtggtagttttctcgaaccctaccctgctgtgctcgcagatctgagcccacaactgcttcctacaagctggagtgtgctgcatggtgcggactgggctctgtgagcgctggttgcgtagagctgggtgggtggaggctgccctctagcgtccacagaaacatctaccagcgcagcgatagcgcctcaaggaaatcacaccccacccattatacaaatgtgtagtgtactctgaacatacttcttccctttcttgtttctcattaattctgtctgttcgttatacagttatcattctttcatgtctataatatctatatgatttataaaaatgtgatatttgtctttctgagactgattaaatatacacacacaacacatgccattcctcttttctatccattcctcttttctatccattcctctgttcagagtcacctaagttgctttcataactaagctattgtcgattgttttgcaacagacacgggcatgcctgtgagtgtgtctgtaatatgttagcttaagagtgctttgggtaagcacccaggagtgctctagccgggcccgtggtgcatccattttcagtgttccgcagattgttcatactgacttcaggggttggaccagtagtgtgtaagtttcctttgtctcagcacctttgtctgcatctgttattttctgttcatctgtgtggatgtgtgtatgcatgtggatgtgtccctgagtgcagggcccagatgtggtccctgagccacttaacagcgcactgggaggaagagcagcagggtctctctctctctctctctctctctctctctctctctctctttcccgagacagggtttctctctgtagccctggctgtcctggagctcactctgtagaccaggctggcctcgaactcagaaatccgtctgcctctgcctccaagtgctgggattaaaggcgtgtgccaccactgcccagctgtataatttttttaaacagtaaaggtccctagatccacagtgtgttgagatcttaattcacctatagatggcagtgtttgcaaccggtggtttaaaactgtagcttcaagttaagacatcagaaataaaccttcattttagaataaataaataaatccccagacaggtgtggtgacttacacacgtaatccaaatacttgagaggttgagtcaggaaaattgaaagtttgagagcagcctcgggctacagagtttgtttgatgttagcctgaattacctagcaagtgtctgtgtgtgtaagtctgtatgtgtggagctaaattgatggttcagcaagttaagtgtaagaaggaagaattgcgtttttatccttagaacccattcgaaattctgtgaccctaagcgaagggcagacaggtgattcccagagctcattggccagcctaaccaagtcaacaagtcccaggcttgggaaagaccctgcctcagaaactaaggttggaacatgacagaaggcacctgacattagcctccagcctacacacgaacacgcataggtgaccacacacgcatgtaccaagcacagctctctagatacacaggcctctgctgttgtcttcctgtttggtgggaaggtaagagttaaattaaaatggcaagtttcaagttgtccctattgcctttcttctcccctaccatgagaacttactgagcatcacgtgctagcccgtgctaagtgacagaaatttaacattcctgtggcttccatgaagctgaaagtcccttgttgatggacaggtatgttgcctctgctttctcatggcacacacattacaggggacaaatgacactacaggacatcctatgcaggttctccagcttctcgaggacattggttcttttccttttccttccttccttccttccttccttccttccttccttccttcctctctctctctctctctctctctctctctctttctttctttttttttctttcttatttttgagacagagtttctctgtgtagccctggctgtcctggaactcagaaatctgcctgcctctgcctcccaagtgctgggattaaaggtgtgtgccaccacgcctggctgaggacattggttcttaaagtgtgcgctgggtcacaagaccaaaaactattttttgtaacagtaatgggttatttccactgtttacatggtctcgtatgaacacacagtggaacttgcagagagaccatggcaggatatagtgacagactgactgactgtggaaacagacagcaaactgaatgttctctgtttagctatagtgaaagagatccagaaaaaaaatatagcacacacagtgagactctttattttttatttttttgttttggaaaatagatgtgtttttattacaatttatttgtgtgtacgtgtgaatgtgtgtgcatgtatgtgtatagatgacagagggcagttttcatggagtcagttttctccctccaccatgtgagtcccacagagcaaactcagattgtcaggcttgtcagtaaatgttctttacttggcgagccatcttgccagaccagatttattttaaacagacagacagacagacagacaaaacaaacaaacagcaacaacaacaacaacaggggttctctgtagccctggctgtcttggaactcactctgttgactaggctagcctcaaagtcagagatctgtcagcatttgcctccagagtactgggattgaaggcacgaataccaccattgctcccagctcaagctcaattttcctttctcccttttttcctttcttcctttcttccttcctctcttccttccttccttccttccttccttccttccttccttccttccccctccctccctccttttcttccttccccctccctccctccttttcttccttccttcctcctttcttcctcttctttttcatatttttgtttgtttattttaagatttatttatttattttatttatgtgagcagactgtagctgtcttcagacacaccagaagagggcgtcagactttattacagatggttgtgagccaccttgtggttgctgggatttgaactcaggacctctggaagagcagtcagctctggaagagctgagccatctctccagtcccttgtttgtttattttgagacagggtttttctgcataccctggctgtcatggaactcactctgtagaccagtttggccttgatctcagggatccacctgcctctgcccctttggggagtaaaagcatgcactaccacacacagctcaattttcatcgctgatgagggaaataccaacagaattttttttctccatgtcagctggcaacaacttttgaggaaagcagacctcagagtataacctggaaatccagtaattatgtttaggaacaaaaataaacaggacatagtaggggggttttgtttgtttgtttgttgtttttttttgggggggggttttttgaggatgatggagacgctggagagatggctcagtggctgctcttccagtggagctgggtatggtacccagcatccttaaggtggatcacaaccatccacagctcctgtcccagaggattccttgccttcttctggcctctatgggcactgcaagcatgtggtgcacatacccatacacatacaataaaaataaaggtttaaaaaatgacctaaattgttttatgttcaggtgacataagcttttaatggcattacattttgttaatgaagagatggtgagatggctcagtggttaagaacacagctgctcttccagaggtcctgagttcaatttctggtagccacatggtggctcacaaccatccataaaggaaccaatgtcttcttctggcatgaaggtgtatatgcagacagagcactctacatgaaacaaacaaaaacataaataattttaaaaattaccattgagataaatggataaatctacacaaatgactgaattttgcagtagttgggccaagggttgtttttttttttttttttacagtagttttgcacatggggacttctctattcttgctttagtaaaataaaatgaggccacagtcagtcaacattacctgactgtatctagtgggaagccttctacaaccaaatgtgagttaagtgagatttcactcggccactgtgatggtttgtatattcttgaaccagggagtggcaccatttggaagtatggccttgttggaataagtgtgacctggttggaataggtgtgtcgctgtgggtgtgagcttaggaccctcaccctagttgcctggaattcagtcttccactagcagcctttggatgaagatgtagaactctcagctctgcctgcaccatgcctgccaggatgctgccatgctcccaccttgatgataatggactgaacctctgaccctgtaagccagccccagtgaaatgttgtttttataagacttgccttggtcatggtgtctgttcaccacagcagtaaaaccctaactaagacagtcatttaaccaaggcagagcacacgcgtatgtactaagggaaagcaggcaggataggttatcatggaagcacaccccaggtcaggagacatgcctggagcagtcgtcatactcctgaagcagcaggtacctcaggaacagaaagaagctggctttcatctgtccttagcagattatccacactaccagtgggactgtgtgagggcgaggcatcctcaagaagaagagatttagtgtgcgcatgtgtgtctgtacacatgcatgtgtgtgtgtgtatgtatgtatgtatgtatgtattgttttagtgaaagatcctgacagaatgtaaaaggtcacagaagccctgaaattggcaaaatagatttcattgttagtaaaagtagcttcactgatttagaaaaatagaggtgcacaatgctctggccactccttgaacccatgtgtctgccaatgttctgactgttccttgaacccaggtatgtgcccactgctgcacctcactgccaggtgtttgtgatattggttgctaagatagagtcggaaaatctccccagcaaccacagcccggccaatcctgagttgctacacctgcaccagactctttccttgtacccctcccatacccatttcttaagaatagacattgtttagatctggaaatcccctactacccccttctcctttcccccctgagggcctattaaaaactgggaccccctttccccttgaggtcgactcctctacccctgcgtgggatatgagttgtccccagagctctggctttcctcgaataaagcctcatgtggtttgcatcaagcttggtctcttgtgagttcttggggggtcatctattatcccgaggcctgagcgaggggctcttttcggggtctttcagaagcaatctagaacgcctccatttggaggatgtgtactccacgcagggttctgaagtgtccattccctcgcctatataagcaagcacctgacactggagacaggcacttccaccctcgcattctttttttttttttttttttttttttcttcaggataaggtttctctgtattgcccgggctgtcctggaactcactctgtagaccaggctggcctcagactacagaaatccacctgcctctgcctcacaagtgctgatattaaaggcgtgagccacca

SEQ ID NO: 546 - DNA, 2435 bp, Mus musculus
gtgctaaaagaccaaatttattcaagaagagagaaaggccagcaaatagtgcagttcccattgcctgcggaaaacggaaatcacactcaaccttgagttttttgtcaaagcatcactccctgaagccttcctgacctcaaagcaggcctcccctcccccctcgctcctagaagatgacaggcgcaccctaaatctaggaaccggagttgacagactcttggaaagcgggaggtgaggcacaaacgcggctgctcgacacgtccccgcgggaagcgtggcggagtttcgagttttccagcccacggaaacgtcaggggcgcgcagagcggctgctgcggggcggaagtgcatccccggggcccgtctaggaaaccgggaggaccctgcgcgtcagtggtcaagggacacagtgggtttcgcgaggtgcatgggacattccagctagccgaccggccctgtccgaccgggcgaagatggggtgaatgtgggcgagaacggcagacgggaaagctgagacgggcatgggggcgtgggctcgctggccacctgttcctcccgcgagtgcggctcgcgcggattggccgcagtgcgcccggtaccggaagtggccggcgtgggtcgcccgtgacaccagacaacagctgcggttctgtgcgcgccgcggtgcagcgcctcgggcccggcggagggagcgtgggcggcatccgccagcgattgtgatatggggactgagaaaaaggagggacttcccaaggaagaaacttctgaagactccaagccacatgggcaaacagtagaaaaacttgcacaggaggtttgccatggccatgagtttggagaagcaagcgaggaagacatgtcagagggacatttgagagagtcctcgaaagagattatagaaaaaaggtatcctcaggagagacactttgcatctgggttacttatcttcaagaagtcgtcctcaggtgagaaaaccagtgagaatccgagaggctttaatcctaaccctagtgtattgtgtcatggaggtgctgagagggccagcgcatgtgctgcctctggccacaactgcctggggagtatagagcttactaaagctcaggggcctcctgtgggagagaagcctcacacgtgtaaagagtgcgggaaagcttttaatcagaactcacatctcatccagcatatgagagtccatagcggagaaaaacccttcgaatgcaaagagtgtggaaagaccttcgggactaactccagccttcgaaggcaccagagaattcacgccggagagaaaccctttgcttgcactgagtgtggcaaggccttcattcagagctcacatctgattcaccatcacagaatccatactggagaaagaccttataaatgtgaagagtgtggtaaagccttcagtcagaactcagcccttattctgcaccagagaatccacactggagagaaaccctatgagtgtaacgagtgtgggaagaccttccgggttagctcacagctcatccagcatcagagaattcacacagaggaaagataccacgagtgcagtgagtgcggcaaagccttcaagcacagctccggcctcatcagacatcagaaaatccacacgggagaaaagccctatctgtgtaatgaatgtgggaaaggctttggtcagagctcggagcttatccgccatcaaagaatccacacaggggacaagccctatgagtgcagtgaatgcgggaaaacgtttggccagaactcagaaattattagacatatcagaattcataccggggagaagccctatgtgtgcaaagagtgtgggaaggccttcaggggtaactcggagctcctgagacacgagaggattcacacaggggagaaaccctatgagtgctttgagtgtgggaaggccttcaggcggacctctcatctgattgtccaccagagaatccacactggggagaaaccccatcagtgtaatgagtgtgcaagaaccttctgggataattctgagctgttgcttcaccagaagattcatattggagagaaaccttatgagtgtagcgaatgcgagaagacgttcagccaacactcccagctcaccatccaccagagaattcacactggagaaaagccatatgagtgtcaggagtgccagaagaccttcagtcggagctcccacctcctccggcaccagagcgttcactgtagcgagtgatctgcaggccaggaaggtggtgtggggaggctggaggcagacttctccattgctctgtaccggggccctaggatcagatgaagggacagggcctgcccctgcccgtccactgagtgtgtgccagtcgtcggccgaaagtgatgaggcagttttatgaactatttattgagaagtttcagcatactaaattaaatcataaaagttatctccggctttaatc

SEQ ID NO: 547 - protein, 497 aa, Mus musculus
MGTEKKEGLPKEETSEDSKPHGQTVEKLAQEVCHGHEFGEASEEDMSEGHLRESSKEIIEKRYPQERHFASGLLIFKKSSSGEKTSENPRGFNPNPSVLCHGGAERASACAASGHNCLGSIELTKAQGPPVGEKPHTCKECGKAFNQNSHLIQHMRVHSGEKPFECKECGKTFGTNSSLRRHQRIHAGEKPFACTECGKAFIQSSHLIHHHRIHTGERPYKCEECGKAFSQNSALILHQRIHTGEKPYECNECGKTFRVSSQLIQHQRIHTEERYHECSECGKAFKHSSGLIRHQKIHTGEKPYLCNECGKGFGQSSELIRHQRIHTGDKPYECSECGKTFGQNSEIIRHIRIHTGEKPYVCKECGKAFRGNSELLRHERIHTGEKPYECFECGKAFRRTSHLIVHQRIHTGEKPHQCNECARTFWDNSELLLHQKIHIGEKPYECSECEKTFSQHSQLTIHQRIHTGEKPYECQECQKTFSRSSHLLRHQSVHCSE

SEQ ID NO: 548 - DNA, 35060 bp, Homo sapiens
  misc_feature (1)...(35060): n = A, C, G or T/U
acctcatctctcctaaaaaaaatatataaataattagccgggcatggtggcaggcacctgtgatcctaggtacttgaaaggctgaggcaggagaatcccttgaacctgggaggcagaggttacagtgagctgagatcatgccattgcactctagcctgggcaacaagagtgaaactccgcctcaaaacaaacaaacaaacaaacaaacaaacaaaaacctccaaaacaaaaacagtagcaaaacaggcctgggaatcttcagggtcccataaaggagcagaggcagattgtgnnnnnnnnnnnnnnnnnnnnnnnnnnnnnnnnaaatcggcagatataggtgcaaatcctgacctcttcccttcttcttctttttttttttttttttgagacagggtctcattctattgcccaggctggagtgcagtggcacaatctcagctcgctgcaacctctgcctcccgggctcaagtgattcttgtgcctcagcctcccgagtagctgggactacaggcgtgtgccaccgcactcagctaatttttttgttttttttagtagagacggggtttcaccatgttgaccaggctggtctcgaactcctgagctcaggcaatccacctgactcggcctcccaaagtgataggattacaggcatgagccaccacacctggcctccccttccgatctgagtaaactttttttttttttttttgagacggagttttgctcttgttgccccgcatggagtgcaatggcgcaatctcagctcactgcaacctctgcctcctgggttaaagcgattctcttgccccagccttccaagtagctgggattacaagcatgcgccaccacacccagctaattttgtattttcagtagagacggggtttctccatgttggtcaggctggtcttgaactcctgacctcaggtgatccacctgccttggcctcccaaagtgctgggattacaggtgtgaaccaccacgcccagcctcgatctgagtaaactttgacatgtcactaaacttctggcctcccttgcctgcaaataccttatctacagttgccatagacagtctaagcttcaagggactctgaccatagttaacacatatgagaggattttgtaaactatgttgggtacatataaagtttggattttttttgttattgttgttttaaaccaaactcaaagcctatattttgctcacctgtgtgagatctatacctcaagatttcttatatggcattaaaatagtgaaatcaaaaaccatggtttgaatgactcactactgcagatggtagagtgagtttgaatgagggaggaaggccatgatcccgagatttgtccggagagagaatctgtggctgttggcaacagaattaagccccagaaacaaagggaccctttatttgagagaggtcctgaggtatcatcacagttatggtttgtagtcgcagtgggaacaaggatagcattgtgggcaggtgtgtggcctaatggaaaacaacagtatgaagagtgagtaactggggtatggaggatggcgtcagcccaaggacaaaggtgcatcactgagaaggaatcttgttggaggactgagtagttccctgaagatgtttttatttttatttttattttttttttgagacagagtctcattttgtcacccaggctggagtatagtggtgcgatcttggctcactgcaacctccacctcccgggttcaagcgattctcatacctcagcctcccaagtagctaggattataggcgtccgccatcacatctggctaacttttgtatttttatagagacgggggtttcaccatgttggccaggctggtctcgaactcctgacctcaggtgatctgcctgccttggcctcccaaagtatcgggattacaggcatgagccaccggcctgaagatgtttttgatgagccacatcttgagctgggaaaataacaccatgaaagcagagttagagccaatcgatctaacaattgtggtcaattgattggtaacaaaggtgccaagaacacacagtgagaaaaaaacagtctctttatttttatttttgacagtctctttaataaatggtgttaggaaaactggctatccacatgccgaagaatgaaattagagccttatctcgcaccatacccaaaaatcaactcaaagtggaataaagactcaaatgtaagacctgaaactataaagctactcaggaggctgaggcaggagaattgcttgaacctgggaggcggaggttgcagtgagccgagatggcaccaatgcactccagcctgggcgacaagagcgcgactctgtctcaaaaagaaaaaaaaaagtaaagtaaagtaaatgtgaagaaataggagttgttccggcagtcttatgcttttctggtcacactgggagcttatgtgtccctatgatgtgggagaccctgggacttgattttcttcctattttctcagaaaagagcctcagaaatattcacataggactgccttgaccctgggatggcaaataacgtcactcatgtgcaaattcagacaaatagtagcagctgcctggaatactgtgctgtgtggggctctaaggcacatttggggatctgagaagtggacaagaacattattacacgtggctcagtgatgtcttgcccgtggtggcaatcctgccgattattttgctgaccttgttaagactccagattcctggtgatgagcctcatatgctgggatgcagctttcttctcctttgtcctctgattactttttccctataccctctgctgttgtctagtttcagtgccacaccacgcccccaacctcaactttccgctcaccttctcaaagcccagtactgacccctcctctaagccagccttttcttctctgtcttccctctcatggtggtttttgggaggctgaggtttctgggtggtgctgcatttctcccactgtgaaacggacggtggtttcacctaagacagacatggaccttacaggaccccaacgcacctcttaggcttaaagaacttgcccaagaaggatctgtcatccaagcacagtaaaaacgtgatcttgctgggtcaggttcagaattggttgctctggcctccttgatacagatgttcctcaacttataatggggttacatcctgatcaacctatcgtaaggtgaacattttgtaagttgaaaatgcattcaggccgggtgcagtggctcatgtctataatcctagcactttggggggcccaggcaggtggatcacctgaggtcaggagttcgagaccaccctggccaacacggcaaaacctcgtctctactaaaaatacaaatattacaggtggcgagtgcctgtaaccccagctacttgggaggctgaggcaggagaatggcttgaatccgggaggcggaggttgcagtgagcttagatcatgctactgcactccagcctgggtgacacagcaggactccatctcaaaaaaaaaaaaaaaagagggaagaaaagaaaaaaagaaacagggtttcatcatgttggccaggctggtctcaaactcctgacctcaggtgatctgcccacctcggcctcccaaagtgctgggattatgggcgtgagcccacccccccggcctatacttcaaattctgaattttgatctctttccaggcgtggtggcatgtgcctgtaattccagttactcaggaggctgaggcaggagaattgcttgaacccgggaggtggaggttgcaatgagctgagattgtgccactgcactccagcctgggcaacagaacaaaactgtctcaaaaaaaaaaaaaaaaaaaaaaaaagaagtatattttctactgaatgtgtattgttcccgcactgttgtaaagtcaaaaacttgcaagttgaagcattgttaagttggggaccatctgtataattgttaactccagagtaggaagttgctcctttgctctacttccttacatcttcacagctggaggtgtaagggggaacaccaaggatgtaactgaaccttgattcagcttcagccagtcacgttactgtgcagaggtgagatatgaatatttttgtccatcaagtttccactgaacagaggcccagcaccaccagtgcctcctgcagaactctcaaagacatgtgacatggtcctggacctcaaggacagctgtgtgtctgtaggaaatagttaaatcacatgaggcaagattcgtctgtgtcacattgagtgagactttgggtatgtaggatgttctgtgaggttggcctagttaaaagaagaaaggcaggagtaaggaagcagctggcagtgataagaagcggagcccgggcgcagtggctcatgcctgtaatcccaacactttgggaggccgaggtaggtggatcacttgaggtgaagagttcgagaccagcttgtccaacacggcgaaaccctgtctctactgaaaatacaaaaattagccgggagtggtggtgcatgtctgtaatcccaactacttgggaggctgaagcaggagaatcgcttgaacccagcaggcggaggttgcagtgagccaagattgcaccattgcactccagcctgggcgacaagagtgaagctctgtctcaaaaataaaataaaataaaataataaaataataaaataaaaatgtaagaaaggagtgcagccagtgcctgtagccctccttctcacatattctacagatagaagagaagggacaagggtgaaatagtgcagtgtgtctttggtttctccatgtgtttgtctctgtgtgaattcaggagggtggtcagtgttcctatctacctttttttttttttttaagaggaacagaactgctcatactcacctataaagccaattctgtggaagtcctgaacctgttagtagaccgtgaaacatcagcccctgcccagtcatacacatcctcatacaggctgaaagtgggaacagtatttacaaaccatatgtccttgtctccttcactcagtagattcctattactccaggtggcacctaggttggctagtgtaataaagcagacggtgggccaggcgtggtagctcacggctgtaatcccagcactttgggaggccgaggtgggcggatcacctgagctcaggagttccagacaagcctgactaacatggagaaaccctgtctctactaaaaatacaaaaattagccgggcgtggtggcacgtggctgtattcccagctactcaggaggctgaggcaggagaatcgcttgaacctcggaggtggaggttgcggtgagccaagatcacgccattgcactccagcctgagcgacaagagcaagactccatctcaaaaaacaaaacaaaataaaataaaataaagcaaacggtgagccggggagtggctgagaggagacaacttatccttttccttcctaactcacacacaagcgcaggtcagattaagcactgccaaagctggggccaatgattctcaaactttattgtgcatcagagccatgaagtgttgttaaaacacacatttctgggccgggcttggtggctcacacctgtaatcctggcactttgggaggccgaggcaggtggatcacctgaggacaggagatcaagaccagcctggccaatacggtgaaaccccatctctactaaaagtacaaaaattagccaggtgtggtggtgcatacttataatcccagctactcgggaggctgaggcaggagaatcacttgaacccaggaggcggaggttgtggtgagctgagatggcaccactgcaccccagcctgggcgacagagtggactccatctcaaaaaacaacaaccaccaaaccaaacaaaacaaaacaaaaaagccacaacacatttctgagctccaactccagagtttctgatttagaagatctgtgggtggggcctaagaattttcatttctaacaagtccccaggtgatgctaatgctgctggtttagagaccacactttgagaaccattggcctatgctattggttttcaaccatggctgtaggtcagaattacctggaaagttaaaagcaaaacaatccatgtccagatcttttttcagatcaatttcaacagagtctatgtgggaggcaccagacagccatgattttagaccccaggtgattccaatgtgcagtcaagtgtaggggtgggttgcccctccacacctgtgggtgtttctcgtaaggtggaacgagagacttaggaaagaaaaagacacagagacaaagtatagagaaagaaataaggggacccagggaaccagcgttcagcatatggaggatcccgccagcctctgagttcccttagtatttattgatcatttgtgggtgtttctcgaagagggggatgtgtcagggtcacaagacaattgtggggagagggtcagcagacaaacacgtgaacaaaggtctttgcatcatagacaatgtaaaggattaagtgctgtgcttttagatatgcatacacataaacatctcaatgctttacaaagcagtattgctgcccgcaggtcccactccagccctaaggcagtttttccctatctcagtagatggagcatacaatcgggttttataccgagacattccattgcccagggacaggcaggagacagatgccttcctcttgtctcaactgcaagaggcattccttcctcttatactaatcctcctcagcacagaccctttacgggtgtcgggctgggggatggtcaggtctttcccttcccacgaggccatatttcagactaccacatggggagaaaccttggacaatacctggctttcctaggcagaggtccctgcggccttccgcagtttttgtgtccctgggtacttgagattagggagtggtgatgactcttaaggagcatgctgccttcaggcatctgtttaacaaagcacatcttgcaccgcccttaatccattcaactctgagttgacacagcacatgtttcagagagcacggggttgggggtaaggttatagattaacagaatctcaaggcagaagaatttttcttagtacagaacaaaatggagtctcctatgtctacttctttctacacagacacagtaacaatctgatctctcttgcttttccccacagtcaaggttgagaatcacgatttaggctcttgaggcagacacccattaatgcaggtgtactagataaagctcagtaaaaccaaatatcttccacccttggttctgcggcaggatatttttgtagtctgggcgtctttccttgggataaatgtagcttgcaatgattttgatggaaatggacttttcttggatcacggcttggagaaagttttgagcagagtgaggaaggttgcaatggcaaccgtggaaaatggtagacaagctgagtagggaaacagaaagtgatttctgggcctgtggaaagcagagaccataagattaccttaggactcttaaacaaaatatatttttcccactcaccattagccgcatgggcaaggaaaacagattttttttttttttgacatagaatctcgctctgtggcccaggctggagtgcagtggcgtgatcttggctcacggcaacctctgcctcccaggttcaagcgattctcctgcctcagcctcccgagtagctgggattacgggtgcgagccaccacatctgactaatttttgtagttttttttttttttttttgagatggagtcttactctgtcgcccaggcgagagtgcagtggcgtgatctcagctcactgtaacctccgcctcccaggttcaggtgattcttctgcctcagcctctcgagtagctgggactacaggcatgcaccaccatgcctggctaatttttgtatttttagtagagacagggtttcaccatattggccaggctggtctcgaactcctgaccttgtgatcctcccgccttcgcctcccaaagtgctgggattacaggcgtgagccaccgcacctggccctaatttttgtacttttaatagagatgggtttcaccattttggccaggctggtttcgaactcctgaccttgtgatctgtctgcctcagcctcccaaagtactgggatcacatgcatgagccaccacgcccggccggaaaatagatattctgattgaatcagagttaacaaacttcccatgcagttgcagacagtagggcaagggagttaaggattttagtaccagagtggctaaagtgatggaccctagagtctagggcctaatggcaatgatgaattcaagagaaagttttctttctgctagattgtgtgtggcatacaaacacaatattcccttctaagggtggtcactcctttccctatttcataggattatggtgaggcaaacacagaagcccgccgtcatccttgcgggaaggcaggtgaccaggcttggtaaatcacacggtcctttcccccttgattggtccatggttgagcaccagacccaaacagggctaatcatagtcctttgtaactgatatttgggaaggatagtgtactctgaggcaacattatatagaatgaaagtcttcaatgtggtgatcttggaactgacacctaaaaacaaactggctggctggacgcggtagctcacgcctgtaatcccagcactttgggaggccaaggtgggcctaaggtctgacctaaggtcagaagttcgagaccagcctgaccaacatggtgaaaccccgtctctactaaaaatacaaaaattagccgggcgtggtggctggcacttgtaatcccagctactctggaggctgaggctggagaatcgcttgaacccgggaggtggaggttgcagtgagcagagatcgtgccattgcactccagccttggcgacaagagcgaaactccgcctcaaaaaacaaacaaaaacaagctggaggccgggcgcggtggctcatgtctgtaatcccagcactttgggaggccgaggcggccggatcacctgaggtcgggagttcgagaccagcctgaccaaaatggagaaaacccgtctctacctaaaatacaaaattagccgggcgtggtggcacatgcttgtaatcccagttactcggggaggctgaagtaggagaatcgcttgaatccgggaggcggaggttgcggtgagcggagatggcgccatcgcactccagcctggacaacaagagcgaaactccatctcaaaaaacaaacaaacaagaaaacaagctggctgtgcaaaattacagaggaagtaacaaggaaaggttctgaggtgagaatgggccaagcttgctcagggaacccaggaaggctagctgcagaatgctgtttccgtggcctcggcagcttaacctaggcctttactcttaaccttggtaattcccacgcaatcttgagatttcaggccaaacgtcactcctgcaagcccttccggaactcaaagcatgtctcccttcgctcccgccgaggagagacctgttcccaggatctgcagccctgtgcttatcagacccacggagtctgtggaaaggaaggatgggataagaacgatgcgggttgggagagttaaaagggtcgcgcaaacggtccccgcgggaatgcgaagcggattctcgagttcttgagcctagagcaatgcttggggagcgacacgagggcgcagagcggcagatcgcggagcggaagttcatccccggagccgttctaggaaacccggaggactcaggtcgtcaatgattccggggctgaagtgggcatcgacgggtgcactttgctgttccagggagccggctcggcaggcggcggcgacgtggaacttgggctagggctagaaccggcgaaaagcaagccggaaaaggcaagggggcgtcggtgcgctgaccacctgttcctccagcggagtgcgacgcgcgccgattggctggagtgccgcccgggtaccggaagtggccgatgcccgtcgccagtgacaccgggacaacagctgcgggctctgtgcgagcggcccagcagcgcggagcctcagcggagtgagcgagcgcggggcagtagcggcctgcggtgagacctcattccgtcgcggctgtgggggtaggcgggggctgggctcccagctccctagagagccgagcggaaaccctacgtttaggcccgttctgaccggggttcgctgtgtgaccttgaagtttatgcctccctccattccccccgcccccaggccttcatttccacctgcacacagagagggtggggcctggacaccgccagggacagtcccagctctggtttggtgcctgtcagccgtgggggtgggagaagcagggacactcccttctgtaccgaggtggggacccgtgggagctgtggttttctcagacattccacccccaagtaaaccgctaggacgaaatggcgggcagtgtcacaaacttaacgccctagtggcagattgtgccctgtgctgccagacaagatattggcttatgaggggtggtcgtgaaaaggagacaggtttgagctgcaaagatagagccctattgtgggtcagagggagaagagaggaaaggaggttaacagtgccataaattaaatatcacccagattgggaaaaggaacttatttttacaaacagttatcgacaccagctatgtgtcagacactatcctaggctctttagatataatgatgaatgaaatatccagttagccatcaagagtattacagaggctgggtgcagtggctcatgcctgtaatcccagcattttgggaggcctaggcgggaggatcacttgagcacaggagttcaagaccagcctgggcaacatagtgagacaccatctgtacaaaaaacaaagaaattagttgggtagttgggtgtggtggcgcatgcttgtagtcccagctacttgggaggctgaggtgggaggattttcttgagcctgggaagttgaagctgcagtgagtctgggcaatagagccaagaccctgtctcagaaaaaagggaggtattgcagattcattatatatataagacagttacacaaattcacttaacatttaccaggtatctgaaatatgctaggtactcagaataccaggatgaatggaacagcatccttgcttatggtctagagaagaaaataggtatgaaaaattaataatgcagtggggtagctgctacaaggtgaaggagtagctgtctgccttagagcctgggggtcagggaagaaaatggagggggtcagctgggcgtgatggctcatgcctgtaatcccagcactttgggaggcaaaggtgggcggatcacctgaggtcaggagctcgagaccagcctggccaacatggtgaaaccctgtctctactagaaatacaaaattagccaggcgtggtggcagatgcctgtaataccagctgcttgggaggctgaggtgggagaatcgcctgagcctgggaggcggaggttgcggtgagccaagattgcgccattgcactccagcctgggagacagagcgaggctccatctccaaagaaaaaaaaaaaaataggtatcgtggtttcaggactgattaatccagtggccctggcagcatctcccttgtttttctgagctttagctgccctcatccacaggctggtagtgagatggcagcagcaggtacaggcaataatatatggaagtattttcctatggttctctcaggatggcaggaaactattcccagaagctcccagcaaacgtcctcaaaatattgacccagatgaaggtggatgtccatttccaaaccaggaattcccgaatccttgctgtttctgaaccagtgccttgcaagaattagggcatttatttgactgggttaactcagttggagtgtcctgctggagctcttggatgaggttagatctctggcaaggaaagcaaagccactgcaaatatttttgctcacataccccgtaaaataattttggaaggtttgtgtctctttatacatttgcaagttgacatccaaaacatttccatttctcatcataaattttaatgagtttcaaaggatattatttttgaggtattaaaatttcgacatttcaaaataaaacctcatcccagtttcccagataccttcccttggttaccttcccttggagcacaaagaaggtgctcatcacatccttcaccctctctgtaacctccatctcttagcaccccactcctcccagccccccttcatttccatccgtatctcacttagtcatctcagctctgtcctgactaacctccctaggcctcgcctcctcagtcttccaccacacatctccctggattctcaggctgccaaaactgccactgaaagaagtcaggagagcatggtgattggcccctcttcactctgatgctctccagcttgcttgtttcatgaggtggtggtaagggttaatgtctgtaagttgcttagcacatggtgagagcttatcattagcctccacatcaaaatgtcagtgctgcctggctcatctcccctccatatttatcccaccccgtgcatgctacattgaaatcccaatgttttttctgtttctgttctttttttttttttttcttttttgagatggagtctcactctgcactggagtgcagtggcgcaattttggctcactgcaagctcggcctgccccgggcttcacaccattctcctgcctcagcctcccgagtagctgggactacaggtgccttccaccacacctggctaatttttgtatttttagtagaggtggggtttcaccgtgttagccgtgatgtctgtttcttttcttactcctcctgtacttcctggcctcttgcttgcccactttctgtccggaatgctatagtgcagtggtcttcagatggaaatatgtggagggggtacacagacactttctgtaacatctttgggcacatagattgttgaatggaaatcaacttctagatccttgactttattttgtatccttgcctatgagtgatctgcttaagaatgggcctgtggcctgtaggtttctcttctctcacattttttcacaattgttcttttcttcattttattttattttattttattttattttttgagacggagtctcgctctatcacccaggctggagtgcagtggtgcgatcttggctcactgcaagctctgcctcccgggttcacgccattctcctgcctcagcctcccgagtagctgggactacaggtgcctgccaccacgcccggctaattttttgtgtttttagtagaggcggggtttcaccgtaataggcaggatggtctcgatctcctgacctcgtgatccacccgcctcagcctcccaaagtgttgggattacaggcgtgagccaccacgcctggcccttttcttcttttataaaagaaagacaccggccaggcatggtggctcacgcctgtaatcctagcacttttggaggccgaggtgggtggatcatttgaggtcaggagtttgagaccagcctggccaacatggtgaaaccccgcctctactaaaaatacaaaaaacaggctgggcacggtgcctcacgcctgtaatcccagcactttgggaggccgaggcgggtggatcatgaggtcaggagatcgagaccatcctggctaacagggtggaaccctgtctctactaaaaatataaaaaattagccgggcctggtggtgggcgtgtgtaatcccagctactagggaggctgaggcaggagaatcgcttgaaaccaggaggcagaggttgcagtgagccaagatcacgccactgcactccagcctgggcgacagagtgagactccgtctcaaaaaaataataagtaaaataaaataaataaagacaccactcacgcatctccttaaggttaccatggtgcatccctctgcagtggaaaatcctctagcgtgccatacagagacaatttgttgaagaagtgagttttttggacgttttgtaatacaagtcccaatctttgctcccaacaaaattttacttaattttttgagacagggtctcttattctgtcacccaggctggagtgcagtggtgtgatcatagctcactgcatccttcacctgccagcctcaggtgatcctcccacctcagctgcccaggtagcttgggattataggcattcaccaccgtggctggctaatttttttgtaatttttctagagacaggtttcgccctgttggccaggctggtctcaaactcctgggcttaagtgatgtacccaccttagcctctcaaagtgccgggattataggcgtgcccagtcccgacagaatttttaaaagatgtaatcaggttgtcagtcagctgccagattatgccgtaatgttttactacaaatcactgtgtggctttttggcagataagttcaaaaagttgtgatattgctacaagagattgctgtaaatgcaggttgatgcagtttgggcaaaatcaggtccagttacagtaactagagtcagtttgttaagcataagagaaaggtggtttttaactcagaagaggtatgcagtcagttgtattatatctgtctgctgtcaggtttaggggaggggaggggcaatctagattgagaagaggaaaaaagtcagagcaggaactggcaatgtacccataattctgctgctcgacacctgtgttgatctgcctgtaggccaggttttgggtaaagatggatacaccacattaagagtaggataactccagtcattaagactttgtaggccgggcgcagtggctcatgcttgtaatcccagcactttgggacgccgaggtggatggatcacctgaggtcaggagttggagaccagcctaaccaacacggagaaaccccatctctactaaaaatacaaaattagccaggcacggtggtgcaagcctgtaatcccagctacttgggaggctgaggcaggagaattgcttgaacccggaaggtggagccaggattgcaccactgcactccagctggggaacaagagtgaaactctatctcaaaaaaaaaaaaaaagactttgtaacagtggttttcaaacctggctgggcatcagaatcacctagggtacttgtttaaaatatagatctcttggtcccactagagattctgattctgagagatctgagatgggacctggacattagtatttttaacagatttctcagtggattctcacgcagctagcctagttccaggccaggaaccattgtttaagagacattcatctaacaagatcttcctgccatgatttcagggctcctaagcaattttcagggttttatgtggctttccatgcagattttcttttcttttcttttcttttcttttcttttcttttttttgagatggagtctggctctgtcgcccaggctggagtgcaatggtgcgatctcagctcactgcaacctccacctcccaggttcaactgattctcctgcctcagcctcccgagtagctgggattataagcacccaccatcatgcccagccaatttttgtatttttgtagagatgaggtttcaccatgttggccaggctggtcttgaactcctgacctcaggtgatctgcctgcctcggcctcccaaagtgctgggattacaggcatgagctactgtgcctggctcatgtagattttcatctaggtaatatggtcctttataaattttatttcttgttgttaattaatagatatctggtttatacatcagtacgttgtgaatgaggcttttttttttttttttttttttttgagacggagtctcgctctgtcgcccaggctggagtgcagtggcgggatctcggctcactgcaagctccgcctctcgggttcacgccattctcctgcctcagcctcccaagtagctgggactacaggcgcccgccactacgcccggctaattttttgtatttttagtagagacggggtttcaccgtgttagccaggatggtctcgatctcctgacctcgtgatccgcccgcctcggcctcccaaagtgctgggattacaggcgtgagccaccgcgcccggcctgaatgaggctttttgagcttgctttccttgggtgcattgaaaagacaaatttaggtctgccaagttgagggtcctattctgagctgtggaaacccaatagaggtctgcctgtcatgcccaaactgaggaccagtggtcaacctctactcttccagtagcacctccatcttatctctcttcagaaacatttaatttcagatttaggaaagtgaggaagtgagaaacggaaagatagaaaattgtatttgggaatttgaatttaggctatgagaagtggtgtttccatatgagtctgaggcctaatatatggctgtgcctctggaagaatcaaccaaatggagattggctttgatttgtatttgagaagatacccatagagcagtatttgacaaatgacatactgtgttgctggcagaatgcaaagtaaaagaatgatcagagtgggtaagatttagtgggggaaggctttctgtgttttttttgagatggaatcttactctgttgcacaggctggagtgcagtggagtgatcttggctcactacaacctgtgcctcctgggctcaagcgattctcctgcctcagcctccccagtaactgggactacaggtgcacaccaccatgcctggctaattttttgtgtgttttttttagtagagacagggtttcaccatgttgtccaggctggtctcgaactcctgacctcaggtggttctgcctgcctcagcctctcaaagtgctgggattacaggcatgagccaccgtgcctggccaggggagactttctgaatttgagttttgttttttttttttgagacggagccttgctctgtcgcccaggctggagtgcagtggcgcaatcttggttcactgcaagccccgcctcctgggttcacgccactcgcctgcatcagcctcctgagtagctgggactacaagcgcccgccaccacgcccagctaattttttgtatttttagtagagatggagtttcactgtgttagccaggatggtcttgatctcctgacctcgtgatctgcccacctcggccttccaaagtgctgggattataggtgtgagccaccacacccggccctgaatttgagttttaaactaggtcctggttacttgactggggataaatacatacctaacttctgtcgtatcttgttttgctaagaaaaagtgattttccatttatcgtggtacacgtgtcagctctacgaatgctgattttgtaaagaactagatgatggaaaataagcaagtataggaggcatgaggatgaaaaggaaaggccagagagggggttggaagcagatggagactgaaatggcagcttgtggaacttgctcttgggtagggatgagagagaaatgtatttaagacagtacttcccaactcagatggtaccatggaggaagaagatagctaaattctcgacaatggattcttacaattgtatagatacacattacctataattttcaaagatttcaacaaaaaggagaagtacagtttttaggtgccctctcttacttcatgggaaaatgagagaagatgctgagatggggaaggtcaaagaaagttccacctcattttcaggtgtagcacaaagagcttctaagacttcaggattccagtaggagatcaggttccttccaggtgtctggggaggggggcattaccaggctgccctgatgagtgactagaggtgcccgagccggatggtgttagtaaccaacatcctgtggataacgggaggctgggcagagagaaggggagtccaaagtcgcccccaaatctccacctttccccttcccttaccacatgactccagcctcctctgctgctcagggtctttgtttcttcagtaatctcatcctttcttcactcttaacccctgtctctctgctggacctattccttctaatataaacatgttcatatctcttccatcagaggaaagccttgctctatagcactgtccgtcttggtcttctcctttcatccacttttttttttttttttaaagaagcagcaaattcattattcagtccactaccagctggcttttgctactgtcattcccctgaatctgtgctcacagttcatatgtgactatctattgtctcagtacacattttctttctttttttttttttttttttttgagacggagtctcgctctgtcacccaggctggagtgcagaggtgtgatcttggctcactgcaagctccgcctcccgggttcaggccattctcctgcctcagcttcccgagtagctgggactacaggcgcccgccaccacgcctggctcctttttttgtacttttagtagagacggagtttcaccgtgttagccaagatggtctcgatctcctgacctcatgatctgcctgccttggcctcccaaagtgctgggataacaggcgtgagccactgtgcccagcctcagtagacattttctaattcttatcctagcgaatctcaactgcatttgatttttttttttttttttttttgagacagagtctcactctgttgcccaggctggagtacagtggctcaatcataggttaccgcagcctctacctcacaggctcaagtgatcctcccacctcagcttcccgagtagctggaactacaggcacatgccactatgcctggctaaatttttaatttgtagagatggggtcttgctatgtttcccaggctggtctcaaactcctgggctcaagtgatcctcccacctactcctcccaaagtgctggcattaaaggcgtgagccaccgttcctagccttcactcgatatttttaaattccctctgccaatgcctaagtgacttctgtgacacattattctggtttttcagtttccctaccattctttatcttcttggctcattctcttcctctactcacccctttatgaacggagtctgaacaggaaacagctcactcaaattaggataatttgaggagggtttatttgcagcgaggttaattataaatgatctaggtgtgggcaggtcattgaagaacccagggctggcaataatagtcactagccctgggcctgaagagagaggagggagtagaggttactggaacccagacagtgagactactgagtaggatagagttgagaggagtagggacctcagttgagggacaacaccaacccaaggcgacctcacaggaaggaaccctgacccctttctcctgccctgccctttcgtccctgcttccagacccctgctggggctcctcattggtggaccacagctggaagccagaggctctgttgatgtgttccatacaggttaggtttctggggcaaagagggacagggagaaaggtggaaagaagatctagagggaaaatggaagataactggagcactcgtgactgtttctttgactcctaggcttctgttcgcagcctctgatggttctcatgctacactcaggctgagtactttcaagtctgtatctctagtcctgactactttgagctttagaccaatatattttgactgattctttgatacctctctgtggataccttgaaactcattttgtccaaaacagagctcactgatcatcttttattgctatattagctcctctcccagtattcagaatattgtggcaccaccgtccatctaattaccatccctcaaattgagtgagatctgggcaccatctttgagtcctccctccttacacctatctccagtcacacaccaagtcttgcagaatttgacctcttccgtatttccccagcctgtctcttcctccccactgctactagtgctctagtgagatcacatcaccttttgccttgatgactgcagcagcctcccagctgatcttcctatgtgcaggcctactgctttcttttttttttttttttttagtagagatggggtttcaccgtgtgagccaggatggtctcagtctcctgatctcgtgatcctcccgccttggcctcccaaagtgctgggactacaggcgcccgccaccatgcccggctaattttttgtatttttagtagagacggggtttcaccgtgttagccaagatggtctcgatcttctgacctcgtgatccaccatcctcggcctcccaaagtgctggaattacaggcgtgagccaccacgcccggccaggcccactgctttctacttcagccactaaacgaccacgagtgtgcatctgcgtggaatgctaatctgactagggaccatgtcattccttggtttaaaaaaccatcccatagttctgcaatgtctaaaggatgaagttccatacattcccatgcccccttgagaatcaccttccacagtgaacactttcactgacgggaggattgtattcctcagatttgccgtagtgcacaaatagactgccctaagcaaaggccactttaatattagttccagattgcttaccatctgaacaaaggtcaggcttattctcctggcatttggaccccttgtctgtggtggggacagccaaatccccaggacagttttattaggaataggtttggcctcgtataataacaaaaaacccccaatatcttaagcaaggcaaaagcttatttctctcttagataaatgaagtccagaggctggcattccaggattggtatggcagtaccatggagtcatcagggtcccaggttccttccagctgtgatccccagtcctaggctatgccagtatactcatggtccaggatggtgtccagctatcacatcatgctctgggaacagcatggaagacaagatggaagaaatgtatctcctcatcctttaggagatttcctagtagtcccatgtggtttcatttgcatctcactgtctcattggctagaatatgatcatgtggccaatcccaactgcaaaaattaaaaagctggggaatgtatttttttagctaggctaattgccacactatataaatttattattctgttataaggcaatggggaataatattggggtaggcaactaaacatttttgccacaactaaaaatctttgtaaaagttttcaaaaggtactctcctcccacccacccctgcccaagaaacaaggtgtcttgctctattacccaggctggagtacagtggcacaatcacggctcattgcagccttgaccccctgggctcaagtgaccctcctacctcagcctccccagtagctgagactacagacacatgccactgcccctggccaatttttaaaaaattttagttgagacaagatctccctatgttacctaggctggtcttgaactcctgagctcaagccatcttcccacctctgcctcccaaagtactggaattacaggtgtgagccaccacaccctgccaaaaatgcactctttaagtaatctatgaaggtattaagaaaatactataagagagctgattacaaaattaatatgtaatgatcaacagcattgctatatatataagtaatagccagttacaaaatgtaagaaaatctcactaaatgaaaagaggtacagagacatgatgaacataaaaacaacatcagcataagtttggactacaaatttatactaaagtttacttgggaagatatgagaatagacaggaaaggtctgaaaaagaaaactgagataactttctctagcatatattaaaaatgttaataaagctaacaggttgaactgtttgatattagagaagacaaggatcagtggaactgaatagaatccagaagttggcccaaatatagatggatatttagactatggcataggtggcattttaaatcagtaggggaaagaattattcagtaaatggtattgacacaattcagtagccctttggagaagtttaaagccagtggctccaaatgtcagggagccaaaggcggtacttctgtgctagttatagctaagacacattaatcttttgaagaggtaagccctctatgtcccctctcctgctctatagagctgatgagtaccagagaacaggactaagaatagtcctcttgttactcattttgcagttacttcccctgtacacccaaaagttatttatattaacttgtcctttttttttcttttttgagacagggtctgactctgtcacccagcctggagtgcagtggtgcagtctccacttattgcaacctccgcctccctggttcaagcaattgtcctgcctcagccccccaagaagctgggactacaggtgtacgccaccatgcccagctagtttttgtatttttagtagacagggtttcgccatgttgcccaggttggtcttgaactcctgagctcaaatgatccgcccgcctcggcctcccaaagtgctgggattacagatgtgaaccaccatgtcatttctgtcccttctttcaatatttatcgtatacctatctattaatatggccaccattttccctagatgttttctttaatcaccttcaggttctaacccaactcaccgttaatattatggattttttttttatcagcatctctttaccatccatttcctacttctctcttgaaatcttttctcactcctgtcagcatccactgtttagcatgtccaccataatcctaaatctggatcttctctttggcagcatcttgtcatttcgccagatatcaagactgtttctgttttgtttttttgttttgagagggtctcgccctgtcacccaggctgaagtgcagtggcgcatttcagctcactgcagccttgacctccccaggctcaagcaatcctcctgcctcagctgccctcctcccctgaccaagactgtttctgagtgctatgagaactacatcaaagctctgttgtcctctagtgttagcttcatttaaatatgatacggtcccttcacatacttacctctctcatttcagattgtgagatggggactgagaacaaggaggtgattcccaaggaagaaatttctgaagaatctgagccacatgggtcattattagaaaaatttccaaaagtggtttaccaaggtcatgagtttggagcaggatgtgaagaagacatgttggagggacattcgagagagtccatggaagaggttatagagcagatgtctcctcaggagagagactttccatcagggttgatgatctttaagaaatcaccctcaagtgagaaagaccgggagaataatgagagtgagagaggctgcagtcccagcccaaatctggttacacatcagggagatacaacagagggagttagtgcatttgctacctctggccaaaacttcctagagattttagaatctaacaaaacacagagaagttctgtgggagaaaagcctcatacatgtaaagaatgtgggaaagcctttaatcagaactcacatctcatccagcatatgagagttcatagtggagaaaaaccctttgaatgtaaagaatgtggaaagacatttggaactaattcaagccttcgacggcacctgagaattcatgctggagaaaaaccctttgcttgtaatgaatgtggaaaggccttcattcagagttcacaccttattcaccatcatagaattcatactggagagagaccctataaatgtgaagaatgtggtaaagccttcagtcaaaattcagcccttattctacaccagagaatccatactggagagaaaccatatgaatgtaatgaatgtgggaagacctttagggttagttcacagcttattcagcatcagagaattcatactgaagaaagataccatgaatgcaatgagtgtggcaaagccttcaagcatagctcaggccttattagacaccagaaaattcatactggagaaaaaccatatctgtgtaatgaatgtgggaagggcttcgggcagagttctgagcttatccggcatcagagaattcatacaggggacaaaccctatgaatgtaatgaatgtgggaaaacttttggccagaactcagagattattagacatattagaattcatactggtgagaagccctatgtatgtaaggaatgtgggaaggccttcagggggaactcagaacttcttagacatgagagaattcacactggagagaaaccctatgaatgctttgagtgtggaaaggctttcaggcggacctctcaccttattgtccaccagagaattcatactggagagaaaccccatcaatgtaatgagtgtgcaagaaccttttgggataattctgagctgcttctccaccagaaaattcatattggagagaaaccttatgaatgtagcgagtgtgagaaaacatttagccagcattcccaacttatcatacatcagagaattcacactggagagaagccttatgagtgccaagaatgtcagaagacttttagtcggagctctcacctcctccgacatcaaagtgttcactgtatggagtaatctgcaaaataggaaagcttttagtggaaaagctaaagtccaacttattcatttgttcataatatgcaaatatgcaccccaagtattcaaatccaatgaatggacagaacctcctctgtcctcccactgattttaaatagttggttgaagaagatgaggcacttttttttttttttttaagcattggggtcttgctctgttgcccaggatgggatgcagtggcacagtcgtaactcactgcttccttgaactcctgggctcaaacagtcctcctgcctcagccttccaaatagctaggactgcaggcactaatgaggcacttttatgaattattcattgagaggtttcagtgtgctaagttaaatcataaaagctctttcaggccttaatttcccctctgtccttccttccccttctcctcccccagtggatcacataacaaacattaagggtctgtaccagccatctttcctaaattactcttcagcaaaattgtgggaacaggattccaccacctcctaagaatgagagttgactcattgactgttaccccctgaaatattagaaagtcataatttagaagacacacctcattctcctgtccatgtttagcattggaataatttagtaagctgttattagcttcaaagtcgtccagccctgctatgaagttactttagaagatggcagcattaatgaagaagcaggctcatttcacatctgtcagccttccttattcatctgaagaggctgccatgatggaggaactgacaggcaatttacaacgggattataagtgaaggccttagaatccagaggggccgattaggcaacaccaggggataaacaattgaggtcacactgctcggcatgggcagaagcagctcttcaggagctgtccacacttcaggggtgctcagactgactgctcctaagaattctgctgcatatatttttagccccatctcctgccactgctgacagatattgtgacagtaagtagcagacaggactgtggcttcacctcctccgggcacctggctacagtgatgagtcagttcacctgatgacaaaccagggtctggccttgccaaagcacttaagttctcatgacctggaccacactggaggccctggctaagtcaggatgtcgtagcctcttcttggttttgccccttggccttgaaattcttttttcttgaataactttaaaaaaatagagataaagtcttgctatgttgcccaggctggtcttgaatgcctgggctccagcaatctttttgcctcaacttcccaaagtattgagattacaggtgtgagctaccatgcccggccttgaaattctttcttcgctatgtctgcatgttttttgtgttctgtatttatttcttctccaaggaaacagcctacattttccatgtgtccatgtttctgaggccgtgggtgacagtgggaattgcactaatgggggcccagcaggcctgggggctggtcttagcgctagaccttgaacaaggcacttcacctgctggtctccaattttctcctctgtaaaatgaaagagttgaactaagtgatctcaaaagtttcaaccagcccgataattccttaattctttaaaaatttaactttatatatctttattattctttaacctcatctttgttacactaatattagtcactaatatttattgagtgtttactacctgacaggcacagtgccagtttacattttaattttcacatcatttctatgatgtgggtactcatttttttaaagctttatgaaggtataatttacgtactataaaattcacctgttttaagtgttcagttgaatgatttttaatttacatagtggtgcaaccatcaatgatgtgggtattcttaccccaatttaaaagataagaaggggcagtgttaagtaattgacccatgattccacagctagtaagagcgacagccaagactccaaacctggttgatgctcttaaccactgtgctatgccgcaggtaggcagattcattactgccttatctgaaaccctttgcacagtttctattactgatttctatgtagatttgaatataacaaatttaaatcatgtccttggtaacagaactgatcacagccaaaaaaaattcaccaaatgggtttattctgtactccaatataggtgtcttcccaggtttatatccttggcttgagaaaagggttgtacaaatagatgattgcagagtttccacatccttccagatacctctgcctctaacagtcacactcttagtaagggaagttgtttgatttacttcttcccttaggttgattacaagtgaagtgcgccgtcttattcctttttcattgctggagcacaaattgaattgtgcccagaccgtatctttctcacatgaaacctggatctcacctatcccttccatgcctgattcccgtgtttgcatattttatttccacatttacctcttgtcagccctgacagagaatttggcaccccttcaagcttctcctaaacaatctatccacacaaacacccctgagcaatatggacttcactgaagatagtgtgtaagcaaaggagaagagttcacattgtgcatcctattagacattttgttctcagaagtaccttactggccaaaccaatgaaggttttcctcttgtcctcccctctcaaggctcagtcacctcaacttctttttgcctactagatatccaatccatcacctcgcctcccctggccctagctcaattaccctcttaaacccattcctgctcagcaaaacttcctctagttcaccattcattcatttgaacattaggaggcaatttagtgacctgttgtacctgaccatgttcttaagggggaggtctcacgtctcattcccagaaaagtctaccatatatagatacatattccccgccccgccccagatttctggtgaatgaaatcacttgtatcttattaggtacatatacgcaaatccttaacctcaattctctgtcctcttcatgtcttacccagatatctcaggaagatttctcttttccttctgtttgcctccctcttcgacttacttgggagtcagcatctgaccacagtcgtgactggtaatgatgatttgtgcaaatactatcaaggaaaggacatgaattgtcttaattttagacccattaaaaaaccgcacaggcctcaatcttaaaagtcctatctaaatacccagaaatacccttcagaatttttgaagctatgcccatgtacaaaattttcttccttccctaattttaatggtatactaacaccttaggtaaataaaatatttctttactattttattgatataatgcctttgtcatgtttattccaaattgcattatgtttcactatggatttaataaggactttgtttaccagtttcatccccaccttgtaagtttcaccttacctaaatacccccacatgcttgttagcttctggttttgcatacagtgtacattctgtgtccttgatctgctttgcttggtgagatccttcatcttaaataacaggacaagtgttatctattgtgcgtgtgttggtatacacgtttttcttcatgattagcaacttaaaatattccggaccatttgtatggcctttaacaaaaaatcaccttattactgaaatttcagggtggcggcgggtgctgctgattgtttaccattaaatttttacaagtgttctgactcctggcggatgccaggttcttaatgctgttaagtcatgaatcttctttgagaaccaggaaagctctgcccggaaaaatgtacatgcagtttcagataatttatggacttcctgaaactcatcctctgaaccctgttccccaaatcaaacatttaacttaaaaaaaaaaaaaagaccgagtcacttccccaataatttcctcttcaccgcacccctcagcttttggaatgaagctatgtcaaaaagacctgcctgggtgaacccctgcaaatggaggtcagctggacctcagtaaaagcccagtgggaaggagcggggacgattctggcgatcacatgaggaagggagcagcctcagcagcgcaggtggacacagtcgtcaaccactcgctggccgcctgcgacgtgaagcacctgcgctgggcgcggcgggtaagcgccgacactagcgggcgcctgaacagtccagcggcgtcagcgctgcggagcaggaaagggtcccaaacgcagggcggccatgcagcgtggcgcccacctgtccctctcctcgaagcgctgagccagcacgatgcacataagggaaggaggaaggtggcttgagggcagtgaccgagcggacagcggaagcccatttcaggagccccggtacccgagctcgggcccctttccaatcccccaggcgtccttcccatgtccttgtctcctagtcctgggaatccacggccactccactctcctgcagtaccgcggacaagaacaccatgtactcttcacaggcaggtgtcttctggtggacccaactctgttggtacttgtcgtctccaaaaagtccccaaatgcgctagaggccagccagcccggtatccgagaggtaagagccccggcggcgcaggcggaagcgtgtctgtcgcgaggcctctctaggactccgggaggacccctcgttagcgcaggacctcggcagccgggggttgggctcgagggctgagggcggcgcgccatgcgcggattagctgccatccggcgggtctttctgccggggaccagtggggtcggacgctgagggccgaggaaccccgcccccccaccgcaccgggcgggctctggggcgtccgcggaggctcccgcgtgcgtgtgcggggtggggtcggggtggcagttgggggcaaatcaatgggcctgtacttttgtctctccgcctgctgggatttgcagtttgtgaggacgtttcacatctcacggatatttacggagtcccttccacggcccaggctcttctggacaccaaaccaggcctaatataactatttaatatctaattattacaattaaacttatttgcagtcgggaagcatagactcaaaacacgaaaggcagggttggctttagaaagaagtcactgtcgtctaagactgtcagaggggctaagaagataggtatggagggccgggcgccgtggctcacgcctgtaatcccagcactttgggaggcctaggcgggtggatcacttgaggtcaggagttcgagaccagcctggccaacatggtgaaaccccgtctctactaaaaatacaaaaattagctgggcgtggtggcgtatacctgtaatcccagctactcgggaggctgaggcaagagaatcacttgaacccgggaggcagatgttgcagtgagccgagatcgcgccattgcactccagcctgggcgacagagccagactccgtctcaaaaaaaaaaaaaaacaaaaacaaaaaaaaccaagggctgggcgcggtggctcacgcctgtaatcccaggactttgggaggctgaggcgggtggatcacgaggtcaggagtttgagaccagcctggccaacctggtgaaaccctgtgtgtactaaaaatacaaaaaaattagcccggcgtggtgccaggcgcctgtagtcccagctactcgggaggccaaggcagaagaatcgcttgaacctgggaggcagaggttgcagtgagctgagaatgccccactgcactccagcctgggtgacagagtgagactccgtctcaaaaaaaaaaaaaaaaaaaaaattaagaaaaagagaagtatggaagttatgagtgtcagagacagtggagttgatcatttgaggcctttggctaagagggacggtggttatgtgctgggagtgggcagaggtctgggaggctttctggcagattatccagagaatcatcaagaaaggagcaaatgcggtccaggtgagatggctcacgcctgtaatcccagcactttcggaggctgaggcgggtggattgcctgaggtcaggagtttgagaccagcctggtcaacatggtaaaaccctgtctctactaaaagaacaaaaattggccgggcatggtggcacgcgcctgtaatcccagctactcgggaggctgaggcaggagaattgcttgaacctgggaggtggaggttgcagtgagccgagattgcgccactgcactccagcctgggtgacacagcgagactctgtctcagaaaaaaaaaaaaaaaatagaaaaagtagaaagaaaagagcaaatgcttctatgccctttgtcagctgggtatgtcgcgcattctccaagctggaatgtggatgggggtgcggagggatttagttagagtaggcactataaatctaggttccattccactgactctgaaggcaggggaatcccaggagtgccctgaatgtgggaaggacctgggagagcttcatgccttcaggtggaggtgggagattcctctgcattcatgttcacgctggtgagaaacactagtatgtagagtgtgggaaagccttgagatggaattctcaccttcgagttcatcaggaaattcacactggagaggacctttgaatgccagtgtgggaaagaccagcccagttctcatcaacttcagcatccgagcatgcacagtgcccagggatatggggacttactcactgtaggacactttcattgtgacatgaaactttgatctttcctcttcttcactgggggcagtaattttgctttgctccttgaggacagggctaacttgtagaatagtgttcaccccagggttgccactcaaaaatcaataaatgaatgaatgaataagaggcaacaaatgatgatctgatttttctgtgatgtgggcaagtacagtgttgaacaggtgaaccaaaacctttctttagttgagggaatttatcataccatttactcaaaaacaagatagccacaggttgctttaaacacatccacgccgggcgctgtggctcatgccactttgggaagctgaggtgggcagatcacctgaggtcgggagttcgagaccagcctgaccaacatggagaaacccccgtctctactaaaaatacaaaattagccgggcgaggtggcacatgcctgtaatctcagctacgcaggaggctgaggcagaagaatcgcttgaacccaggaggtggaggttgcggtgagccgacattgtgccattgcactccagcctcagcaacaagggcgaaactccatctcaaaaaacaaacaaaaaaacacatccctatcagccgtgaaaagcaaaggaagaagaaatcagatcttttgcctgtatcctcctcaaaaatctttctttcatactcctcaccagcctcctgtccatcctccccacgctttggaaattacagctctcatcataccccttacttctcaggacgcttttccccactctcaccctgcccctggagcccatggcatcctgggggaaaaatcctttctgtggcattcaagacccttgacaactggtcccagaacctcccatcccggcaccggcaccagcaccatgcacgagccaccctgatctgcttatactcacatacacccagcactttgatgcctccttgcctttacagactccatccctcctcccagggcaccgctgtccatttaacacccacccccacccttctttacttctagcttcaaggaccattgcaaagggcttgtcctctgaggccttccctgacactcctccaatcccctggcagtagcagtttcctcccaagggctcctaaggccaaggattgattcacagttgttgacttagtccatcttccccactagaccgggacctccccaagggcagacactaggtttgaatcaccttcgagtcccaggcattgtccagtccagggctgggtccagagggagacattctgtgaacacttgtgctgatcagtcctcagttgaactgagggaactacctgcagatctctggagccctgtgcgactctctcctctctggtgctcttctaccacatcctctctgaattctcaagtctgtctcctcaactcagggagtctgctggctgtttgggttcctccttctggcactgcagcctagaaactcaccctatagaaagctgggctgggccaggccaggcgcggtgcctcacgcctgtaatcccagcactttaagaggcccaggcaggaggatcacttgagcccaggagttccagaccagcctgggcaacatggcaaaaccctgtccctacaaaaaatacaaatatcagccaggtgtggtgctgtgcacctgtagtcccagctacttggaagtctaggaggtcgaggccgcagtgaactatcagcatgagaccctgtctcaaaaaaaaaaaaaaaaaaagaaaagaaaactgggccagtgcgaggactcctctcatttgtttcccttccctcagggctctttcacattgcctgttgcccagttctgaaaattattgtttcatatattttatctggctttttaatgtgggatggtaaattcagtccctgttactccatcatggtttcatggttggaagcagaaaaaagaaatttgtttctatttttttttttaacagggtctcactttgtcacccaggctagagtgcactggcgcaatctcggctcactgtagcctccacctcccaggttcaaccaatccttttctgtcagcccctcaagtagctgggattactggtgtgtgccaccatgcctggcgaatttttgtattttttgtagagatgaggttttgccatgtttcccaggctggtctggaactcctgagctcaagtgatccgcctacctcagccccccaaaatgctaggattacaggcgtgagcaactgcgcccagccagatttgctcatttgatgtaaggtttatgtgtatgccaattctgtggctgatggaactctttcaaggctttcattttttaaataaagaccttcatttctcattgttccattaagcaattaaggtgacagcattaatttgaagaattaacaagaattaattacatttaatcttttttttttttttttttttttttttttgagatggagtttcgctcttgttgtccaggctggagagcagtggcgtgatctcggctcactgcaacctccgcttcctgggttcaagcgattctcctgcctcagcctcctgagtagctgggattacaggcacccgccaccatacccagctaattttttgtaattttagtagagacagggtttcaccatgttggccaggctggtgtcaaactcctgagctcaggtgatccacccaccttggcttcccaaagtgctgggattacaggcatgagccaccatgcccattcaattacatttaattttaaatttaattaaattttgcattggttcctgggcagtagagacagtctcatcagtgggaccaagcactcatgtgtctgggaagcagtggtgattgggacagtgagtttggctttctctgctccacaattcaagttagaaatgcaaaagccccacttttcttccttgcagctctgagtaaagagtaccgtgtgcacgggctttgaaatcatatttaggttcagatcttggctctggcacttatcaattatgtggccttggacaaactatttcatctattttagtctttttcttcatccgtaacattgcaacataaagcctccttctgaaggttagtagtacagttcaaacaccgcttcagtaattttcgggtgcctggaagaggaaagtgactcccttaaccctaagcccaaagcttccccatttccttgtgctccctggtttgcagctctcctccctcgcccccagggcttacggccacactgtctgtagggcagctactctgccacctctggcctcagggtcctcttgggtgtgtacagaggcaggtgcctgagaaaggcctgtagaatggggctcctggacagagcctaaggctcttggtaggaaaacttagagccatttgcactgtttggcttgaagcataaactgagctggagtctagagggagggtgggctggtttctgcctggcagtcagatctacccccaaaagtcctactgatcttgcccctttcatactttccaaatctgtctcctcttctacatccccaaggccactccctcagtttaggtagccatattacttggaggttacaagtctcctaataagagtccgttttcagttttccacactgcagatgacgtgatctttctgaagtacacaactgagtaactgacggtgtcactccctagtaatggctccctactgctcttaaatccaaatcccttagatggcttaaaaggccttgatatctgctacacttcatctctccaacctcatcaaatgcatttgtcccttgcactctatacaacaggtacacttaaaaaaaaattttttttttttaatttttagataggattttgctatgttgcccaggctggacgaccttggcctccaag

SEQ ID NO: 549 - DNA, 2137 bp, Homo sapiens
ggacaacagctgcgggctctgtgcgagcggcccagcagcgcggagcctcagcggagtgagcgagcgcggggcagtagcggcctgcgattgtgagatggggactgagaacaaggaggtgattcccaaggaagaaatttctgaagaatctgagccacatgggtcattattagaaaaatttccaaaagtggtttaccaaggtcatgagtttggagcaggatgtgaagaagacatgttggagggacattcgagagagtccatggaagaggttatagagcagatgtctcctcaggagagagactttccatcagggttgatgatctttaagaaatcaccctcaagtgagaaagaccgggagaataatgagagtgagagaggctgcagtcccagcccaaatctggttacacatcagggagatacaacagagggagttagtgcatttgctacctctggccaaaacttcctagagattttagaatctaacaaaacacagagaagttctgtgggagaaaagcctcatacatgtaaagaatgtgggaaagcctttaatcagaactcacatctcatccagcatatgagagttcatagtggagaaaaaccctttgaatgtaaagaatgtggaaagacatttggaactaattcaagccttcgacggcacctgagaattcatgctggagaaaaaccctttgcttgtaatgaatgtggaaaggccttcattcagagttcacaccttattcaccatcatagaattcatactggagagagaccctataaatgtgaagaatgtggtaaagccttcagtcaaaattcagcccttattctacaccagagaatccatactggagagaaaccatatgaatgtaatgaatgtgggaagacctttagggttagttcacagcttattcagcatcagagaattcatactgaagaaagataccatgaatgcaatgagtgtggcaaagccttcaagcatagctcaggccttattagacaccagaaaattcatactggagaaaaaccatatctgtgtaatgaatgtgggaagggcttcgggcagagttctgagcttatccggcatcagagaattcatacaggggacaaaccctatgaatgtaatgaatgtgggaaaacttttggccagaactcagagattattagacatattagaattcatactggtgagaagccctatgtatgtaaggaatgtgggaaggccttcagggggaactcagaacttcttagacatgagagaattcacactggagagaaaccctatgaatgctttgagtgtggaaaggctttcaggcggacctctcaccttattgtccaccagagaattcatactggagagaaaccccatcaatgtaatgagtgtgcaagaaccttttgggataattctgagctgcttctccaccagaaaattcatattggagagaaaccttatgaatgtagcgagtgtgagaaaacatttagccagcattcccaacttatcatacatcagagaattcacactggagagaagccttatgagtgccaagaatgtcagaagacttttagtcggagctctcacctcctccgacatcaaagtgttcactgtatggagtaatctgcaaaataggaaagcttttagtggaaaagctaaagtccaacttattcatttgttcataatatgcaaatatgcaccccaagtattcaaatccaatgaatggacagaacctcctctgtcctcccactgattttaaatagttggttgaagaagatgaggcacttttttttttttttttaagcattggggtcttgctctgttgcccaggatgggatgcagtggcacagtcgtaactcactgcttccttgaactcctgggctcaaacagtcctcctgcctcagccttccaaatagctaggactgcaggcactaatgaggcacttttatgaattattcattgagaggtttcagtgtgctaagttaaatcataaaagctctttcaggccttaatttcccctctgtccttccttccccttctcctcccccagtggatcacataacaaacattaagggtctgtaccagccatctttcctaaattactcttcagcaaaattgtgggaacaggattccaccacctcctaagaatgagagttg

SEQ ID NO: 550 - protein, 498 aa, Homo sapiens
MGTENKEVIPKEEISEESEPHGSLLEKFPKVVYQGHEFGAGCEEDMLEGHSRESMEEVIEQMSPQERDFPSGLMIFKKSPSSEKDRENNESGCSPSPNLVTHQGDTTEGVSAFATSGQNFLEISNKTQRSSVGEKPHTCKECGKAFNQNSHLIQHMRVHSGEKPFECKECGKTFGTNSSLRRHLRIHAGEKPFACNECGKAFIQSSHLIHHHRIHTGERPYKCEECGKAFSQNSALILHQRIHTGEKPYECNECGKTFRVSSQLIQHQRIHTEERYHECNECGKAFKHSSGLIRHQKIHTGEKPYLCNECGKGFGQSSELIRHQRIHTGDKPYECNECGKTFGQNSEIIRHIRIHTGEKPYVCKECGKAFRGNSELLRHERIHTGEKPYECFECGKAFRRTSHLIVHQRIHTGEKPHQCNECARTFWDNSELLLHQKIHIGEKPYECSECEKTFSQHSQLIIHQRIHTGEKPYECQECQKTFSRSSHLLRHQSVHCME

SEQ ID NO: 551 - DNA, 259752 bp, Mus musculus
  misc_feature (1)...(259752): n = A, C, G or T/U
gcccggcactatattgctttttataacattttctttttcctgtgtcttggggtgggtacccactatgacatcagagaaaagctttgggagttggctcttctaacatgtgtgtcctggggatcatacttgggttgtcgggctcgaatccaagtgtctttacccactgagccagcactttgacctgctatataatttttaaaaaaacttttttttctagattgatgtgaatgagtgttttgtcttggtgtatgtatgtgtgtataccatgagcatgcctgatgcccatggaggccagaaggaatcagatcttctggaactggagttccaggtgactgtgaggtgccacgtggatgctaaggctcaaacctgggtcctctggaagagcagctattgtttttaactcctgagccaattctccagctcctaccatgacattctaagaataattattgataatataaatgaagactaaggtttttgtggattcatcatgttactaaattatcttgttagcttttaaagtatgtccctactactgtcttggatgggatccaaggactcagggtaaatgctctaccagtgagctttactcacagtcccagctggcttctttttaaaaagatttattatttttatttatgtgtctgggcatgcccatgtgagctttgtgcaccacataaatcctggaccttgagttacaggtgatgcagccactgggccccctgtgtttcgccaggctagctgctttatagctgatgccctttaatcttttatttttctaatttcagatatggcttaaggtagttttccttttttatattttgaaatagggttcccctgtgtatccctggctatctttgaactcactctgtagaccaggctgtacttgaactcagagctctgcctgcccctgcctctctacctcccaagtgctgggattaaaggtgtgtgccatcactacctggtatggtttaaggtagcttttcaagtagtatctttaaaacaaactgctcttcagttctcagatcttactttggctgtgctatttttagcttccacagggatctgaatttttttttagggaaaggcttgggtagggaattgcagaagcagcaaggaaagctatatgtctaggtctttgtcatgagttccaggctctagccaactccaggtctgaattcacacagatgtggggcctcttaaaccacactgaaccttagagggctttcatgtcagaccctttagggaaactcgaaactgcaaagacaaacatcattcatacagtaattcctctggattttcttcacatttagaaagtaagctatcaaaaccacccagaaaaaaagagcaggggctctcagatgggtctgtagttgagagcagcagctgctttagtagaggttctcagtttggttcctagcacccacatggtgactcacaaccacctgtaactgcaggtccaggagatccaagacccttttctgactttgccagccactaggcatacttgtagtgtacaatcatatatgtagccacaatactcatataaatgaaataaaataagaaaactacacttggtgtggttgcacacacatttactctcagtactggggaggcagagagaagccagactgctctacagagaaagctccaggccagtcagaattagagtgagacctcaagaggtggggaagggggagggaagagaaagtaaagatttctgagccctctcatgcaggtagcaggcccacccatcccaagacaaatcatgcccttgaaacatatcctgttgtgggacaatgctattatttaaggcactctttcttgctttttccttttttttttttttttaagacagcgtcttggatagcctacaatggcctgaaacttggtatgtagtagcacaaagatgttcttggccttctgatgatcctgcctctactactctttcttcttcttcttcttcttcttcttcttcttcttcttcttcttcttcctcttcctcttcctcttcctcttcctcttcttcttcttcttctttcttcttcttctggaactcattttgtggaccaggctggcctcgaactcagaaatctgcctgcctctgcctcccaagtgctgggattaaaggcgtgcaccaccacacccggctagctgcctgtacttcttaagtatcatgatttctggtacatgttattatgttcaactttcaattttttaagagtagtataatgcgagtaagcgctgatcaggtaagcgccatgttagaatacatacacacaaatatgtaaaattttgtgattttggattcaggtttttagtatgtatatgaacctggctttgactttgaactatatggtcattttgctttcttctcccgagggatggggtgatggggatacaccaccatttttagaaaactactctgactacattacagtgaataaaaaggaaaggccaaatacgtaaccagggagcccaattcagaggcatttcagtacatgtgagggacaatgggggcttgaatggcaaaggagatagaaaaacatcacttatgatacttttatcaaaacagaaacttttaagggactaaagacgtccttcagatagaagtagccctgggtttgatctccaactctgcataaaataagctggatgatacaggttggtaccaggtggaggcaggaagataagttcaaggtcatctttgggctacacagctagttccagaccagtccatgctacaggagaccctgtatcaaaacatacaaaaactctccaaaaacatgaaatctccctaggtaagatacataaatggccaatgagcacatggaatattcccagattcatcaatcactagaaaaatgaaatcaaaactacacgggaccccaccttgtcaccatgagcattagaccaggatagagcggaatgggagcctaatggactgctgggcagaatctgaagcagggaggcgccatgggaaacactatgctagttcctaaaaataatggccccagggttagcacctgagtcagcaagtctagccctagagcatatcaaaagaaccaaaaacatttctatatcccatgttcatagctgcattattcacaataaccagaagaagccagtggacactgacagacaatgtttatacatatataatatgcacacaaaatggaagattcacttaacaggaggaaattctaacatgttgtaaaatagatgaacactgaggacattatgctaagggaaataagccatctgaaaagatacctactccatgattccaaccatatgggatacctctagtaatcaaattcaaggaaagatgactagctgacaggggctgggcttagggcagtgcagtgatgtttaatgcatataataaatgggtttgggtatacgacagaatttattaaacaacaaaaagcatacacttaaaaacgattaaatgatacatttatgtgtattttaccacagctgaaaggagcaaaaaaggataatagttataattaggcctatatgtcatatgatgactactctcccttggtaacttgggtttccttgatttgaccacttgaggggaagacaacctaccctgaatctgggtcacagttttcgtggcagcccacagaagacatgaaagaaggaagcttctgcttcttgcctgcttgcccttactcttgctggtaagttcatctaccttgctgctgaggcaatccttcactggaattagaaccaacatcttcgggattccaacatagcgtggactgagcattacaggattcttggcttttctgccaagaaacaaccattgtgggactagccactatagcctgtaaggcactctgacacaaaccctttatttatatacatataatcctatcaattctgtccctgtagagagccctaggtaatagagtttgtaagtggtagggcctcaatttgaagtaatgtaggccaaggatgagtgtgtccaggttctctggctcactgaatccaaggaagggttgaacaaaccacggaggggaggtggagcttcagcaacaactgcaccacgggctggggagcttccgtgactgtcactcagtttctcacctctgctgcctctggcacggcggcttccttctcacagcagaccagctggctccgtactgcaggacacatggctgctgacagctcctgtgttttacattttatggcttccatactgaagagggattctctctcaatttcagttcaaaaaattctgggtaaggactttgattggcccatcttggcccaggaccagtgtggcaaagggtgtaaggtcatttaggaaatactacataatagaagtagttatggaaacatgaaaaagaaacagaatgagatctatagcacagtatcaattatgtacatttacaatacatacataaaacattatacgttatgcaaagatacatgtatatttaaggacatatgtccagcacattaaagccactaagtagtgatggagcatgactgggaattgaaatgagaaaggccttgttaacgacatcgtgaacacaacagcatgattacctcagctctctgcttctgtagggaaacagcagcagaaggggaaacgaaggaggggaaaaaacaaaacgaatcttccgtgtagtagtgagaggcagttttcagaagacaaaggatgagagttggggcaatggcccagctggtaaagtcccctgccgccaagtttgacaatctaagttccattcccaggacccatatggtagagggaaacacctgactcctgcctgttgtcttctgacccccacatgtgagctcacacacattcaatagagtaattaacactgtgctgagacagtaggcctgggataccttagaacccattatatagaggaggctggcctcaaactcagagatccacctgcttctgccttccaaaggtacacaaccatgcctagctcctttctcctctctatgtgtttgtgtctgtgtgtttgtgtgtctgtgtgtaggtgcctgaagaggtcagaagagggtgacttattcactaggaactggagttacaaatagttgtgagtccccttatgtgtgcactatgaactgaactgaagtcctctggagagcagaagtgctcttaacctctgagccattcttcaagcccaattttgggtttttaaaaaagattatttttgttcacaggtgtccataggtgtacatgtgtgcacatgagtgtgagtgaaccctggctgaaggtgttatctctcaggagctattcactttggattatagattgttttttatgtttttacagtagtctttcactgggaactggggcttactgattaaagctggctggccagtggacctcagagatttatctgtctgtatctccctggaacttgcattacaaacccatgacaccattcctaactcttcaagtgggtgctgggatcgaactcaggcccttatgcgcttttatagtaagtactttactgattgaaccatctctgtagatatttacttcatttaattagttaagtgtattgggacagggcctagccttaaactacataacgggataactttcaattcctgattctcctgctttgacctccctagtgctgtgttataggcatgcatcaccgtgttcagtctatgtgatgtctgggatcatgtatactatttgcagaacaatatatatgttatggtttggtgtgtgacaaaaaaattatgcttatgtaaatttctaggcaagcattttaccatctgatgtacatccccagtctttatttttttgttttgttttgtttttttttgtttgtttgttttttgagacagggtttttctgtgtagccctggctgtcctggcactcactctgtagaccaggctggcctcgaactcagattcgcctacctctgcctcccaagtgctgggattaaaggcttgtgccaccatgcccggctgaacttgggtcctcctaagagcagccagtgttcttaactgctaactccagcacctaagtaatttgtttaaattttttcattcatttttattttatgtgtataaatattttgcctgtataaatggagtgtttgtgtaccatgtgtttgcctggtgccctggaaccagagttctggacagttataatcataaatgtaggtgctgggaattgaacccaggtcttctagaaaagcacttagtgctcttatctgccgaatcttctatttagcctctaacttctttttgagatgagctcttgctatgcttttcaggcagtacttggaaacagaccaactgttttctacttttgaacatttggtgtaaattccacctttttttttttgatgaattcatatagaaatttccataaaaattttgccactgtaggttagggtggctggcttcaagctcacaaagatctgcctgcctcactagtgctgggactaaagccatgtatacacctggctagcctcctcctcgtcttcctcctcctccttttttttttaaattgcattttgagccatggtcttcctaatcttcctaagttgttagctttgaggctggagttctcttacgtaatatcctgggttgctgggattacagtcatttaccaccaagctgaagtctttttcattgttttacttagttcttcatgagtactttaaatctaaaaattcaaaatttccctcatcaatttagtagctttctagctgggtggtggaggcccatacctttaatcccagcactagggagaggcaggcggatctctgagttcgaggccagcctggtctacagagtgagtgccaggacagccagggctacacagaaaaaccctgtctcgaaaaaccaaataagtagcttttttccctgtaacttgcctgttgctcctcttcagtcagctgccaatgtttagaacttgtattatctctcttccttatgtatttattgtgtttccgagttctgttttaatacttagaggctctctggtctgatcactgtcagcattgaattaagttggccatgactgtcctaggggagttttcttgtttaaaattatttttccttcttttaaaaaaatgaaagttagccaggcgtggtggcacatgcctttaatcccagcacttgggaagcagaggcaagcggatttctgagttcgaggccagcctggtctacagagtgagttcaggacagccagggctacacagaaaaaccctgtcttgaaaaaacaaaaaaacaaaaaaatgaaagtcacggggctggagagattgctcagattaagagcaagcacagcacgctctgggagagaacaggaattcagttcccacatcaggtggctcataactgcctcgaactctagctccagggggaattcaatgccttttggtttccacaggcacctgcactcatgtgtatgtatgcatacacagactcatacatataattaaaaatgagacaagttattaaaaaatgacagactgggaaataaacaaaggaataaataaataaaagttggggctagagacacaactcattcaatagggtgcttgtccagcatattcaatctttgcattcaatccccagcaaaaacttcaacctggcacatcaggatagatccacatctgtaatgccatcatttaggagatggaggcaagagcattacaagttcaaagttatccttggttacataatgacttcaaaaccagtctggatacaacagacttttaagctcaacaaaagaaaacaaaatgaaaccaggtcttcaactggatatgtaaccaaggatacccttgaatttctaattcttccccttgtactttgcaagggctgggattacaggcttctgccaccataacgacccagtgtatgtggtgctggggaccctttttttttttttttttttttttggagaaagggtctcatgcaatccagattggcttggaacatagccaaggatgaccttaacctctcaattcttgattttcttgcttcatttcccaagtgttgcctgcactccttgtatgtacagcaaggctaactgggaactcttgtatcttcttgccttagcatccagagtcatggggttagggatgtttgataccatacccagcttcaagttagggtttaaaaaaaaaaatccgggggctggagagatggcttagcgggtaagagcactgattgctcttcccaaggtcctgagttcaaatcccagcaaccacatggtggctcacaaccatccacaatgagatctgacgccctcttctggtgtgtctgaagacagatacagtgtacttatgtataataataaataaatctttaaaaaaatgtaaaaaatcctattgttgggctggagagatggctcagcagttaagagcactgactgctcttccagaggtcctgagttcaattcccagcaatcacaaggtggctcacaaccatctgtaatgggatctgatgccctcttcttgtgtgtctgaagacagcaacagtgtactatacattaatgtacagtgtatatacattaaatgaacaaataaattttaaaaaaccctgttgttagtgttttttagacaggtgttactatatagctctagttggcctggaactcactatgtagaccaaactgtcctcttgcctgtgtatttttggtgctgggcatgtgctaccatgtctggcttatgttttggagatagagtctacatgttctttggtttagctttaaactcaatggactcaatggtggaacacagccttaaagtttgatcttcctcccaagtgctagagttacagcatgtgctatcatgccaggagcacaaagcaggttttttttgttttgttttgtttttaaagatttatttatttactgtatgtgggtacactgtagctgtaggttctgagccttcatgtggttgctgggaattttaggacctttggatcaactctgcttgctctggtaggaccagctctctctagtcaactcctctcactccagacgcaccagaagagggcgccagatctcattacagatggttgtgagccacgtggtttctggaatttgaactcaggacctttggtcctgagcaggtcagtgttcttacccgctgagtcatcttgccagccccagcaaagcagtttttatatttcctattcctctcaaatcttttgacaaaaactgccatttgttctggccactctaattaattatacccattcatttgagctgttgactatttctcagtcattgtctttctctctctctctctctctcttttttggtttttcgagacagggtttttctgtatagccctggctgtcctggaactcactttgtagaccaggatggcctcgaactcagaaatccgcctgcctctgccggcccctcctcccccagtgcgggattaaaggcgtgcgcccggcatttttctcttttgatggtgaaatatctgtcacataacaggaactgtatgagtactatcaaatattttatactatgatcaaggcataactggttattactttttgaggtctaaagggtcaatgactgtgtgagacagggaagaaggaaagactggagaaaggcagtctttggataggaagtttctccaccccaccgtttctaataggagttaatggtcaatgagcttaaagtacccatcttctagtctaattaactttttgcttcctttttgggggacaaggtcttctaatatgttgccttgattagcctcaaatgtgctatgttgcccaggcttgaacttgcaatgctcccaccacagcctttgaagtaccgtgaatataagaatgagctatttttaccagcatcagtaaaaatttaaagatgtaaagatgggagaattgacttgagtactaaaaaagtaattttaaaaaattctcaatgctaacagtaattcccagatcgaataatttccttctttttttacctccacacaacgacctccagcaagtcttagggatgaactgtcatagactttagtactctggtacaatcaaacgatacacggagcaatttacttcttccactctctgagattccgtttaccagtaatggggataataataaaagatatttaaactccacaatccaggcctacggtaaggagacttcggcctaaaatgatcggaggaggccgggttgtaggatgtctccgtcaatccgagccccagatcaaaagcagtgtcctcggtggtcaccgcagcaatactggcatccctagacccgaatgcccacctgacatgggcgagtcacacctggctgcgcctcacctcgcctccagagcgctgcgcctccacctccgagcctcggcggaccgtcctagctttacacctctgcgcacgcgcacacgccgtctccgcggccgattcgcccgctccggcaaggccctagttgaacgtgctgaatgcttttgctcccagtgcggccaccgtcgtttggggagggcaggcaggaggggggcggggaaaagggtgggagtgggtgagcgcgcgccgcccgtccgtcgtggtttcctggctgcgcgcggcggtggccgagtcgccgcagctgtagcagccgccgcgaagatggcggaggggttggagcgtgtgcggatctccgcatcggaactgcgagggatcctggccactctggctccgcaggccgggagcagaggtgagttgcgccgcccagctgctgggccgggcctgcccgccccgcctccctctcctctgcctcctccccgccccgtccgcggcgctccgaacccccgccccttccccaacagtgcgcccggggcctgcggcggcccctgggagacagcgaggctgtcgctccgctccctcgggccctcgggacagagcccaagcgcgagtttcagcctccgccctcttgctcggcgcggcgccgtggttgttctccggtgccctaaccctctcacgccagcgcctgagttccagtccggaggagacacgaactggcttgggtgctagggtccggtagaggccccgagacgtattgttcccaaaagaatagtctgtgtatgtgtacctttccgtagtcctccgttccgcgtcggagaggaggagctggggaaattgaggagaaaggcttaacaggctaggacttcctttgctgaacttaccccccccccccaccccccaaggctggtttctagtgctaggccactggagggatccaggacctcagagagctgactcggttttgttttggtcttggcgtgtgtgggagcagttgtgatcagagagaatgcttaatttgccagtctccattcgcatcagaaaagcgcgagaaatattttggtgtctggtctccttcattagccagtgttgcttaggatgacagttacagaagataccttctctaggattgtggctagaatttgtgaggttggtttttattggccaactgaattggattaaccaggctgttttctctctctcctctggaaaatagtagtcaccacctctcctggctccgccccaaaactaagtttaaaagtttactcagggtgctgaggttaaacggctttatcttggttcacatttggtggagaagctaaacttttgccaaggcagcagtatcttttattttgtgtttgtttttcttttgagacaaagtctcaccttgtagccaatactggccttgaatttactgtgtaacccaacctggccttgagtttggatacttttcctgactgaagccttcagagtgctggaattatatgcatatgccaccatacccaactttcaagtcagaaacctaaaattttagtttcgcccccaccccatcccccaaacaaaagtgggtatagatgcaggtgtataaatacttggctaccagcttgtttgcatttgtatatacattataattctgtactaggattttatataacttgagtactggataatattctcactagttcctgtcacttatgaactgtttagtaggtatttttagtagtctctccactgtaagcaacagatacttacaaaaaaaaagctgtttgctactcagtggagcttggagagtggtttataaagtcctctcctcctcctcctcttcctcttttcctttgttgagacagagtctcatatagtccaagtaagcttcaaactctgtggccttgaactcttgatcttgctgtcactccccaagtgctgggatttggaggcatggatttggctgggctctactgttcttgagtcctttggtcctttgagagcgtgtcacaattcgcccattggtgcctaggaaaagctcctctagtggaacttttttttttcttcttatattctatcatcatagtagcagttagtctcagtattctaatgacatagtctaggcagtattttcatgaaatgattctgttggttgttgttagagagttggtgaggatgaatggtgttgaagattgtaaaaggaattgcttaatatttgattcagtaggaggtatgtgattggggtgttggtatcctaaagttgtagatttgttgtgatcaagttcacacactgaagttgaagatagtttcccagagatatctaggactgaggcttgctatgcatgccactctaatatgtgtatgtatgtgtagatatatgtttacatatgtaatataataagtaaataatggtgtaatatacgatacatatataccagtaaatatgtttatgcgatgctgggggctgcccctagtggcctcctatatatgagacagatacactgggctacatttctttctcctaatatgataacctagaaatattacagacaggagaaatgctaaccagatgtgatatacactcttgtaatccagaacttggatggctgaggcaggaggactgaatttgaggtctctctggaatatctatggtgagactgtgactcaagaaaggaaggaaggaaggaagaggggctcagcaggtaagagcactgactgctcttttggaagtcctgagctcaattcccagcaaccacatgatggctcacaaccatctgtaatgagatccaaagccctcttctggtgtgtctgaagacagctacagtgtgttcatatacataaaataaaagagaagaaaagaaagaaggggtagacttacaggttgtgtagacagaataatttaatgcctgaacatgttagagatctttgattctgaaataatgaactagtttggggtctttaagatctgaataggagccgggtgtggtggcgcacgcctttaatcccagcactcgggaggcagaggcaggcggatctctgagttcgaggccagcctggtctacagagtgagttccaggacagccaaggctacacagagaaaccctgtcttgaaaaaaacaaacaaacaaaaaagatctgaataggaacatgacttggatacaagagaatacaactcccctctatttccataactcaagtaagtacgtgtaactctaacatagttaaattcttaacctcactgcttactaaacactataactccaaatttctgcctttgtagaaacgttctttcctgatcaccaatattatcatttgtatttgtattttttttgttgttgttatgtaactagaatgacaactttccttccctctcttctccattattcttttcttctgtgttgtttcctcttatcaacataatagaaaacatgaaggaactaaaggaacccagacagcgcaaagataataggcgtccagatttggaaatctataagcctggactttctcgactaaggaacagacctaaaactaaggaggcttctgggaatgaggaatttaaggatgagatagtaaatgacagagattcttctgctgttgggaatgatacacagcttattcaagtttgcaaggaattggacagccaacagcaaaatggccctatagatgcagaaaatagtcaggcacaggaaacttttccaaagactgttggactagaggaccgaagtctaaagatcatcaaaagaagcaagaaaccagacctgcagatctaccagcctggaaggcggttgcagaccattaccaaagagtcagcaggcagggcagatgaagaagagatcctcaaccaagtggagcagttgaggatagaggaggatgagtgtaagggagaagctataaaagaagaagttaataacaaaccggataaaaccgagatagaaaagcaccaaagtaatgaccgtgtaagaactgccaagggagaaaagggaaaaaagattgaaaagggggaggggtcaaagaaggtggctgatgactctgtcccaggaaagcctggctctgtaaagagatactcgagatcagacaagagaaggaatcgctaccgcacttgcagtaccagctcagctggtagcaacaacagtgctgagggagctggcctgaccgataatggatgtcgccggcggcgccaggatcgggccaaggagaggccacgactgaagaagcaggtatctttgtcctcaactgattccttagatgaggacagagttgatgagcctgatgtcctagggtccaggaggagctcagaaaggaagaagcatttagaaagaaattggtctggctgtggtgagggtgaacagaaaagcaatggtaaagaaaaccgaagtgcccttcgtgtcacttttgatgcagaaaccatgagtaaagactcccctgtggtgaggtcagtcaaagataatgtggatagaatgaagtctgacaaaggcccaagcagtgggggtaagggctctgagaagcaggagctcagacacccgagacaagaacttcgagatcgtggtcgtggtatcctgattctgcctgcccacactgccctatctgtcagttcatcaggttctccggagtctacacctttgggacctcgacttttatttggatctggtagtaagggatctcggagttggggccgtggaggcactacccgccgactatgggacccaaacaatcctgaccagaagcctgccctaaaaagccagacacctcagctacatttcttggacactgatgatgaaattagccctacatcttggggtgattcacgtcaggcccaagcatcttactataaatttcaaaactctgataacccctattattaccctcggacaccaggccctgcctctcagtatccctatgcaggctatagccctctgcagtacccagtaggccctacaaatggtatgtatccaggggcttactacccgggctatcctgccccctcaggacaatatgtgtgtagccctctccctgctagcaccatgagtcctgaggaaatagaacagcacgtgcggaacatgcagcaacaggagctccatcggcttctccgagtggctgacaaccaggaactgcagctcagcaacctgctttccagggaccgcatcagcactgagggcatggagaagatggctcagctcaggtactgagtgttctttcctactgtcttgcttagagagaaatggacgctgtagggctcctgtggctgaggaaggtagaggatttttagataagccactgagtgttacctgcctttcacatgaatccctaccccccaacaacccctcgtgggcatggacatcaagtctggagtcttgtgcatcttgtattaagtgccctaccactgagccacacttgaatcccctttacattgattttttttcttttttcttttaaattatttatttatttatttaatgtatatgagtacactattgctctcttcagacatgccagaagagggcatcagaccccattgtaaatggttgtgaaccaccatgtggttgctgggaattgaactcaggacctctggaagagcagtcagtgcttttaacagctgagccatctctccacccttcattaattattattatttttttttataagcaacaggcagttgggaaaataagttttaattctagtcttaaagctgaatatactttttactttaaggggaaaaaatgtctttaagggaacatataattttcagaatgccaatttcagcttgcaccaaagagctgctttcagctcttcaatgtaggtgtacacatatagcaatatggtattttcctagatgtatgtttgtaagacattctgctgtgcagaataggacccattatgagtaggatgcctggtcacatttcagagttcttgtcaggaaggaggtggctggtttgcaggagattcagatcttgggtgtggccttgcctgtgatgtattgaagctagactttacatgaattttattccagaactgaactactgcagctgtacgagcgctgtattctattagatattgaattctccgacagtcagaatgtagatcagatcctgtggaagaacgctttctatcaggtgattgagaagttcaggcagcttctcaaggatccaaacagtgagaacccagagcagattcggaacagactcttggagctcttagatgaggtaagcattgttattatcatcattattgttgttgttattgttatagcctcaggataaagtctgcagcatctttttgtttgttttttctactggagatgttatagaacagaatattgccaaaacccttctatttttcttgcatttagatctggtctccctgtactgcttcctttggactatacacacagacagctggagttaactttttttccagtgctcagctactgagttacatctccagacccagaattacatttgaccttgaaagctttctgaatgagaggggtgggcgggagtggggtggggaaggaatgagagctgaaagaggtggggagtggtaaatgaattatattttttaaaacatgagaggcttactataaactgttgctgagattatccgatggcctctaaccaattacttatggtaagtaccttatatctaggatttctggacattgatagattgtgaaagggttgtttggccaaggatttggtaagtagattacaaaaactgattgacttagttttgttttctggttttgtttgtttgtttgttttgttttctttatagggcagtgacttctttgatagtttgcttcagaaactacaggttacttacaagttcaaactggaggactacatggatgggcttgccattcgaagcaagcctttacgaaaaacagtaagccagtttctttctttagtttaaatttattcatctaggtctagatcagtggtgcacagtgatttatttatttcgtgtatgtgagtacagttgtcttcagacacaccagaagaggacatcagatcccattacagatggctgtgagccaccatgtggttgctgagaattgaactcagggcctctggaagagcagtcagtgctcttacctgctgagccgtctctccagccctgtggtgcacacttttgatcccagtacttaggaggcagagacagatctcagtgagtttgaggacagccagccaagactatttggaagtcctcaaacaaacaaaatttcttcatctatttagtaagcatttatctagtaccagttatggcctaggcaacattctgggagttgagtggacgatatagtgtagtagaggaacaaatagataaaactaacaagccgggtgtggtggcgcatgcctttaatctcagcactcgggaggcagagccaggcggatttccgagtttgaggacagccagagctacacagagaaatcctgtctcgaaaaaccaaaaaaaaaaaaaacccaaaaaaccaaacaactaatagtcataagcaggacactggtatatgtcagtaatcctggatcaggagttcaaaggccagccttgctacatcatgaattctaagcatgcctgggctatacaaaattctatttcacaaacaaaaaccaaattgtaatgtcattcacatgatgcatttcacacttgtaatctaagcacttgagaaaatgaagcaggaggattgccatgagtttgaaaccagtcttgggtacatagtgagttctagggtaggtaatctggacttcagagtgagatcatgtctcaaaagaaaacaaggaggctgtaagatgactcagttattaagagcagttgttgctcctagcagaagacctgggttttgttcctagcatccacatggctacttacaaccacttgtaactgcagttccaggggatccagtgctgccttctgacttctgcaggtgccactcatgtaagcgatgcacaataaatacatatggacaaaacactaaacacaaaataaaacatttttgtaaaagatttattttatgtatataagtacactgtagctgtcttcagacacaccagaaggaggcattggatctgattacagatggttgtgagccaccatgtggttgctggaaattgaactcaggaccttctgaagagcagtcagtgctcttaaccactgagctatctctccagcctccaactttttggttttttagatgtttttgaggcagaatctcaatatatagatcaaataccctggaattcattgtatagttctgactggttttgaaatcaagatcttcagagtgaagattataggtgtgttttaaacccagcacttgagaggcagaggcaggcggatttctgagttcgaggccagcctggtctacaaagtgagttctaggacagccagagctacacagagaaaccctgtcttggaaaaaacaaaacaaaaaaatgattatacttgtgtgcccccatgccttatggggtgatcttttgtttcgattttattattttttagtgtgtggtatgtcactgactatggagctttggctagactggctggctggcaagttccagcaaacctctgggtctctttctctctacctatagcagtaggcacatggggccaggcttagccttaatgtgggtgctgggaatctagactcccgtcctcgtgcttgtgcagcaagtattttacctgtggtctatatctctagcccctagaataaatattctgagaatttggttttatttttattttatgtgaatgagtgttttggctacatgtatgtctgtgcaccatgtgtgtgcctgatttccactgaagtcaaaacaggacatcagagtgcctggaactggttttgagccaccatgtgggttctgggaactgaaccctggtctcctgcaaaagcaagaagtgctcttagcatctcggccatttctctagtccctgaatgtgtatttttaaacacggacaaggaaacctagttccaggcattccaacggcttccttgagatctcggagattgcttgactcacagttttagaatgtacttttccatttgtgtgggattcagagtaggactttccactctttttttctttttttctttttttttgagacagggtttctctgtgtatccctggctgtactggaactcactttgtagaccaggctggcctggaactcagaaatccacctgcctctgcctcctgtgtgctgggattaaaggcgtgcaccaccacacccagcagtaatttccactcttgaatgctgtgtttattctttgtatcatgttgttggctgtatttcagtgttcagggttaggttgagaacttgacttttttgaagtctgtaccttgtcattgtgctattggatcccactcatttttttctggtattgaattgtgtttcttgggttctgtactaaccagttgtctcttctgtaggtgaaatatgccttgatcagtgctcaacgaagtatgatttgccaaggagatatctctaggtatcgggagcaagccaacgatacagcaaactatgggaaggctcgcaggtactttttacctctcaactcatgatgcctctccctgtgtggcattatatgaatcccagcaaggcatctatctggccaattgaggtgcctctcataggggatgtcttacagttgtccttaattggtcccttgtgcttgaccacccaagggctacatctagttaactttctagtctgtgacttaagtagaagtactatggggatggactgggaaagagttgaaaggagttagcatttcattctgtttttctattctagttggtatctgaaggctcagcacattgctcccaagaatgggcgcccctataaccagttggctctactggcagtgtatacggtaagaaatcccgtggataagggagttatttcctaagcagttccttatctttgagctagagtttgtttcactatataccccaggcttcagatttgttatccttgctttagtctcccaagtgcggagatcagatcaaaggcatgttccaccacaccacaaacaagttgcttaagatactcatttaatttgtattattacatttatctctttgttggtttattaaatgtgtgaaggtatgcatgtagagatcagaagactttgagatctgctttctttccatgaacgtctcagagattgtacataaacgggcacctttgcagcaagcacctttacatgctgagcctcttgctagcctctgaatttattcatttacttctttattaatttatttgctttggttggttggttggttagggtgttttttttttgttgttttgttttttgttttgttttgttttgtttttttcgagatagggtttctctgtgtagccctggctgtcctggaactcattttgtagaccaggttggccttgaactcagagatccccctgcctctgcctcccaagtactgggattaatgggtgcaccacaatgtccagctttatttttattctgttactttaaaaaatatggaatgattcattcttgtacagggaccatgctaatgttctctctagtgttccaattttagtgtatgacttaccaaaatgagcactggatttatttatttcctcatttattggttttctttcttttttcttccttccttccttcctttcttttttttttttttttttttgagacaggatttctctatgtagtcctggctgtcctggaactcactctgtagactaggatggcctgcagaaatacacctgcctctgcctcctgtgtgctgggattgaaggtttgcgccactactgccctacactggatttatttatttatttatttaaatttattttatttatgtgagtacactgtcactgtcttcagacataccagaagagggcatcagatcccattacagatggttgtgagccaccatgtggttgctgggaattgaactcaggacctctggaagagcagtcagtgctcttaaccactgagccatctctccaacctctggatttatttttaaacaggtacttattttgtagcccagactgaccttgaagttgcatttctttcaaatactgggctggatatctagcttaaaatagggaattatttttcatatatatatacatacatacatacatacatatacacatacatacatatacacacacacacacacacacacacatatatatatatgaatcagtgttttgcctttttgtgtctgtgctctgtgtgtgtacagtgctctcagacaccagaagaaggtattaaatattctgggactggtgttacaaactggtgaactgccatgtgggtgttgggaattgaaagttggtattctgcaagattagccattactcttaattgatgagccatctttctagccctataaattcaattttgatgacctcaactccaagacttattcttcttatccttgtaggccaaaaaccagacctttcagtctttcattctcaaactccttttgtttctctctccttttttaatgtctatgtatttattgtgtaatgtgtgtatgcacatgtgcattcatgccagcccctgtttgaatatgaggatcacaggacaacttgaagtaatgctttctctcctaccaccgtgtgggttcaaaggtttaaatttgggtcattacggttggtggcaagtgttatccactgagctatctcttcagaccctgcttctgttacactgaggtgagttgtcaggggacccacacttcggttgccttaattcataccttcacttggctgcatttagttttcctaattctccagcaaacaacagtttgttactctgcatcttgtttccttttcttcccctaggctactctagaaagaaggtaagagccctttacctctctcccttaagggtttccctcagccctcagcattcagatcttctttccccagatgtcttgtcttttttttttttttttaagatttttatttatttattatatgtaagtacactgtagctgtcttcagacactccagaagagggagtcagatctcattacggatggttgtgagccaccatgtggttgctgggatttgaactcaggacctttggaagagcagttgggtgctcttacccactgagccatctcaccagccctcttttttttttttttttaaagatttatttattttatgtatatgagtacactgtagctgtacagataaggttgtgagccttcatgtggttgttgggaattgaatttaggacctctgcttgctctggtcgatcctgctcactctggcccaaaggtttatttattataagcaagtacactgtagctgtcttcagatgcaccagaagaggtcattagatctcattacaggtggttgtgagccaccatgtggttactggtatttgaactcaagaccttcggaagagcagtcagtgctcttacccgctgagccatctcgccagcccctcagatgtctttttttgagacagagtctcattgagtagctctagactagtaggtgctctggctggctgggaactcaatttatagaccaggttagctccaaactcagagactgccttcccaatgctggattaaaggctgagccaccatgctgtgcttgcccaggtctcttgatactccttttttgtctaaagtggctacttatcagatacacagcaaacatttgatcaaacctctctagatttcaccaactccttttgaatgtggttctaatcagaagaaatgggccttgggaactgagaggactctaggctggaagctgaaagaagagaaaaagatgtaggtggggcagtcgtagttactaaggtatcaagaataagaaacagctaatgtgattatcagcaaagagaagagtcagtccatctctcccttccttctctgtctctcctgcctccacctcctttctgcctaattttctgtctttttcttttcttgacaggattttgctgtattgcttaggctgttagtcctttcctaagcctctcaagtgctgggattgcaagccatataccactgtaccaggctattgtatttgtttttgtgttggctttgttgttgttattaaacagggtttcacataaaccaggctagccatgaacttgccatatagctgaggatgacactaactccagtcttctgcctctgctttcccagtgctgtgattacaggcatgtgttcccatgcccattttttatctggtgctacagatcaaacccagggctttttgcatgataaataaataagtacctaccaactaaactgtatccagcccctatgacggatgcttaacagcttctaaaatcattgtccaagcacacaatatttgaattttatttatattctcctcttgttcataatagagtttttaaagatttatttattattatatctaagtacactgtagctgtcatcagacacaccagaggagggcatcagatctcattacagatggttgtgagtcaccatgtggttgctaggatttgaactcaggaccttcagaagagcagtaggtgctcttaaccactgagccatctctccagctcataatagagtttttaaaaagaaaattttgcttatggattaaaatagttgattaaatgtattaacatttactgaagcagctcttcttcttcttttttttttttttccccttcagttttttgagacagggtttctctgtgtagccctggctgtactggaactcactctgtagaccaggctggcctgaactcagaaatccacctgcctctgcctcccaagtgctgggattaaaggtgtgcaccaccactgccctgctgaagctcctctttaacctatagagtcatctttttgagtcatcttttagggatcaaaccaacttctcattcttttttgttttctggtgattaaaaaaaaatactttatttgcctgtgtgtatgtatagtgcatttgtgattcgtttgtgttatggaggtagagaacaacctttgggagttagttctattcctccatcctgttgagaaaggatctctcttgtttctgcaagccaatccacaggcttctgggtacttcagctcatgtctcccatctcactgaaattagagatgaatgccactccattgtggtttttgtaaattttagagatcaaacacaggttatcaggctatgtggtgagtacttttacctactgagccattttatcagccccttttttggtgtgggttcttgttttgttttgttttttgagacaggttctcactttgagcccagactggcctgaaaatcactatgtggtctaggctgaccttgatttgaggcagtattcctgcttctgtggtgcttacaattgtggatttgaacctctgtgccaaaccttttgtctgttggctcctcttttcaactagtccaccttctgttttcataaattatttttgttttgtttttgtgatgcattgagtttctttagggttgtttacaagaacatggctatcttttttttttttttttttttttttttttggttttttgagacagggtttctctgtgtagccctggctgtcctggaactcactctgtagaccaggctgtcctggaactcagaaatccacctgcctctgtctcccaagtgctgggattaaaggcgtgcgccaccactacccagctgaacatggctatcttacaaatgtctaatctgaaaaaagtccccatctactaactgcatgtaaatccttgggaaattgccttataaatggtaggacaacattcttccattaaactgtgtatacctaatcttttaaatactttaaattcttttttatgtgctcattggccatttacattttattagagaaatgtctgttgaaataatttgtcatctgaaaattgagttaatcaggctggagaaatggctctgtggttaagagtagtggctgcttttctacaagacccaggttcaattcccaaacccatataacagctcagagccatctgtaattgcagttccagagaatctgaagtcctcttatgtcatccatggatactaggcacatgatacacaggtacatatgcaggcaaaacacccatacaaataaaataaaacttggtgatatttaaggtcttagacataatgagaagcacccgaagggaagaaggatttattttgactcgtagtcgagggtatagcccagagaaggtatggcatgcattgcttacctcctacccccagtcaggggcacaggaggatgaatgttggtacttggctggtttgatcctttttacgtttggtttggggacacttttacccccttccacggaatgttgccacctacatacaggctggttcttaccgcggttaaacgtggcaggacacatcctcacagatgtaaccagacgttattctaaatctcatcaagttgacagcaagattaaccattaacatgtcctttcagggccttgcacgggtattcttttacagagctacatttccgttgttaaagacactattcaaaaaaaaaaaaaagacactattctattttcttatagtattgttaggactttttgtaggcagagcagcctttgagacagggcctcatgtatcccagttggcctgcaacttagcatttaactgaggatgattttgaatgttttatccttttgtctcctttcccaggtctgagattacaagggttttaacacaggttgaaaactaactgatgcatggctttatttctaaattgtcagctctttctaatgttccatgtctgctttatgccagtacagctcctttatctgttgtaggtctgataaaagtatgaaaacgatagccttctagtgcttctctttcgagattgtttttactgtgtggggtttcttagagttttgtatggattttaggactagctttttgtatttgtattcaatttgtgtttttactatagcagtcattagaattttggttaagtaatgaactaataggtttctttgggaagctcttttatctcctaacagcctaacaagatgcatctttgtttacttaggtctttaaaattgtttagcactgttttttagtattctttagagtatagttatcagccttcttccttgattaaatttattcctaaacagataatttttcctgatactgttgataaaaaaattatgtgccctccacttcctttccagattacttgttgctcagcatctttgccacacttcctgcgtgggctctgccattctggtcagattgttgtttttcttttttctttttctttttaaaatctatttatttatttatttatttatttatttatttatttatttattatatgtaagtacactgtagctgtcctcagacactccagaagagggagtcagatctcattacagatggttgtgagccaccatgtggttgctgggatttgaactcctgaccttcggaagaacagtcgggtactcttacccactgagccatctcaccagcccgattgttgtttttctttcagagacttgggacccagatcagtgagcgctccctttgagttttttcttcctttgttttgctcacattttcaccgtctcttaaacgttttcaacttttgtctcgtccaatcagttactcagtgagcttcatgtgttcagaacatgcttgtgtgtaatgcttttcagggtgctgtgagtgataacatagatgatgtggtttcttccttaaaacaaacttcatttattgttagatacacaactattttgtgtccaacttaaaaaaaatactgcaaattaagctacatttggcaagggacaagagagatggtcttgagcagtggttctcaaccttcctaatctttgaccctttaatacagttccccatgttgtagtgactttcccaaccacaaaattattttcactgttacttcataactaattttgttactgttacgaatcacaaaatatgttatgcacgatatctgatatgcaaccccagtgaaagggtcgttagacttccaaaggggtcatgactcaaaggttgaaagaagggaaacaaagtcagtatgccacagagatagggtttttttgagataagatcttgtttgtttttgaggtagtgtttctctgtgtagccttggctgtcttgaaccagactctctagaccaggttggctttgactcagagatccaaatatgtctgccttcctagtgctgggattaaaggtgtgtgccaccatagctctgtaagatgatcttatgtagggctggagagatggctcagtggttaagagcacggactgctcttccagaggtcctgagttcaaatcccagcaaccacatggtggctcacaaccatctgtaatgagatctgatgccctcttctggggtgtctgaagacagctacagtgtacttacatataataataataataataataataataataataataataataaatgatcttatgtagcccaagctagtcttgaagtttctatgtagtcatagatgatcctggacaattctgatcttcccaaattcttggcatctgggtcactattttcagccacagttgtagatattgatttcaagttgtatctcagttttaaaaatgcttaaatgtaaaaggtagagttgataaaatagtttgaaatgaagtgaattggtgtaagcagagattagtatgaattgggatgatactatctgaatagtatctgaatataattttgtttcagatatgctggctatctgtatgaattatggaatttcatattcacaggaactacatgtgtgcagatattagtaatttgcaaataaggagacctctcttggtaaaccatatttaataaatatggaccaaattcaaactcagacatttgaccttaaaacctgggtcaatagccatagctaggtaaatattaggttacaaactttgaagagtgaacagatgttgagagaaaagatttttttagtgttttgagacattactggggcacagtgaacatgtatatgatgtaggagagacactacaatgccctgctattctcctttgcgctttcactgttgtcagcttgcctgcctgtctgcatattgtccttctttctatccatctgtctgtcctctacatctcttactacattccttccaggtggaactgaatccagaaactctgtcctgagctatactctgagccactcccactgcctgttctctgaagtgtatatggtctgggtatgataccagggctagccttgagcaactgggcttaatgagtcctcaatttctgcatctagagtggctgggatataggtccatgctgctatgctcagctttctttattctttttttttttttggatgatacgctctctctatatagatagctcttgcctgtcctggaatttgttatataggctaggctggtcacagttcatagtgtcatagtgatccacctgtctctgctgggattaaaaacatgtgccacccacttggcagcttcctttattcttttcctcataaaatagtcacaaagtgttaatatgataaatttatttaataatgtccatagaatattcagtatacctagacagtaaacaactggcctcattaaatacagctaagctcaaggcaagtgatcactatcacatcataggtaataggtactatttctaaatctaaagatactcttcaaggatactaatattcctgtattaaaagtgagcatgggccagcagagtggctccacagataacagtttacctgccagcctgattacctaaattcagtccttaggaacgacatggtggaaggatagaactgactcctgaaaattgtctctgacctccacacatatactaaagcatatacttgtggcttaggcatgtcccctaccccagtaaagaaatatatagaataacatttttttcaggttgggcatgttggctcatgcctttaatcccagtacccaggaggcagaggcaggctgatctatgtgacttcgaggccagccagggctacatagttagaccctgtcttaaaaaaaacaaaataaaaaaaaagaggataggagatcttaggaaaattgttacctaaagtctcagtcaaatcctggatgagctagtgtttgaatctgggtctgtctagttgaggatttcattatagcatactgagtaatgaatgacaatagccaatgtgaagagagttggacattctctaaaaaacaaaacataattgcgtttatattttaagggatttctttgttctcttttcttccatatgaatatttgattcttagagtacctctgcatataagatgaagaaccatactggccgtggaaacctccctggtgtgattaccttagctttttgagtggattgctttctgcttcttgctggagtcctttacagttggagggacagggcaggagagataaagtgtttcttgtatcagctgggtattctggtgtcagaaagaaagctgagcttggccaggtggtacaagtggatatccagctactgggtcacaagttcaaggcctgcttggattacagaagttcctggctaccagattgatagtttagtgagaccctgcctcaaagtaaactttttaaaaagactaggactatagttcatggtagggcatatgcatcgtatgtacattgtatgtacacattcctaagttcaatcaccagtactttttttataaaagggagaaaaatgggctggagagatggctcagtggttaagagcaccgactgctcttccagaggtcctgagttcaaatcccagcaaccacttggtggctcataaccatctctaatgaactcttaactccctcttctggagtgtctgaagatagctacagtgtacttacatatagtaaataaataaatctaaaaaaaaaatttttttaaagggagaaaaaaaacctaaccaaccaaccaaccaaccaaccaaaacaaaacagttgaccaagtatctcttctttctacagaggaggaagcttgatgctgtatattactatatgcgcagtttagcagccagcaaccctatcctgactgccaaggagagtctcatgagtttatttgaagagactaaacgaaaggtaagtaagagtgcacgtgggcttatccttcctaggagaatgcatgtcctctgggctgaagtgtgaggagatgatgaaacacatcttcacatagaccctctgggcttcactgacgggttatcagttggcccctgcaaagaacggatattgaaatcaatcttcaggagggcttgcagggcctttagagcgtacctgttccacagcacctagttcacagaattaatgatctatatggcagcagaggtggtctctgctactttggtactgtagcagaatccttagatttttatagtctttagcctgcagacacagatgatagaggaatttttcattggctgactgggagagtctgagcttgtgtgtctgttgtataggctgaacagatggaaaagaagcagcatgaggaatttgatatgagccctgataagtggcgaaaaggaaagaagtctactttccggcatgttggggatgacactactcgcctggagatttggattcatccatcacattctcggtctgcccagggcactgagtctgggaaggattctgagcaggagaatggtctgggcagcctgagtcccagtgatgtaagttcctgagaatgatgcagtgagccagactagagtctggctgcctcaggtcgtgcaagctggggctgaggcatagacaggtcccagctttaagacatttatcgatttatttaaagaaaaaggatcttgttctctataccgggtaagcctggaacttacggtgtagcccagactggcctctaacttgtgacaatcctcttatctgacttgctcatataggggtgagccaccatgcctagcacccccacttactctggagagtacgacccactaactttaggttcccttatgcctccttggttctcacagatccctttatctttggcatgtgcttcccttatttaccactatgtggcactgtagaatttagtaaatgtagagttagaaattgttttactgttttgagttgggcatcaccaatttgtatgagaatttgctgagattttgtactttgctgagataatgtatttaatcttgaatagctttctatttggagtatgaactaaagcaacatgggtaggatgattaatctgttttgtgatttattatttatttatttagatttgtttattttttatgcatgaatgttttgcttgcattatgtatatgcactacataagagtctatggagggggtcagatggggtcagatcccttgttatctggagttaaagaggtttttgagccaatgtataggtgctgggaattgcaagaatagccattgctcttaccctctgagccatctcaccatctccaagccttttatgaggtaacctcttatgacttagagtgtgccaggctaatgattcagaaaatagcatcttcccttgttttcaaggtagcattttaatagagtgagcaggtagttaggcttaagtgtgctggactttgtttaggggtatgtacctgattttctgcgatcacagtagtcatttgtcagtttaagtgtgaagaatgaatggaagtttagctagagaggaaggaagtagaatggactagccatctcagattccggagcttagggagaaagaacatgggaaaaaaggttcagtgacaggaattcaaattagttatagaaggatttgaatcaataagtggtttcagagatggaaagatatgtgtccaaagagcttggttagatggggggagctcagagagaagagagtcaagagtagcacctaggtttctggtttagaaattgaaggggtggcgctagagagatgactcagaggttaagggcactgactgctcttctgaaggtccttagttcaaatcccagtaaccacatggtggctcacaaccatccataatgagatctgactccctcttctggtgcatctgaagacagctagagtgtacttacatataataaataaatcttaaaaaaaaaaaaaaaagaaagaaagaaagaaattgaaggggtattgccaagtgaccatacctgtaagccttgtccttgggcagctgtgcagggggattaagcacaaatataaggctatactgttacctagtaagttctaggctattatgagctattgtatgagatcctctcaaacaacattaacaacaaaaccctacaggactgttcccctaagcaaaacaaaaccaagtagttagtggtcagtttcataaggtggactataatggtagaccaagttttagggcaatgataatgagtttaattttagagctgttgcatttgtcattgtgtaggacattgaagtaatgatactcagatgataacaggtgactgaaattgaggagagtggtttggatcaaggaatatttcttgtttgggggctggagatggaatccaagggtatgtgcttggtaggcaaatactatctattattaaactgcattcctagtcctgaaagggactaattttgaaagcatcttgctagataataatgataccatgagagttgaatcatttcttccaagttaagaacagatagttggcatgatggctcagtgggtaaaggtgcctagagcccaatcttgtaatttgagtttgattcctgggacccacatagtggaaggagagaactgaccctcattagttgtcttcagacgtccacacatgtatcatggtgtacattcattcattcattttcttttttttattgtttttgagacagcatctcatactgtagccccctggcctttaattcatgacaacccttctgcctctgacttctgggtaccaaattacaggtatgagttattatgtctaattcttttgggtttaatttaaaatttccatttgtcttcctatttccttcctattctgtaactgtctttgtggatgacttgggaagtaataattgataatgaaacctcccacttctggtgtgtgccttagtgtacatgggggccccgtgtgttaatgtgtgttctagcaatttgttttgattcctgcagttagtatccctcactgttgctttggctgctttggatattacagtctaaactgaaagcctgtttaactaacaaacatgttgtctttctgggtaggactatattgtttaatttttttcactttatttattattgtgtctatatgtatccatacaagatatctgtgggcccacataccatggccttcaaatggcagtcagggcaaattgtggactcagttctctcttcccacccacccttaggtgggttccaggaattaaaaccagcttgcacagcaaggccctttactcactgagccatcccaccagctctcaagtatttttaaaatgaaagcaaaagacagtttgaaaaaagattttgtggctttctttgatttttggcctcataattgggggacatatcttatacagatataactaatcttttgtagaaatgtcttttgtttggtagaacacttacctacatacatagtcacttacttgaaactcagttctgccactgaaaatgaggagtagtagttatgcaactctggttttataatgtacgtctcagtgaataaatcttcagcaagtaagctgtcacggattctattgctttattagtctttatgtgtgtatatttatgcaaggtgtctgtacgtgtctgtgtctgagtctgtgtgcttgagtgtaccctgagaaggtgtctttctagcatgctttgccttgttccattgaggcagggtttcttgctgaacctggagctcatattattcatcaaagctgatgggcagtcaactccagtgagcctcctgtctctgcttctctcagtgccagggctgtgggcacgtgtggggtcacacctgacctttacatgcatgcatgctgcacagcagtgtctgtagccacagagccctctttcctgtccatttagagtgtgcatatgcatggtgcatgtgtggtcagaagagaaactctgggagtcagttcttttcaccatgtggtgcctgggactgaatttgggttgtcaggcttgatggcaagcatatttacccagtgaaccatctcatttgccctaattttacttagttttcatgtgtgtgtactcatgccgtggttagcttgtggaggtcataggtcaacttctaagagttggccctcaacttctgctttgttgaggcagtctctgtcacttttttttttaagatttatttattttatttatatgagtacactgtagctgtcttcacacacatcagaagagggcatcagatcccattacagatggttgtgagaaccatgtggttgctgggaattgaactcgggacccctggaagagcagtcggtactcttaaccgctgagccatctctctagcccccgtccctgtcactcttttctgccaaggcatagtatactccaggctaactttttcaagcttccagacatttcttctgcctttgtatcctatgtcataatattagtgctaggactgcagatgtgtaccaccacataggcttaaatattttaaatttttaaatttgtataataaattatatgtatcagatcagagaacaacctgcgtgagttagttctcttcttcaactatttatttaggatacaggaatttaaatcttttttttttccctttggttttttgagataaggtttctctgtatagccctagctgtcctggaacttactctgtagaccaggctggcctcaaactcagaaatccttctgcctctgcctcccaagtgctgggattaaaggaatgcaccaccaccgcccggcaggaatttaattcttgttgtcagacttggcagcaagccgttttaccctctgaaccatcttgtcagccttgaacttttgatcctcctgtctttgcatctcaagtataggcaacagatgtgggccaccacttccagtgtttaaatagtgcttgggatcatacttggagcattgtacattataggcaagcattctgcccacaaagctatgctcctagccttttgtttttatagagtatcatagcttagactgacctcaaactccttatgtagataagcatgatattcaactcctatacatcttgagttgctggcattatagtcataactaccacatccagctgttagttatattaatagggtgggtgtgtatatgggtgtttctaggattgaacccaggtccttgagcatgctagacaaatattttactactgagctacatcccaaggcccaattcttttaattattccaatacatgagtatattccaaagtaaaaaattcaaataattgcaggaatacatagaataaaatgtgacagttgtgtagctatttttctggttttagcctatatgttatcctcagtaaacaatttttaaaattattattatttttgtttttttgttttgttttgtttttcgagacagggtttctctgcatagccctggctgtcctggaactcactctgtagaccaggctggcctcaaactcagaaatcctcctgcctctgcctcccaagtgctgggattaaaggtgtgcgccaccatcgcccggctattactattttttaaaaaattttttttattagatattttcttcatttacatttcaaatcctatcctgaaagtcccctataacctcccctaccctgttccccaacccacccattcctgcttcctggcattctcctgtcctggggcatatgatcttcccaagatcaagggcctctcctccctttgatggttgactaggccatcctctgctacatatgcagctagagacacagttctgtgggggtgctgtttagttcatattgttgttccttctatagggttgctgacccctttagctccttgggtattttctctagctccctctttagggccctgtgttccatcttatagatcattgtgagcatccacttctgtatttgccaggcactgacatagcctcacaagagatagctatatcagggtcctgtcagcaaaatcttgctggcatatgcaatagtgtctgggtttggtggttgtttatgggatggctccccgggtggggcagtctctggatggtccttccttccatctcagctccgaactttaggatatcatcctgagtgaggtaacccaattacaaaagaacagaaattatatgcactcactgataagtggatattaacccagaaacttagactacttaagatacaatttgtaaaacatatgaaactcaagaagaaggaagatcaaagtgtggatacttcgttctttcttagaatggggaacaaaatacccatggaaattatttttttaagatttatttattctatttacacgagtacactgtagctgtcttcagacacaccaaaagaggatgttggatcccattgcagatggttgtgagccaccatgtggttgctggaatttgaactcaggacttttgaaagaacagtctgtgctcttaaccactgagccccctaccatatgttcttaatttgggtatatattttattacaaatttttgtattttgtttgttttttgagacaaaatgtaaccctgggctgccctggaacttgctttgcaccaagctgacctgaactcagatctatctgccttccctgcctccccagtgttgggattaaatgcttgcctcactgtgccctgccatatgtcatatatttaacttatatcatgtcaatttttttctgtgcattggtcgttcatattagctgttcagttttgaatattagaagccctaataggatagtctcctttgatcatttctagaatttccagcataaatgattagaaattcatgaataaacaggaagttttgtcgcccgagctagtatctcgccggcaagaattcacttggtcaaccggatccttctacggcaaagcttttattgcttacttctcaggaagaccccaccccggaaaatggcgttgcttatatagccctcagccatggcgtttcagcacctgatgtggcgtgtcagctcctgattcgttgcttgcccatcaccccattactatgccctgagatgggcagtgactaggcgtgagttcactcttgcacctgcgtacaaggcttgtttactagttaggcacagcagaggccagcgccatcttataatggcgattgctagcggcacggctctccacaaagtttgacttactgtggttattagtaatgataatgatgtcccaaccagtttgttctgagtctgccaggtgtgggctttgattttctcctctctgaatggttgagggagggttaggttgtgggttgttgtttttaagtcttgagacatggtgtgggttgaacattcagcttggcaggacggccaatacaagtggtgtcctgttaagagtcccatttaaaatcctattaaaaacccctctgccaagtaaactgttgagtcggtgttaagagagctctgggcatttgtggccgctcttcctgtgctgtctcaggctatagagtacttactatctgaacagtggattgttgctatcagtgaattaatcaaggacattaaattacagcaccagaaataattttcatacttaaaggcaaaggtctgtgatgcaactgttaagatataaaacaaaaacaacctttttcagatttatttactttttaagattttttttttgtatgtgtatgaatgttttgcctgcatatatgtgtatacctcatgcattcctggtgtctgaggaagtcagaagaggatgtcagatcatctgggactggaattacagagaggtgtgactcaccttgtggatgctgggaattgaacccagatcctctataagagcaacaagtgcttttaaccactgaactgattctccagcaccacccccacccttttctttttattaggttgtgtgatactatgttttttattggctattttatttatttacatttcaaatgttgttcccttcccagtctcccacctccacaaacctcccaccctatctcccccttccctccagccccattttttgaatcatctggttcctctgagtttagcatcctgtatagaccatagtacctgttatgtgtatgggaggaagaagtgctgatacagtttgtccctgaaattttagtagcctgtgctccacaaccatctaccctgtctactgttcccagttttttccccatacacgagtgtggaggtcagaggatagcttggtggagtttgttctgttcttccacctctctgtggatcccagggttgtccttactggctgagacatctggtcagccccagttttggtgttttgttctgttatgtttttgttattgtttgttttgagacagtgtctcactatatagaccaggctgacttggaactcttgggagatcctcttgcccctacctcccaattgttagaatcaaagttctgtgctcttaagccaagttcggtgctgttatttttcagactggtttgtatctagttgtgtgaatcagtaaactttgcccatggaaggctacataaatgttgtaggctttgtagctctcgtctcttgttactatgcctttgtggtgttatatgaacatggttgtggtgcagtaaaactttattggctaagacaggtgatgatgggctaggttgatttgactttaggcctagtttggcatcttctcctctgatggaccagcatccaggtttcagtgtgtagatagatgttttgtttttgagacagtagaatgccatgtggactggcttcaaacttgccttgtagatctcctaatttgcctgtttccacctactgagtcctgagattaaaagatgtgtgccaccattcctggcttgtaggtgattcttgttatttggataaatatggtctatagatgaatcacagctgtcttgcacttaggaacactagataccgttatgcctatggtcattttaaacaggaaaataactaacagaaagcaaacaaaacaaaacaaacaaaaccaaaaaaacaaataaccaaaacaacaacaacaaaaatgtggaagctaaggcagaggcaggtggatttctgagttcgagaccagcctggtatacaagtatacaaagtgagttccaggacagccagggctatacagaaaaaccctgtcttgaaaaaaaaatatgtggaagctaaggtgctagttagaaacaaagggcacatatttaaattaaattctgaaacctgaggtcaaagaattgcctccttagtcctagctgagaacatatatggagttaatcacatttgctctgttttatacatgtctcggatgactacaaaaccacctcaagtcctgctggcagtagagagaggtgacctttggtctagacctggcagacatggtttgggtgtacaaagggaagtggaatccaaaggcttctggaagaacttaaccaggcagactcaaaaaggatattccaggaacagaaaccacagaaggtgtggcacagcagggacagaaaccacagcaggtgtggcacagcagggcctgcaggtttacttgcctctgctcagttgagggcagtgtgaaatgtgggaatggtggggctgaggctgagccttctcctacagccctgttctcagttggtgctgtggtattgtgggaggaagtcaatgggctgaggtgtcacttttgtcactgtgaaaaatacctgaacctgagagaactaaagggagggaagattttttggtcatggtttttgaggtttcagcttctagttagttggctggaatcattgctttgggccgagtgagaccaggtagagtatcatggccagagcacaaagcagatctgccctcacctcactgtgggtggccagggtttagagggaaagatgcctgtgttagctggcttcctcttcctctctcatttatctgtctaacagtgctgtctactctcagggcaatttctcctccttagctaatcctctgtgtgcccatgtgccacccagaaatgtacattagtgatctacaggatcaagtgacaggaccaaccatcatagctggtctcccctaatatttctggattctggaaatgtttctcaagtttgttgtttacttgtcatgtccgcattgttgatcccatgaaatttgcatgtcattcattaaatttcatgggttggatgcagtctgagtcttttttttttttttttttttttttttgggttttcgagacagggtttctctgtgtagccctggctgtcctggaactcactctgtagaccaggctggcctcgaactcagaaatccgcctgcctctgcctcccaagggctgggattaaaggcgtgcaccaccacgcccggctagagtcttctttatcgcagtttaatggttgatgacagtgaagggccattctttttttcttttttttttcccactgttgctgtcttcagacacatcagaagagggtatcagatcccattacatatagttgtgagccactgtgtagttgctgggaattgaacccaggtcctctggaagagcagtcagtgctcttaaccactgaaccatctctccagcccataagggccactcttacacaaagttttctggtctggacaggtctggtctgatctggtctggtctggtttggtttggtttgagacagggtctctattgctctgacaggcttagaacaacatcctatgtaaaccaggctgaacacacatagtgtgttctgctcttccacaaagttgggattaaaggagagcacaccacagctagcctgacaaaagttttctgaatttaaacataacttgtatctttttctgccaattgttcaagaaagttgccaatagcttggaattattaggacaaagcttttttccccctcattaagatttttgttgttgttttaaatttttttaaggttatgagccaggcctggtggctcccatctctaatccttgtaaactcaggaggctcaggcaacagtaaggtcactgcagtgttgaggtcagcctggttacagtgtgatgcctctttcacaaaacaaccccccccccccaaactcccaaaccaagtcagtaaatgaatgttgtggatgataattttttttttttttccgagacagggtttctctgtgtagccctgttggctgtcctggaacttactttgtagaccaggctggcctcgaactcagaaatcggcctacctctgcctcctgagtgctgggattaaaggtgtgcaccaccactgccctgcccagcgtggatcataaattttaaccacccagagggaaccattatttttatttatttgtttacttgcttatttgtttgttttgtttttggagacagggtttctctttggatccccagcggtcctggaactcatcctatagactagactggccttgaaactcataaagatctgtctgcccctgccttctaattgctgggattaaaagctaccattgctgggagagaaccattatttttaaaagttattttaagttatgtatctgtctctgttgttcctatgtgtacatgaatataggtgcctgtctaggccaaaagaggatgttggatcccctggagctggagttacaggaagttgtgagctgcctaacatgggtactagtaattgaacccatgtcctctggtagatcaagcaagctcttttaactttgaaccaaatctccagtcccccatgcctaaatgttaacagtctgattgggaaactggtattcccatttccttagattggcccagttatcacttttttccagctttatcaagcagaagtataaagtgccacagttaatgttccgggggaagagcatccttcctgtcatggaagagaaacttctccagccacacaataggaaagcataagtccaggcaaggtcagccatataagaggtcagttgtcatagaaggttatgtactgtgattcatagctgtaatccaactgtttaggaggattcttcttagtgtgaggtaagctggagtatgtacatagcgtaaaatctcactcaacgtaaaattaaaatgcttgccttgcatattgatagaaaacagttgagttttatttgcctatctcatgaggaagcatcttgaactaacatagtattataattagtatgacatggattaatttgaggcctgttctgcatgactctggctttggtttggaagctgggttctaagtggagaggagacctctttagactcctacagagttctgacctccatttgtttgcttttgatgcttagtccaaaccagttgcgagtcagaggccttgtctcctaaccatgtgctttattgctgagctgacccagctgccttaatctcttaaaatatcttaatcaaaatgtatggcttctgtagtacatagactaaaattggagtgatgctgagattagcatgatgcctgtgcaaatataccaatttcatgaatttcataatataattttaatattgtggcttttaagtctttcagaatttcattcatgtgtgcaacatattttgactatattctccctctattctctttctccaagtcccagggttcctcccagggttctccctttatatctccccccaatttcatgtcttctttttttaattttattgagtctaattagtactacccataggtgcatagctgtgagctatctattggtgaatagaccaccagccacagtcccaaagaactctcccagtagccacagttccatatttattaaaataagtaagtaggtaatatattatatatacatatacaatttttagtcaccttcctttctcctcctcttgttatcactaaacttgggagagctttctgtgaataatttctttcaaatcaagtgtatctctcaagagcctggttttttagtaactttgattaattttctttagtatcttacatgtcaaagtcaggtaatatagaggttatttaagagtctgggctttgaaaatctctgattttaagtcctaattttattagctgttatctctgaggtctgaggcccagtccataactggctgaacttcagcctcctcatctgaaacatggcagtaatgataatgtcacttcccaaggtttgaaagtaatagtttttgcttgaaaatttgcggatctggcttggatgttttgtgctttttaaagaaccagccatagtacagagttctgaatttattttctttctttctttctctctttctctctttctttctttctttctttctttctttctttctttctttctttctttctttctttctttctttctcttttttgttttttgagacagggtttctctgtgtagccctggccgtcctggaactcactctgtagaccaggctggcctcgaactcagaaatcctctgcctcccaaatgctgggattaaaggtgtgggccaccatgcctggctgaattttcttgtttttaaatttttaaaaaattatacagatgacattttttcttcagacccatcatttctctcacttttcagtgtcccttgtacagttgtgtgctaaactgctgctgccgctgctgccactgccataatgttaaagaaagctgctgtgtgggtggcacacaggcattgccctccccctcccagccacccaggacaactataggtcagagccttaggtttgaagcctggtcatatggtacatcaggtcatatggtacattttggagtgcattctagttgttgggcatagatcatggtaaattaagtttgcagtttcagaactcctgtcaggatgaaggagcagaaccagtgtttaccctcatttcctctggacagtgtagaatgttagagaaaaatttcatctctgggtttgctagtaagcagatgtttcatgtctgataacccagtttctttgttgctctgtaattatgtgatcctggtagagaaagacgaattgttggtttcctgggtgtaaggattgcatgtttggttggctttggtccttttgtttgttttgttttattttcatcagggttgccgtgagttgatttcatgtcagttcccatttcacttttctagtttgtagtgtgaacctcatgttctactccttcacctcagaatcaagttttaaagttgcttcatgagtggagattaggcaataagcctgcgagagttcatggcagcctccttcctataggacaaggctgcaggttggctctgcttttcataggctctaggaacagttcagctagactgctgttaaagttataagcaggattggaggttttcaaaggatataaactgctttgtgtggagcagctcctaacaaatcaggcctaaaggcagcctcctagactgttggactgtggggctgaggtctttgtttctgtggttgactgcagtgaagtttctcagagcatactggccctaccttcagacctgtggcagcccttatgacctcggtcaccaaaccacttcagggctttatttttatcctggcctttggttttaagataggaggttggtttttttcctctaaagttctctggggaagaaacagtgccagggtgcagtagaggctggttaaacaccaaaaccacactcttcgtgtttctgggcttgagacgtgacataagctgtgccacaaacaccagcttccacgctatgaagaagcttccgttcattcgcttgttttgtacttttagacaagtaaaatggtgtaggaggcaaatgtgccccttcccagacaccactagatagaatgctaagaggggacattttaaaaatccagcattttccaactttagttttttcatcttctccaagggtaatggtgagaactctcacaacttactaggtctcaggaagccagattaccaacatatcctgttcgcgtgcatgtgtgtgttctgttacccacaggccactttccaccccacatgaccttcagttaccatccggaaagtcggacccagataccagtcagaatttccaagctttggtttaatttagacattttagaaatagtaatgacagtaattgtaaagagaagtcacttgagtaacatacagaacaagtataaacaatacatcctgaaggaggaaggagtgaggtggtgcgcttttccagtaatgtgcttaaaagttagcattcaggccgggtggtacgcacgcctttaatcccagcactcgggaggcagaggcaggcggatttctaagttcgaggccagcctggtctacagagtgagttccaggacagccagggctacatagagaaaccctgtctcgaaaaccaaaaaaaaaaaaaaaaagaataaaagaaaaaaaaagcattcagaagaaaacatgaagcagctaaaatgttcagaggaagagaaagtaatcagagaacaatttggttacaaatcaaacacatttttaaattttggggtcttaatttaaattacttttttatttttccatttcgtgtgtgtgtgtgctcgcgtgcctatggaggtccaagaacatcttctgggagttggtctctctttttgtcacgtgggtcccagggattgaactcaggttgtcaggcttagggcaagcctttgtctgctaacctgtcttcccagccccaattcttaggtatttaaacttttgttatttaaaaagtatttttagagatttaaaaaaattatttgtagttgtgcatatatgggtatggatatatatatatatatatatatatatatgtatatatatatatattatatatatacatatatgtacacacacacacacacacacacacacacacacacacgatgagtccagatgctggcgaggccaagaggtatcaacgatcctggaactggaggtgtaggaagttattaactgccaaatatgggtgctgggaaccaaatttgggtcttaacatctgagccatttctctagtcccattaaatatttttaaatgaattttatgtgtatgggcattttgtttgaatggccagaatagggcatcagagtgtctggaactggaattacacactcgtgtgagccaccaagtggatgataggatctaaacctaggttgtcaatagccagtagtcttaagtgtgaaaccagttattatatatattattgacagatcatggtcacacatgcctttaattttgccaatacagaggcagaagcaggcagatctttatgagttcaaggccagcctggtctttgtatcaagttccaggccatccaagtatacacgatgagaccctgtttcaacaaagaaatacacattatattatgtatattattttatcgaagttgttcataacatagtactatactttattttacttttttaaagattatttgaacacagagatctgccaccatgcccaacacatctttattattaatttgtatgtgtgagtagcataggggtgtgtgtttgtgtgtgtgtatttgcaagggtgctacttgtcctgccactttccatcttaatcttttatggtttctctgtaaacatgaagcccatattttattagtcagcaagccctagtgccctcctgttttctttctttctatcacttgggctacagacatttacaggctcatgctcagcatgttatgtgggtacagacatgagtgtgacctttggtccttagactttacaggaaacacttttacccagtgagtcttctcttatctcattgcttgatccagatgaagttgtttatgctgtccatgctagttttaaattagtttaaaattcaggcttcccccaaccaccaattctttcctcactgtcctagaagctgggagggatcaaagcagttaaggttgagggccttcttataagacactgctaatgaaggttttcgcactcttgtgatcacataatcctgtgtgtttgccacttcaggatccatatcattcctggcactaccagctaagtgccattagtgatcccctcatattttcaaacactctctgggaggaagagtgctattccacttaagaattatgaatttgggggcttgatgatattaaaaaaaaacaaaacccaccttgttagatttcttccatcatttcctcttagagaaactgccttgtggtttgatcttcatagaataagtcaacaatagggagaattagagtatctggtagaaaagggaacatgcctagtagagttttaaggaaaccatttattgagtgcattgtccagttgcctattttagagtcagtgagactgatttataacttatgaaaagtttgttttgatgttactcatactttaaaaagcttgttcctctctatgtgagaagttgctgtctttggccttagtgtccagatgatgttgaagattgtgggaatttgtatggtatatttgagagagttgttcaaagccaatgtaaagatatagttttggcatctcatgaataacctgatatcctgacttaagccagaactctggcattagagaatttccagcatgggagaattgactacgaaaagtcctcctctggctccttaccaagttagacaagggagcaatcagctgctgagttgcagccagctggcatgtttgtgagggtgtactataaattgtcccttaggatctagtttttgaagagccttccaataagagtgagtcctgtacattggacctgtgagtctgcagctgtgatgtaggaaggactatacagtaacactggctgttgtgtgggtaggaaactgcaccaaccttcatgtgtcccgtgtggcctttctcatggtttcctatactggttttgtttctgccctttctcttgggggggatatatccatagttctcttgttctgcattctttcccttctcttaaacattgcagaacttcatctgtctactttgttttcactgttttggatatgatgtttcagctaagatgaagactatgaaatagttgttttcttggctcatattctttctccagtctgtggactgtttttggctcctgagggatactctgggtttttcccattttggaagctttttattttactcataaatatttaatattgaagttactgctccgttttatcctcctgagaattagtgtatagactctagatcagaaggaattaaaaagatccagatctgatgcattataaagtattattaacaacacttctatttttaagtgtctccatgatttttaaattgttttttatcgtggatctaaatgtattaagcatctaatataggaaccattagacatctgtctgtcatttatgcctataattgccatattgtatgtaactgatacagctatgtaactgacatattatattggtcactggtagtattacttactcatttgtatttggtatacactcaccttacattaaaacgaataatgatttttgtgctacatgatgccacctgtggaaattatggtagaaatttttcatgttttcagtgctataaaattagctaagtgcatttatgaacttatttatagagtaattttttaattgtagagaggttatagctcaactaaactggtaacttcctctaataactataaagaacttgctggaatgtattttgggtggtaactttactactgatgacctctttatcctcccactccaactcctcttccttttctaaaatctattttgtcttctggcacacctttctatgttgccttaaataactgcctttataattttatattggcatttttctttttttcctttttgacctatttatctagttataaaaactattttagggttaattaatattttctgagagattcaaattttcctccttgttcagataatctctacagattttttttggggggggggttcgagacagggtttctctgtgtagccctgactgtcctggaactcactctgtagaccaggctggccttgaactcagaaatctgcctgcctctgcctcccgagtgctgggattaaaggcgagcgccaccatgcccggctctttctacagatattaagctagtaattttttcaaggtgttgtatgtagggaagtaaatgatgttggtccttacctcagaggtacattatagtcagagaaatggatctataagtacttaaaatgaagtattgcataggtatagtgttataaaggggagaaggaaattaagggtgatcagagaaaaatagcagaaagataatctgagtccttaattttgaagagtggaagaggttctgtaggtagatatgggggctggaggtacaggctcagcagtttagagcttatactattgtaaagaacccaagttcagtttctagaacacatggtggctcataaccaccaattctagctccagaggaacctgatacccatggcctgagggtactgcattcatatgcacatattcataaacacacttttaaaaaaaagcagatatggacagcaaggaacaatgtagataaaaacatggtataattaaaaacttcatggaatcctagcattacagtctttttttttttttttttttttttttttttttattgagacagggtttctctgtatagccctggctgtcctggaactcactctgtaaaccaggctgttcttgaactcaaaaatccgcctgcctctgcctcccaagtgctgggattaaaggcgtgcgtaccatgcccggccctggcattacagtctgtatgtaccagctcttcaggaagctgaggcatgagggttgcagtttcgttatcagacaattaaatattaagactcccatcttaaaaatataacgaaacaaaacagggcatgtcaggggcacatacttttaattgcagaatttaggagacagaggtagacaaatctctgtaagtttgaggctagtctggtgtacatagtgggactctatctcaaaaacaaacggaaaagttgaccaagtagtttagtgattgcctagtatgcatgaggccctttgctccagtatacctactccccacaaaataaacaaacaaataataaggaaaagaaatcaaggaaacctgttagggatggccatcccttggattgctagccgagagtcttgttactggaatatctgggtcacgttacatatgtccacattgatgaagtctaaccacatgtttggaactcaggattcatcacagagtggactgatttggcccagtcttagaaatgaatcctttaaatagttctctgctttattttgtgctttagctaaggttgactcaccctgaagtcatgccttccattattctgggaagctttcagagtcaaaccctgcttggcttaggaataagttatgctttgtgttggaaccatcgacagtaaaacctcttcttgcttacatgagtagtaggacagcatctactatagcttaagagaaaaggcagttgggataaggctttcggtggatttgcgtttttctggagtgttcctttctggcttaagttgataatgaaattttgacctgacatgtgccacaaatccctgagattctaggtcctaatttgtatagcaaactgtgttgaggctgttgacattctctctgaggaatttctttggcaggcttccctttagacttctggacagatctgtaaaaagtatggcttttaaagtccttataagtgacatatgtcagaagactgaaaaaggcactgataaatactctttgtgccagtgtgcacaacgagtcaggcttttctaaatttcttctgtttccacaagcaaatttctttttttctttcttttttttgggggggtgggtttcgagacagggtttctctatatagccctggctgtcctggagctcactttgtagaccaggctggcctcaaattcagaaatccgcctgcctctgcctccagagtgctgggattaaagccgtgcaccaccacgcccggcgcaaatttctttatgtctttcctagattcgtgtctgaaatagggagaggtttggtatttaacactagaacagcttttaaagatctatttagtttgtgtttgagtgtttgtttctacctgcatgtatgtttgtgtaccatatgtgtgcaggagcctgtggaggctggaagagggcaccagactccttggaactggaattatagacaactattagctgcaagtttgtactaggaactgaacccaggtcttctgcaggaacagcaagtgttttaactgatgagtcatctatccagatctaccagtgcatctttttgcttcaaagggagctccaaacttttagcataatcaccttcttttctactgcttcataattagaaatcttggtgagggttaggacatatgggagtattagaataaaaacttataatttttcaaaattattttatttacgtgtatgtggtacctgtgtgagtatatgcgtactaccacctgcatgcaggtgcctgttaaggcctgaggggtgttgaacaccctggaactggaattacaggtgcttgtgacctgcttgatgttgatgctgggaaccaaatccaggtattctgcaagtgcagcacccactcttacccaacaagccagctttccaatccacagaacagaggctcttggctgaacagtaaataaaaggttgcagacttaaaaattatatgtattgtagtgtatagcagaaaagtgtcacatttatgagtgttacacaggttggcaagttgttataacatgttcttgtggttttatactaataccactttcactccttcctttttagcttcaaatttaaatatttcttatatttttaatagtgacagtgaatgggcattgcaaataaagcaagaaacagctgatgtctgttcttttttttttttggtttttggagacagggtttctctgtgtagccctggcttctctggaactcactctgtagaccaggctgaccttgaactcagaaatccacctgcctctgcctcccaaatgcctctaccaccgcccggcttcatatttcttaacaaccaatcttaaaacattcttatcaaaaagtacagacagccaggctgtggtggtgcacgcctttaatcccagcatttgggaggcagaggcaggtgaatttctgaattcaaggacagcctggtctacaaagtgaattccaggacaacggggctacacagagaaaccctgactcgaaaaaccaaaaaaaaaaaaaaaaaaaaaaaaaagaaatatgaagactgccgggcagaggtggtgcacacctttaatcccagcacttgggaggcagaggcaggtgggtgtccgaattcgaggccagcctggtctacagagtgagtttcaggacagccagggctatacagagaaaccctgtctcaaaaaaaaaagagagagatatgaagaatgggtggctggagacatggctcagtgattaaaagcactggcttctcttctagaggacccagattcaattcccagcacccacaaggcaactcaccactgtctctaattccagttccagggctttgggcactatcacacaaacatggaggtaaaataccaatggatataaaaataaatcttttaaaaaaatgataaaaagagagatatggagggagacagaaagatggttcagtggataaaagggatagccacatgcttaaatagcccaagtccagtcccctcgaacccatgtaaaatgttggattcagtggtactcgcctataatcccaacattgctacagcaagatggatggtaaaaacagaattgtttagacatctgagggtcatcttgcctggaggagtagtatagcagcagaaaaaaagatagtggatagcaggaaccaaccaactaaccaaccaaccaaccaaccaaccaaccgacttaccgactaactaaatgatggaaaacttagaagagatagaattaaaccaaagataagatcaggactgaggtagtatgatggtagaatgcttgcctagtatattcataaggccctggcttcagtgtccattgcagacagatatgtgtgtgcactcatgtgcacacacacatatgggggaggagggtgggggggaannnnnnnnnnnnnnnnnnnnnnnnnnnnnnnggggaggagggtgggggggaaagggaatgattgaaggtgttctcttgaattgatagttttggtctggtaacagcacagaaaaattaagaactcaagcccataaaccaacaaagaaccctcagtgaaaataggcctaaattctagttacagtgcaactgggtctcacaccaacactgctgtgtttttttcaccttattcctgaactgtggctgagggttgagagtaggaggtgggacttcaggacaggtggggtctaagttcggcattggcatatttgtagctttggctttgatggcaggcaaatgacaggccgcatcaggccccatggttatcctgtgtgatccattttggttctaagttctctctttgtgctgttagctgcccgaaaggtagagtggcctctgttgataaagagcagatacagaagttcacatccaaacctggatagccatttttaacttgaaacacttttcctagagttgatgcagcagaatccttcccttatttggtgccttgcttaaatctgaggcttgcacgaggttgccagcgctccctgcatgctggttacttgctttttggtgcccatggcagagcagttaataaaatcatctttgtaatcatctctgttccatcctggggcttcattctcccttggttcttaggtaccttcccctccctttcatgagaggttcaggggttttcaggtgttttggtaggtgcgtgggcagaggttgtgtttacagatgttttctatgagttgtgtacagtcccttggtgataacatgtgtgtatacttactttctttgactcttgaagaatactgtccttattaatcatcagattgtgaattttttcaggaaaaattttgagttttaaaaattcatttcattgttgctgcagttttattcctacagaaaatggtattttcccccctcttccgcttcctccttttttttgattcttcaagacagggtttctctgtatagccctggctgtccttgtcctggaactcactctgtagaccaggctggcctcgaactcagaaatccgcctgtctctgcctcctgagtgctgggattaaaggcatgtgccaccacgcctggcttcttcctcctttttaataggggttgggggaggctattatgtaccccaggctgattctcagcttcttgatcctcctgcctcaggcactggtattacagacattacctccatacctgtatggcattttcttagtgtgcacttgagtgcttccagcaaccagtataatattatctggactgtaaaaatgctgcaaaatttctcaattagtttattctgatgggcacagagagtggcatctgagagtactaggggattgtagttgacgtttctattggattttgttttttacatcaacatctatggtgtcttcttctgctgaagattaacagtacaaattttggagcagactgtttgcattttccttgggcaattacctaacctctgtgcttaatttccccatctgtaacatgaaaaatagtactaacctcactgaatgattcaaagttaaatgaatagtgcatatgaagtgcttagaacattaccttatatattgaagattctatagaacttattgtcgtcgacgtcatcttcatgatcatgatcatcattatctttatggtgattgagtatgacatacatgctttgtttggctaggaaaacttgagccactaatgtctaagtatcttttggtatttttaagaatcagccttgtaaatccaatgtgtgcttaggttgaaggccatgcccaactatctaatagtgaatcaggcattagcacgcactgctttatggcttaaggagctgggcagagtactaggttgggtagaagcctttcagtcctttgtactgagccgtgtttgaatcctcagtgtttcattgctcttgccatgtggtaaccaggaatgatagagaaatactaatctttttttaaatatttatttatttattatatgaaagtacactgtagctgtcttcagacactcctgaagaggacatcagatttttgttacggatggttgtgagccaccatgtggttgctgggatttaaactagggacctttggaagagcagtcggcactcttaacagctgagccatctcactagccccccaatactaatcttttgagctaactattttcgtccatttctccatttgctcacatatcacctgaaaactgcttcatcctggcttaagaaaaaatgaattcttcagtaaaggaacaattcattctagagctatggattgcaaccttcgtaatgccataaccttttaatccagttcttcatgttgtggggacctccaaccataaaattaatttaattttgctactattatgaatcataatataaatatctgtattttccgatggtcttaggcaatccctgtgaaaggttatttactcctgggggtcgagacgcacagttgagagcttttggtctagagtcatgtttgtcctcaagtataatagctgttttaattaataacaaagaaataaaataaaaatcacttccccagtcacactggccatctgtaaagtgttactacccgccccccatgtagttagaacgtacatgatggggttggtgtgtgtgtgatgcactgtggaggccgaggatacctctgtggagtcactttgctcttcccacctttacatgggtttggggatgaactcatgttgccaggcttgtattcaagtgccttcacttactgagccctctctcaggttgggattttattctcatgttaattgtggatattttttaaagttccttcatttggaccggggcagagtagatgaaattgtcactatagatcagaatcctaaaatctgcatggaactcttttcttttaaatatctttctctgtgttctgtctaattaccttctgctaagatgatttgcgttcgcagagatggttacagacaatggtaagtgtgtgctttccctgcattgttaatattaacagtgtactgtttattattgtagtcttgtatgttcgcccatctgtgtataatatgtggacaacatatttaatcttttaaatctataataggtttttagcagccacttaatacatgtaatttaagagctaagaaccattctaggccatgtccattcaaaggacttttgaaagaggagctgagtgttggtgttgcaccacccccccccccccccatcagcacttgggaggcagaggcagggagagctcttgagattgagagtagcctggtctacaaaatgagttttgggacaggcagggctacacagagaaaccctgtctgggaaaacaaacaaacaaacaaacaaacaaacaagacaagacattgaaaagggggctggagagatgaatacaaacacttgctgctcttccagaggacctgcgttcagttcccagcacccacatagttgcttacaacagtctgtacataactccaatttcaggggatctgatgcccttttctggtatccttgggcaccaggcatgtgtgtaatgtacatatatgcacacaagcaaaatattaatgcacgtaaaataaaacaaagcttgaggaaaaacattgaaaggaaataattcctaatttatctcttaaaatgaattcagtgtttcatttagcttaccttttttttttttttaaagatttatttattatatgtaagtacactgtagctgtcttcagacactgcagaatagggcatcagatcttgttacagatggttgtgagccaccatgtggttgctgggatttgaactccggacctttggaagagcagtcgggtgctcttacccactgagccatctcaccagccctagcttaccttttttaggatttctccctggctctggacttctgctggtggttacatgcaactacactggacgtacaaataggggtcatgcttgtctttgtatggagtgatcatccaaagtccttcctgtcttttcacttacctctcggactccattgtctttgagtgaatgtgggaacaacttagcctcttgcctttaaccctcatccagtcctccagactcctaaattttctaatagccagagtgacctttagaaatacagctttgctcatgtcactgacatgttcaagacccttcatgggccttaagatcaaactctgtcaaaggcttttgcagcacgtccttgcctgccaaaccgccctgtagaattgctcaccctgccatggcagcctgcaatatgtttctcttgtgaacatcacttatgctgttttctttgtttatgaccaagacctctaatctcctcctataccaactacttttctcagacatcaaatttcatctctccatatcttttttttaaaaagatttatttatttattatatgtaagtacactgtagctgtctttagacacaccagaagagggcatcagatttcgttaaggatggttgtgagccatcatgtggttgctgggttttgaacgtaggacctttggaagagcagttggctctcttaaccactgagccatctcgacagcccatctctccatatcttctgagacaatttttttttaatgcttctgctctttatttccacagtgtcctgttcttccctagtcctgatttctaccttgttggcagtttgtatgtagtgtttagtacacagaaggtacctggtgagttgctgttgagggatgagtgaagagattaatgaacatgttgacagtatgagaaggatcccaacacctttctcacactcgtcagtatcttcactgacaagattttgtgacaaagtttgtgtatgcgctcacgagaaccttttgtctgcctccctgcctgaagacagccaagacagaaggggtttcggctcccctactatttgagtaaatgggcatgagagttcccagacgttgagaaggatgagtcagaaagaaaattcattcagaaagtaagccagtcagagcaacagtgttgccctttggctgaactttctctctctttttctagataccttgagattctatgcttggtggcatttttgagcagtttgctacagattgtcaaaccaaagtgtaacgactcatgaatcttagtctgattctttcccttgcttagggatgcttttgagatggtcaggaggcatctagcctaagtgtcttctttttccaccctgccacttaacttgataagtatttcttcctgcagagatccatctcattggtccagaaaaggtagttttagaatgcctatttttaaaatttaaattcatatggctcaggtccagctgtctcaagatctctctatgaaactaatgctcacttacagctcattgagctgctgtgcccaaatcagatcggcagtaatggtgtatcagaatccttgctcgtcctcagcactgctgtggctctttgcttcaaataaggaatacatgtgttggtttaaaaatcaatctacctacctactgtgtgtgtgtgtgtatgtgaaagagagagagagacagagacagagacagagagatgggggggaacaacttgtaggaactggttcttggttctttccactcaccatgttggtcctggagattgaactcaggttccattctaaatatttgttaaggtttatttttactttataaagtgtgtgtgcatgtgtgtatcgttgcaggtacctatggagaagttttacagtgacttctgatatgggtactgggaattgaactgtgatcctctggaagagcagtatatgcataccactgagctgtctttcagcctacgttggtttttttatttttatttatttatttatttatttatttatttatttatttatttatttatttattttttggttttttttttcgagacagggtttttctgtatagccctggctgtcctggaactcactgtagaccaggctggcctgaactcagaaatctgcttgcctctgcctcccgagtgtgggattaaaggcgtgcgccgacatgcctggctgtttttttaaattttttattctgtaggtatttaagtcattgattagctcacctgagctttttttcttatctgtattctagagaggatgttgaagataggctggttgtagcagggcaaacctttaatctcagcacttggaagttaggaggaggcatatcactgagtttcatccaagccagtctttaaaaaaaaaaaaaagaaaagaaaaaagaaatctgaaatactacttactactaaatagttttttcttttttaaactaatgattgctgtcctacagagtgctgtcctactgtgtgccagactcttcctctctttatcattacttccttagatctcacttcctctcagactttccttccctgtctaagcaagcatggaaatcccaatgcctcctggcaacttcagagttggtagcccttgttttagatgtaaaacatgcctggggttagaagttggtttatcttcttggcctctaaacctcttgtttggccgaacaagaagcacagtgctgagggagacagacagacagcattttgtgtccctgtgagctcaacctatacagaggtataggaatgacctttgattgactactcggaaagtcctgggcattttacttaaggtactcttgaaacttgatttacaccagtgctgtctcatctctaaggatagaaccccctttccaatagcagataagttgacctctgttgaaatgttcaaaataagaaaacgataatgtatgctcctccaaaagtgttttaaaatacaccagttctgaatacttctactgtccttaaaaagatttgtttttcagaaatttgattttctacacagttgtggaattagaatggggtacatcttagactctcctattcgtggcattgttttgctgccaccaagcaggtgttctttgtcagtccagggataacaaagtacttaggtgtagtttcaaggagtattctgtatgatttggataaaacatttacttttttgtttttgttcttttgagacacagtttctctgtatagtcctggctgtcctggaactcactctgtagaccaggctggcctcaaactcagaaatccgcctgcctcttctgcctctcaagttcagggattaaaggcgtgcgccaccactgcctggcaacatttacttcttttttttttttaaagatttatttattatatgtaagtacactgtagctgtcttcagacacaccagaagagggcgtcagatctcattagggatggttgtgagccaccatgtggttgctgggatttgaactctggacctttggaagagcagtcgggtactcttacccactgagccatctcaccagcccacaacatttacttcttatgaaaaaaaaaaaatttttttttttttgagacatactaacccaggttggcctcaaactcattatcaaaggctggtatcacatccatgatggccttcttttctcaccctggcaagtgctgggattataggtgtgaaccttcagactcagcctaagttttttgtttggttgttttttgagacatagtctaaacccaggctagctttaaacttgttatgtagctgaggataactttgatgctggtacaagggactagttagtaagtaatctttggttctggaattcacaggtaaaaacaaggggacagttctgtgatttttgttttgttttcttgctgtgtagccctgactgtcctggaactctctatgtatgtagaaacagactggcctcagactcacattgatctacttgtctcttcatcctaagtgctgagattaaaggcatggactactactcctaactaaggagacagttttcaaagtactagttcaacttcgttttcttggtgagatttctttgttgtgtttaacatgggtttcatgtaaccaaactggccgcaggtttgctatgtagccaaagataaccttgaactcatgatcttcctgcttctacttatgaagtgcaaggacttcaggtatatatcatcatggtttcctggcttcagaatccttttatttgtattttaatcttttcatttatgagctaggtaattttttctagtagaaactcccatttctctctctctctctctctctctctctctctctctctctctctctctctctgtgtgtgtgtgtgtgtgtgttggtcgtgacactactaacaaaatatacttgaggctacaattacaaaaagttttaatagtaatgatcttagccggggcaggggtggtgcacacctttactcccagcaaaggcaggtggatttctgagtttgagggcagcctggtctacagagtgagttccaggacgccagggctatacagagaaatcctgtcttgaaaaaacaaaacaaacaaacaaacaaacaaacaaaaaaatcaatggcagacttcattctgtactcatgcaactaatatccttagtatctgtttagagtctacgatgagttggctttagtcctgaattgaaaagacagtcaccacctctttcagcactgtctctagggactctacccactaagcatttttagtttctggtgaatagtaggtacgtgtacaacaatgatctagaggcagttggtctcacatttctttctctacttgagtgagactatctaggtgtgtattaaaaataagttgcaaagggcatggtggtgcactcctttaatcccagcacttaggaggcagggatggacaaatctctgtgagttcaaggccagcccattctacatatcaagttctaggtcagccagggttacatactaagaccctgccttgaaaaaatgggcaggggaggagggctgtagaaatggctctttggtcttcatagtgagtttcagagtgcttggctcttttgcatagggcttcagttcagttcccagaacccatgtcagtgagctcacacatggctgttactctagctggcctcctaaggcacctgcatatgcttacacagacatatacacataaataaaaataagttgcagaaatggaaatcagtctgaggtaatatgttggagagaaaagctcatactaaagtttttctgactcagaaaaacttagtttcagttatgaattcttaagggccacccataatcttattcttgcagagtttgaggccagtcttagctactacctaatgagactctgtctcacatgtctaagggccaggaatgcagttcagtaggaggctacttgcctcccatgttcttctgtgtttttatttgtttttggagttctccaaagatcctgcttcagagttagctaacttcatattgtcccttgtgaatataagacttcattttgataaatgtgtaacagatctgctccctctgggtcgaatgctttatacctctatagtacgcccacatttttacttcctttcctaattaaagtggttttggtgataacaaagtagaacaaagttagggtaacagatactttagatagaaaataaagcattagttctcaacatcagggagaaagtgtatatactttcaaattaaagttttctttgaaaaaatgtgcatgtggtacacacttttaatcccagagctcctggcagaggcagagaggcagaggcaaatggatctctgtgagttccaagacagctacatagtgagactccgtctcaaaactaaacaaatagaaaacccaaaaaactagattctgttaaaatatataatagtagcaaatgtagatgcaagtgactctaaaagaaaactagatgtagttaaaatataatagtagcaaacatggattaggtagacttaatttgtctctccaggacagtcctttaggaagtatgggtaatgccaggatgctccatacccttgggatttcactttcgggctcagtggttcctatcctttccataaagaaaacttaaaagcatgattgaattgctttacagttgttctcacttattccccattgcatcaattaacatgttctgtttctgaggttaagagaaggaaaattatgcataaggtctgaaggcctgcattaaactgctagctctggtttaaagtaggttacatgttggggttgactttagccttgaattagatgaattactaacagttctttttatcttttttacactccatatcttattccctgtctcatccaccatctgactgcttgacatcccacacctcctccccaccccaccccatctccacgtggatacccccacttctcaccccacctgagctctaaactccctggggcctccagtctcttgagggttaggtgcttcatctctgaatgaacacagacctggaagtcctctactgtatgtgtgttgggggcctcatatcagctggtgtgtgtagtctgtttggtggtctagtgtttgagagatctcaggggtccagattaattgagactgctggattgccctcctcctcagcttctttcagccttctctaattaaacaacaggagtcagctgcttttgtccattgcttgggtgcaaataccagcatctgactctttcagctgcttgttgggtcttttggagggcagtcgtgataggtccctttttgtgagctctccatagcctcagtgatagtgtcaggccttgggacctccccttgagctggatcccactttgggcctgtcgctggaccttcttttcctcaggctcccctccatttccatccctgtaattctttgagacaggaacaattatgggtcagagatgtgactgtgggatggcaaccccatccctcacttgatgtactgtcttcttgctagaaacaatttttttcttactaaaatatcctttacatgtaaatataagcaacttatagaggatttcttctatttatggactaacctgtgtgattgatagctgtgagaagtgaaataactaggttaaaataggaatagataatgtatacctttctatctgaaattatttcatatctatggaaaagttgtaagcaacagggtgtgtgtggtgtttgcctagaatcccagcaatgaggaggtaggtggatgtgggacaattgcaaattcaaggccagtctgggctacagcaagagcaggtctgaagggatggggaaagaacttagggaggctgggacagttgccagagatagactataccaggtaaattatctgtgtgtaattagatgccagtctgtttgatgggaagccagtctgttcacaccattctagtctactgcagactcttaagagctattctctggtcaaggttttgctactaattttggtaaaagctgttggtaaaacctttcccactatccctgaccttgataaagcatgctgtaactagcttgagcttttaaactacatgtacatcatttagctctttaattgctgttcagtgtaattaatgcactaaaggcaaaaataaaaatggaagctttattcaccaagtttgatgttgaaatcattgctgcatctcatttctgtataaaagatagagaactgccataattttattggtggtgtgttctgcagactgatgacccagtagtttttattctttgggggtatactacccagggctattgaatttgttccttattctaatagttttatcctctttgcttttatttttttacatttatttatctgtttgtttagtccatgtatgtgtgtgggctcgagtgtacatctggagatcagagaggaacatgtgggagttgctcctcctcttctaccatgtgggtcttggagattgaactcggattgccaggcttggagtcaagtgcctttacctgcaagccatcttgctgatccactagttaattccccacttgaaataaaaatttctttaaaattttaaaaaaagtcttgaggcaaggtctcactgtgtagccctgcttctcctggagctctctatagaataagcttgccttcgcctccgagatccacctgcctcccacggcctgctgggttgtgtgcagcaccactctcagcagcaggcaacaacttcagccctccctcctggcagaccacagggtactgtttctaggacatcggggagatagtgatattgagtcttgaaatttccctgcttggggctgcagagatggctcagtatcgactgctcttcagaggccctgagttcaattcccagcaaccacttgatgactcacaaccatctgtaatgggatccaccgccctcttctggtgtgtgtgaagacagctacagcatactcatatacataatgcaaataaatctttttttttaattgtctcttcttcctttggagttcaattttactccccagccctctctttattttcccaaaggaattatctcagtttagattgagaaagattttgtagaatctttgattcaagattgcaaactggtggctcataggctacatgtggctaacaattgaattcggaacttagctaatgttaaatattttttatttgtatctagtacttaaaaagccagagcgggctggtgagatggctcagcggttaagagcactgactgctcctctaaaggtcctgagttcaaatcccagcaaccacatggtggctcatccataattgacagctacaatgtacttacatataataaataaataaatctttaaaaaaaaaaagccagagcactttacattaaaaacaaaacaaaacaaaacaaaacaacaacccatatttcatttcccagcttggttctacatagaacatttgttgggactagagagtaacagtcagaggttcctgttgtcaccaccaacctactttatgcctgtcctctgtagataccctaatcttcagctccagattcagaactgaactccaatttcaagtcagtaaagtattggaagagccgccttagtgataaataccttaaccttagctgtcagaggcctgctttcctacataggtagaaaaacagttcataagtacgatcaggaatttctctaaagttgttgttactctatctctgtcagaatttaatttcagttattacggagccaggagtggcttctcatcctatagagaggaagagacatcaccctctgtaaacctgctcagttcagattcacggcttccatgtctgcacaagggtgccactgccagcagagggtgctgtccactcactgagtcttgtgttatcctggctcagctggaaggcagctgttgggcatgtgccctgggtctgtgtgagagtttgggcatgtccatttggttcccatccccagtgcccacccctttagaccctggccaggttattgtgtcactggggactgtattcagtaacaggaaactggggaaagttaattgttttctcctctccctttttcccatgcagctgaacaaaaggttcatcctcagttttctccatgcccatgggaagctgtttacccggattgggtaagtgtgcaggatgtttattttatttccctacattacaagtcattttggaatttaatattgttagcaactagcctgtgtttgtaactgagggcacagggtgtgaattcttagaggcctccaccttctcttcattctctttcctactgtgttcataaaatttgagatatatcactatctttgtctttcctttttttccctttcttttctaaagccattcttttaggacagtctttcccagtcccctcttcttgtcctcctgggttctgttgactctgtcttcctgcttaactcccaggaagtctgagatagtcgtgctacatccttgggtgcagcttccaggggtcctccttggggaaaaattatctcctaatctttcctcaataacagagtaacattttccttcctctgtgttcttctgacccatccaacttcctatgcactcagtcccttgtgccacattgctgatctcagtaaatctctgtaagccccagggaaggcagtgtgtgcaaagccttagggctttctcccttgagttcctgggaagagtttgaatgttcctcttgggcatcagaagagttttcctggcaatataaaagctgcacagtgccttcagtgtcagaggagatgtgtgctgagtgtctctgtgcagggcctccttgggtaagggacatcaatgtgaagaagcagcatcccttctataaaggtgcactgctcaattggctttgggtttttgagacaaggtctcttctgtgtagcccaggctgggttagaacttggcaactttcctgcctcagctttccaagtgctggaattcccaagagtaccactgtgcttgggttcctgttggctttcaatcttttttgaatattggttttattgtgagctgcccttagaggtgattggcttcacattgcaaatctcctgttatggcattttcctttttcttcaatgccatgaacttgtaaggttccctgtaattatataggttttctgcagggagacaggagtcaggtcggcttccatatactttgtgtttacttttttaagatgatggaagactttgtgtcctgcttgaaaagccattgccctgttgattgtgagtgaaagtgtgcttcacattatattcctctggcatcattttgggcaagagtgatactcagggccattttaaggatattttagattctgaagtgacttgggatcatcggagaagtgccaaaagataaaaatctctaccatctgaaataagtgtggagtaatttatttgggaaaaataaactgtgtatgttagttgcttctaagttctccctagcaccatcagcatatgctccagtggaagaagctttgtctaactcagctgcatcctgagtgctcatttaacagttgtgtggatgaaaaaataaacattctaagaaaaagacagattggaaatggccagagaaaagtaactggtattccaaaaggttccagtagacttcagctggtcatcagtgagtgcagagctgcagtaatggtggtagccgacatgttcagtatagactggtgagagaacaggaagtactaaatgcacaattaaaataagctggtgcctccctgttagctagcttctatggttgccagttttcacctttctcttcctaccttgcactcaactctgaaactcctgtttccttctttgttcctcctttcctttcccctgccccacccctgtccccatcatgtagctcaggctatgtgtgaagttctgatccttcttgtggccacctcctaaatgccaggcttatactcacactcacatacccatacctgctttcccctttcctcttgtgcttgcttgtcatttagacttccctagatcttttttttttttttttttttttttttttggtttttcgagacagggtttctctgtgtagctctggctgtcctggaactcactctatagaccaggctggcctcgagctcagaaatccgcctgcctctgcctcccgagtgctgggattaaaggcttgcgccaccactgcccggcgttccctagaccattttgtcagtgtccaagttcaccaacttccaaactattgacattttgagcttttgagagcctgtatgtttgtagcacatttctatacatgacagtcacatactctactcccaagttgtgattagaactgtctccaggcaaatgttccttggggggcagagtgccccttgtggatacctatggttttaaatgtgtcgtcttcatcagaaacatggaagtgaaaagctgttataagtcttacttcagaatgtatgataaaaatatacatcatatatatattctttaatatatatatttttaaaatcattaatgttaattatattttatttctcttttaaaattctcatatttaagcacagatactttggaacaaatctgggggaaagctacagtagtggttaaacacctggaaaaagaggactagggatgtagttcagttggtttttttacttgcctagggttcaggaaggcccaagtttaatcttcagcaccaataaaaactgggtgtggtggcattcctgtaattctacccctcagatggtagaggcagaaggatgaggagttcaaaatccatcactggcaagggatacatatgagaggggaagggggaggggggaggggaggagggggagacagagagaaaatgaatgaatgaatttcatttactctggtctagattaattttctggatctctaatgttcttgaatataacatcagttgtcaaaaagttaatccagggttagtgaggtggctcattggataaaggtgtttgccataagactgatgacctgagttccatcaacaggtagagagaaccaactcctgcaatttatcctctgatctctatccatgcattgaggcacatgtgctccaacacacattctctgtctctgtctctgtctctgtctctgtctgtctctgtctctctctctttcttaaaaaaagaaaaagagatgatccagtttttgtctttatgaaaggtgagacatggtccttttcaataaagaaaacgtctatcagttgtagacatacttcagtctctgaatgggtattcctcaagtaacattcctattgttaaaaaaggtggaagggggctgaaaagatggcttaatgagtatagagagttcttgaaagagatgctggctttattcctggtacccatgttggtattatactcctgtacagtaccctgtaaccccaatttcagaggattgggtgtccttttctaacctttatgggcacctgcacacatatggcgcgcatgcacacacacatacacgcacataagaaaaaaaagtaaatattttttaaaatatttatttatttatatttatatgaatacactgtagctgtcttcagacacaccagaagagtacattgaatctcattataaacggttgtgagccaccatgtggttgctgggaattaaactcaggacctctggaagagcagtcagtgctcttaactgctgagccatctctccagccctcttaaatagattgttgctgaggctcattctagtccctgtgttctatagcaatattgtgttttctctcatcaccctgtgacatggtttaattaaaaaaaatttttttttgttgttcctgtgatgttttaagttattaaagagttaagaagttgagaaaagttaggaatcctggttcatttctgcagaaagtgttgtctagcccagctgtgtcctcaccatctgagggattgggcctgccctgtttgttagtcactgtctgaggcattcttgagtctgggtcccagtattgtctgaaagattggtctcttgaaattgcaatccgaacaagacaagttgtccctagagatcacaagtaagccatgtaagtcagtaaagtatatgctctgaaaatgatcagtcttcttagatttgaaagaataggagctgagtccttggactctagaagaggatagtcagggttgctggaggccttgatagatgctgtcctgtgagttgggtgagacctgcacttggcctcaactgagagaggtcagaagctggcaactggtagcataaactcttgaattatgacaactaaaataattttgcttcctcttactgccttggttaaagtcaccactcgagtttgtgcttgcttgcctcagcatgctatttgtacagcttcaagaccttggaatgtaaagacctatgtatttattttagacttgagttctttaaaaatcaagtatttgtattttaatttatttgtaaaattgctaaatgtctttaaataccaaactcagaagtatttatggtagaggaacttttttatattatacaatgtacattgtaaaatatttagaaaacttagcaaaaagaaaaaaagtgggctggtgagatggctcagtgggtaagagcacccgactgctcttccgaaggtccagagttcaaatcccagcaaccacatggtggctcacaaccatccgtaacaagatctgactccctcttctggtgtgtctgaagacagctacagtgtacttacatataataataaataaatctaaaaaaaaaaaaaaagaaaaagaaaaaaagttactcatattcatttgtttggtttttgttgatactacatagctctgaggcatgagctactatacccaacgaagttgctcatatttttaatagccagagataactgaatacctttaatgcttagtgtacattttagggtcattttgtgtgtgtgtgtgtgtgaatgcatgaatgtatgaaagtaatgatattaaactgctttacagttgttcactggatctatgttgaggtttcttacatgtgagtataaatcagtggcaactttataggtagtgctgttggaggtgctttttgttggttttggttttttgtttgttttttcatttatttgtttgtctcacactataatccagctgttcttgaactccatagctagcccaggctggccttgaattcacaacagtcctccaatctcagtttataagttcccaggtgctgtatgccaccatacctgtctctgcaatgtctgagcctgtttggtgcttctgacagtttctgttttcctcctcttttccctttattattgttgctcgtgctttttcttcttgtcttaaattttataattattttataagtaacacccagaaactcttagaaaatacaaagctatagttaaggttaatacttctctccaccctgcccccaagctcatccgtatctccatcctttgctctccgaagaaagcacattagacattgagttatatgtccttctaggcctttttgcgtgcttacgtatgtatttgtgaaaacatagttttgtggatcccctccacttttgttttttgtttattttgtttcaagacaggatctcactatgtaatagcccaggctggcctcaaattcaactatcctcctgttttggccttctcattgctaacattacaggcgtatgccaccatgtacaactttgggttttgaatttgtgtgtacttgtacatagacaatgtactttaaatatatgtaaattatataccatgattgtattagttttattataaatttttttgtaatatgtaggtaaggtacaaagatacttctcaaagaaaagtacatgaaactacttacagtttcaaaccaaaataagaaagaattttggttataaatctttgaaacagatttgtattcattattgaatcctgaaaagatgacattttgtttgttgtaggttttatttgtttgtttgttttgagacagggtctcttctctctcttatagtcctggctgtcctggaactcactgtagaccatgctggcctcaaactcacagatttatcttccttcctttgcaaaggtgacttttaactgtactttttccatttgttgcttaagaacacttgattttgtctaactctcctctactaccacccaacagattgtcagtttctctttttaagacagagtctccttcagtggccctggctgggctagaacttgttctgtagataagaccagcctcaaactcacagagatctgcctgcctatgcctcctgagttctaggaatgagccatattctcttagatttgatgtgtgaggctaatctacattcttaaccattgattctttaattatgttgtgctaacccaaggaagctttttttggggggggggttgttttaagtttctgaaaaaaagaatgagcatttgacttgtgctcatttgagactttagtctgaccatggagtgttaatggatctgtttcagttcctaccccggggaagaggcttcctcagacacatgtcccatgtgacacttctgtcctgtcattctgtgctggcgctttactgcctttcaacacggagacacatggctctgaaacttgcccagcatggctgcttttcttgcagagtgaactctgctcttcttgtaatgagaagtactcgccccctccccacctccatctagagagagtgctgcacagtgtcaggattgaaaatgaaacctttgttagagcccacggggaaaaatggatccaatccagccacaaacatcactccctgccattcctagtctatcaagagttttagcagctctgaagatttttagagggaaacaatttttgctttgttttgttttgctttgttttgatttggggcaggcacttaaaatggcataggggtctcggaaagtaaacgcatggcatgttttgggccagtaaaaatgaggacacttaagcagaggcagactagagtaaactgtgattggcttgtagctgagccatgacttctgggcaccagagggtcagcagtacaagttaccatccaaaggaaaggtataaagattgccaaggtttgataaagctctgaggttttcttatcagggaaggatgctatttaacgataaagattaaggttggagcaaaactcacaccaccttttcccaggatttgagaaggattgtctgccttgactttccagaagctatttattaatccagcctagagctgttccccactgcacccctcagagtaccacaagcaatttgatggggtagggtggggggtggtaaaagatattttgctgaccacgaattgttcagcatagccctaaggcctgtgtgcctggtttctctctgtagcaccaagtttgagtttgctttttatttcagaggatttcagctgtggtttactccttgttgccaaaggagctccaggcatgcaccactgtttaggatccagtggccacatttggcaagcactggtttgaatgacctctccttagaagccctaggtcactggctggatttctgcctccctacattacaggctcttcctgtattgggagtggcagttggccagggcattgtatttccactggtctgaaaacatacagacccgatgagcagaggcttgtgaaagggaggagagcagcccaggaaaggctagaaacagaccattgggaaccctaggttaggcgtccttcaagggagagtttgggacccatgggtaggcagtgagtgtgatagtgcctaagaaggcagagcattgctctttccttttcgttctttttgtttttaaattttagacaagctattgctgtgtatctttggctaattgaacttgagatcctcctgcctcagccattcaagtgctgggtttacaggcatgatctaccatgtcttgtttctgaagtaattctttaagtaaagaaagtttttttgtgattagattccttttacggagcacagttttcataaaggagacttagggatggtgtaggtactaaaatttaaaggaaatattctcactgtctagaaaatctgtttcaaacagaaactcttatcagtttgaatccatttaatatggggggtgggctgtgctaagaaatagcctgctaaataaagtataataacttacaacagctatttatccagtaattgagttgtttttatctctaagctttgaatatttttcttttttcttctatatgtgcaaaactgtggaataagtaggaaagaaacttcctaggtattagttgtgtgcttgggagaggggaattgttcttctgagtgcctttaagaatgtgcctcaataatggaatccccatatttgtaggatggagacattccctgcagtggctgagaaggtccttaaggagttccaagtattgctgcagcatagcccatctcctattggaagtacccgtatgctgcagcttatgaccatcaacatgtttgccgtgcataactcccagttgaaaggtaagggaaatctaatttctccatctagacagagttgaatttagtatctttgctaccttatcactaaccccatctccacacacacagacacacaacacacaacacacaacacacacacacacacacacacctctcccttctattgcttcttagatctttattttagtctctaaattctgtaagactctatagtgcttggttgggatattaaggagagatttgtaaatataaagtttaatttaaaaatccagagatgcttttgcacatctggctatgctaatggcagcagcaaggcctcttagaggctgcatacccaggacttctcccaagagagaggcattgctgaaatgtttcattccagagaccgtatgcttggcagggattaggcattgctgtttctggactcgtgtaccctgtttgttcaatatggaaaagtctagttccctatgggatatcccttatgggaccctgccagagagtaagaacagagaattgatgagctttggtgactcaaatctggaagcacaaaacccaccaggcccagaatctggccagtgtactggtatgcgttctgaagtgtttttctgaacacttctccccacacccccgtatgaggcgggaggccaggagggaagggcagattggcagaattttaaaatgttctgatgaccatgctgcatttgaaggatgtttctaggatcccttcccctccctcttcctcacttaggtaaggctgatgtggtttgacttggtagaaatatgtagtctgagtgacattattttgtgtttctttacaccatgttgccaaggagtcattccagagcatcaacagggaatgtttgctcagattcttatctgcagtgccaggaagtaggaattgccccatggagactgtgtcacaaagcagatgtaatgtctctggacagtgccactggctcttcagttcaccttttctcagaaatttctcctctcacctgcacttgatctgcttcccttcctgtccatattaggatctatgttcaacttgctgctgctagggaacttccgtaatgagtgagcctgccgaactttccctatggacagggcttctcttgggatttgaggagcttcttagctggtctgcctgggttttcaatcatatcagtcctggaagacatttcctcatcaggttgacttatacagcatccaaaatgttcagcaatgggcaagatacagaggcttaggagccttcacaacttagccaattttttgctgaggtggctgtttgctgaggtggggttgccagaggcctggagccttaagggacagcactgatttctaaggagaaggaaataaataagtttgtaaaatgctgccctagtgaggctgtgcagtcctaaagggagggaaattttgctaccaagaatgaagctctcagggtgtggtggcacatgcctttaattttggtctacttatcgagttcctgactagccagaactacatagtaacactgtctgctcaatgggctctgtaagtagggcctccagttgcccctgtattcattttctgctttcctacccaagccaccactgccgtgtgagctggagagctgggacacacagttcagcaacaactgacatatggtctctatagatgtgaatataaagaacctggtttcaacacttttggtggaaaggagtaccctagactttcatagaccaccagtgagtctttttcttgtagctgttaagtaaaggttaagaaaataagggtgtttgatatcagtgggaggaacagcccttgggcctgagggggttcgatatcccagtgtaggggaatgccagggcggaaaggtgggagttggtgggtgggtaggggagcacccttatagaggcaggggggagagagaatgggataggagatttctagggggcagggggagacctaggaagggggtaaaatttgaaatataaataaagaaaatatccaataaaagaaaaaaagaaagaaaatatgggtgaaaggaagataaaggatagaggactcttgcgtatttgaggccaagatacttttgtagcacttttctgtagttggtcatgaggtggatcctctagtcaggaatgacaagtaaaggcctatagccccactccctgtactgcccttgccctggctctcacctccatgaggcaagaggagcctgagctgaggtggtcacaggctccaagggtggttcagggaaaaacaacccaggccacaggatataacactcaactgggacacagagctctgcggacgtgctgccaagtacccggtgtgcagctgaggcggccatccagaccccactgtgtgggctgccattgggataggggtgaacagagcactcagcagggctggttggtgggaagatgcacttttccatttcccagcacatgagtcatcttctctgggcccctgtgctgtgcttgcacggacagtggcaagaagggggtgttgtggctgagtagcagcatctgtgccgggggtggagagagaagagggctggggagagggtaacgatttaagtccttcactaatcagcagcactttgaatcacatttttatgagtaaggaagtgataaatcaagctctgtgtgttcagcccccaagttctgtcagctggtgcccttctaacgggttctctcccatctagtctgcaggctgtcacagtcaccacctagccacaggaccctggctgtctgaaaccaggaagtaaggcctgacacagcctggcctcccaggtgctttgggtccacggtgatttggcagtcattgcaagttacagaacatctggaccatcatttttctttccattccctcttggatatgtccttctgggtgggtgtttacatatgtcagttcctggattctctggagaagagcattccagcctgaagcagaggtgatcttgtagcccagaaagatgttagatcctttgtccttgtcagagccatttccatagatgtggggtcagaattatgatttggagagcaacagagcttccttaaaaagtgtgttctttgctgatggcccccagtcctgcagtactatcataggtcattcttgtgttttgtgttcccttttcaagaactaccttctactacagtaggccagggtatacataatgtgcttgctaacattttatggtatttactttttaaataagcttttattgtagacttgaaatatttacaagctttggatatggtaggagacaaagtaggggggcaaaactgtggtagagagaatggtgtcctcccctgcattaggttttggagatactaacttccttgatcatgagccctatgcaagatcctacccctgtggtattagagtcagcttggaatcctagcactctctacgagatgattggagacagctacatttgaggtcaggatgggatatttgggggtccttaggctggtattcattagacacaggtatttattgaatgcatgtatgttgaatgcaagaagttgaaggccatggctctaggaaagctgtgtgccttgcttggctaatcttcaaagttggtagctaaatggctggttcctcgagtgatgtcacaatgtctgtagcattcagagcctaaaaggagaaaaggccttcttcctgtatctcagtatttaatacttcagtagccatttgggtagctggtaagaagctaaaaggtaaattgttgaatttaaccacaagtacttcaagaactttaatttaaaaaaaaaaatgtaacttaaggaaataaaactagtttctcgaggacaagtaactgaagcaacatttgtggtagggcatcatggaaacctctttgcatcccccatctgtgcccaatttattccaatctggacttccactcggtgcccccactctttttaaaaatatgatttataatttttgaaatcaaaaccatctcaggcacactgttttattttactatattattggattatatttcctataaatcactggatattactcattggccaccattggaataacttcccttttctgtgccctggccttttcttttcccttctctatttgttcatagagtatgactccatttcagtcctgcggaagagccctagtagcagcaagagggcacccaagagacactttgtgagtgtgtgtgtgttcatgttgcttgctctaagggaacatctaggagttagaattgggcagagtcagactggctttcatttcatgatccttcatgtttgcttttggtttggtttggtttctgttttttgagactgcatctcattctgtagcccaggcttgtttcaagaaatactcctacaccacctcctgagtactaggatgacaggtatggaccactatacctagcatatacatactttatgttattaatattcccgaattgcaggaaatagaggaagtgacacctaggtgtcttgggggaattgagaactacagctgtctacctggcactaacagtttaacctataggcatgagcttcttcatgccattaataatatatgggaggtgactatggttgagaagttctaagacttttgggaagaacaatttgttctctcgtccaagttacttttaagtcttttactcaagcagaatgtatgacgtggcagaccctctgcttgacagaacagttgtacaaaggaaatccacctttcataagggctagacttggggaggcaggctgtttagccagactcctttcccttggcaacctgaatatggctgttgctgaagtttctggaaaagaagagtgacagaagtagaggggtcagggactcacctttttttccagttctgagttccagtgtctctcttgttttcagaatgaatctactgctttaggctgaggaaagagaaactgtagtgaaaagttaaatgaggaagttcagtcatgccaataaaattaagcttactcttagcatctctattaaggagatgctctttgtttacctgaagataacagtgtgtcttagtgcccatagctggttggtatcatgaagagtgcaatatcccattggcagacaagattatgctaagtctgcatttagtttaagttgccatttaattctcaatttggcatctttttctctgccaaagacttacactaaaggagaaatactgtttagggaaattttggaagcaaggtttgcagccaccttttccattgtttttcctcaatttatttacttaacttgttcttcagtgttggcactcaattcaggtcctagcacatctaggtaaactctttatcattgagccaaattcctagccccaaatatatatttaaagcttggtttgttagactttttaatggggcttttttgtttgttaaaagtatatggggctggagaaatggctcagagattaagagcactgggtgctcttctagaggacttaggttcaattcctagcaccacatggcagctcacaattatatataactcgaattccaggggacccatggcaccagggatatatatggtgcacatatgtatgcatgaaggcaaaatacctatacatataaaataaaaataattacatcttttaaaaaagaaataaaggcctatttcaagaggaaaaaattatttacaaagtttaaatttatataagaactatatatcaaatactatattttgtatatttcatatactatattttgatcatatttacccccactcttcctgtttctattctctaccttcgtattcccccaactttgtatcttttgttgttgtttgcaatttgagacagtgtttctttgtgtatcctttgctgtcctggaactagctcttgctagctttgaatttacagaaatcagactcctaaatcctaggagtgctgtaccattgagtctggttcacctaccaaacaccacacctttaaagaaaattgagtctttatcccacagaagctgtcagtagtccatggctccttgataattaggggttggtttgtaaaccccttttctctttatgttagactgtcgactgccttgattgtttataaatcttgtgcagttacacacagctgttgtgagttcatgagtgcagtagttctgtaatgtccagaagatgctgttttgctgttgtcctctctgacagcttatttaaatcttgccccttgtatcttgacagagggtgtaatatagatgtcttatttgtgacggaacactccactcacatatattctctccactttgaccccatgtaagtttctttgtaaccctccagtgcacaaagaaacttctctaatgaggtatgagatgtacactaatctatgtctgtgggtatagacataagaatttagagagcagtttaatactatgtccatttagttgagaaacagtagtaggtttacccttggggcctgtgatttccccagctatgagttgttgaccagttttaccgtatcatgcatgtgtttcctcctgtggacttactaagtgcaatcaggaagtgattggtaaccttagagtattcttgtcactgtcacaccagtggcacatcttgccatgcctctttaattgtaggccaataggcttgtgactagttaaagctgttgatcacttcccccacccccacccccacccccacagcagaatatataataccttctagtaccaaagctagccagcaggaagggagttttctagtcaataccaattttatttctctatgttctgtgaccaatgtgtgtagtgtctttaccagtagggcctcatattcagctatggtgaccaaacaagagcaatggcaataacttgaattattctgggggcctccaggacacctctgatcaacccaagaggaggtatcccatccctgacagcctctggcttctgtgatgagcataatctgctctgtagggtcactccagggactttatgtgaaagagagagagggaggagagagagaggggagagagagagaacacagaagagaatgaatatgaatgtgcttccatatctctttttcaaagatccttagtgttagttattcctccccagccttattctttgtcatactctccagtcctcctctcaccttaccgcccccaccccccgtgattcccccccttctccttcatctggcctgtgttctgctattcccccctcttttaagattttttttctccctctccactaataatttctttctagcttcctggattctacaggtattccaaagttaaacaaacaaatctaatattcaaagctaagacccatatgtgagtaagaacatgaacatttgtctttttgggttgggtttcctcagagtataatgtttctaagctccattaatttacatggaagttttgtgatttcttttttcttttaaagattttacacacacacacacacacacacacacacacacacacactgtagctgtcttcagacacaccagaatagggcatcagatcccattacagatggttgtgagccaccatgtggttgctgtgaactgaactcaggacctctggaagagcagtcagtgctcttaaccgctgagccatctctctagcccaatttcatttttctttacagctgaataaaattccactgtatgtaggtaccacattttcattatcagttcatcagctaatgagcatttaagcctgtcctaactattatgaataaaagagtgataaatatggatgaaaatgtgtctctgtagtaggaaaaaaaagagtcctttggttatgtgcccaggagtggtatgcctgtatatggtaggtctatatctagttttttgaggaacgtccatactgatttccacaaaggctgtaccagtttccacttctagtaatagtgcattcattaggctctccatccctcatatccctgccaacatttattgtctttattttgatctttgagacaggatctcactgtgttatcctggctgacctggaactcattatgtagactaagctggcctcgaaccaagcgttttgttctgcctttgcctctccagtggtagggttaaaagtttgggctactgtgctcacctgattttttttctttcttcctttttaatattttttaaagaattatttattttatgtttatgagtacactgtagctgtcttcagacataccagaagagggcatcagatcccattacagatggttgtgagccaccatgtggttgctgggaattgaactcaggacctttggaaaagcagccagtgctcttaactgctgagccatctctttaccaccgctgtcctacccccatcccccaaattgttgttgagcccatctgctcatctctacctctggccctgggcaacctctgatttgctttcttttgttgtagttagctctgtcttttctagagtttcacataaatggaatcatacaatgcttgcttttttgtgtcagactcagtagattgcttttatggtttatacatggtctattttgttggtattttattcttttatattaccagatagtactctgttgcaaagaaacactgcatctaaacctttgatttactgttgtcctgtatatgatccatgagtgagggcatgaatgtgctacagctctgtggagtggcttctctttatggatgggttctgggtgtcaaactcaaagattgtcaggcttgtatgacaaccatgtttaccaacgtaaccatcttccagacctgcttttttcattttgttttgttttttaattctaatatctgttaacatttggattgtttctagttttgagccattatgaattaaactgccataaacatttatatatgcctttgagtggaaatactttcatttctcttatgtgaattcctagacttggatttgctagatccacaaaggtctatatttaattccatagaaactgctctgttttccatggttgttagatacttaacactcaccaaagtctttgagaggtccactttatatctttgccaaaagtatctgatattgtctgtttgggggattttgtttgtttggttggtttagaggttttttttgttttgttttgtttttgtttttccccccaagacagggtttctcttgtgtagcccaggctgtcctagaactcactctgtagaccaggctggccatgaactcagagatctgcttgctctgctcccagaattcgaggattaaagacatgagtcaccactacccagctgttaatttctgttttaactgttctagcactttttcatgttggtaataaattatatttccctaattaatgatttttcatgtgtgtatcttgcttgacaatttagatctcttgcccattttaaaaaccaagttgttattattcaagctctctgcagaatctgtagtttgacaattgctttgtcccaatgattccaattatgtttcttctttcttacctgtgtttctttgttttatggtgagaatccagaactttgtgtgtctagggaaacactgttacactcagctctttccacagcctctcttagtttcttttggatagatttgttttgtttactacatttcatgacgctcctctaggtttccatttggggaggtgcctatgtgaggaactatactatatatagttaccttccttcccaggaagaaacggtaagtagcacgtggctgttcaaccacctgaggcccaagatctgtgcggccacactacctttatttaatctttaaaagagactgctttaggactagcaagatggctcatcacatgaagacagttattatcaagcctgacaacccaaatttaatcctcaggtcccacagagatggtgaaaggggagaactaactccccaaagttgtcctctgagcaccagacctcccctaacacacacatcataaatcaatgtcataaaaagttttgttctttttttttttttttttcaaaagattctcatggtgttttttgagacagagtttctctgtgtagctctggctatttgtaactcactctgtagaccagactggcctcaaactcaagagatccatctgtttttgtgttccaagtggtggggttaaaggtgtgctcccttgtgctggccatcatcagtgccttaagattttaaaagtatgttttcctgaatagtttgttgtgtttctgagtggttctgtgtatttagtttaccagagaaaatgctgtggtttttctcttctcttctcttctcttctcttctcttctctctcttctctctctctcttctctcttctctcttctctcttctctcttctctcttctctcttctctcttctctcttctctcttctctctttctcttctctcctctctctctcccctctctctcccccccctctctcctctctctcctctccctctctctcctctctctctcctctctctctctctctctcactcactattttatttatcacaagtcccgactgtagcacaggctggtcaagaactcagcctaccgagtgttgggatgacaggcatcaactctacacctagctcttttttgtttaacttcattatgactagagcacccatatgcagagaggcaaggacatttagtttcctctgtccttttccagtttctgcccatttatattcttgtgatatgacaatgaaatgatcaggttcataattgtcagttttccccagaagtgtttcgtgtacagtacacttgctctgagagctaattgggtgagagaaaaaggtactgactagaaagcaaggaagaggagaagcctgcagctgaagtgatggatatcatttattttcaagagagtgtgagctagtgatctggaaaagagggctctcttgtttcagccacattacattacatatctggtgaaccctattggcccataaaatcctttccattagtcagggtactctgtgcttttgttcttgactgctgctgttcttagagctgtttggttgcttgcatgtctcaatttcctctttagatggcagacagtcatgtgttttggaatgtatttacggtaattggagctttttagcttggttaagtcctccttcagatctaagactccccattttaaagcttatgttcggaaaatgcccgtgtgatcccttgtcccaagtgccagcggcagatgcagcagttgacacgctgctgggagtccaactgctgggtagctttctaaaatccagacgcgtgctgttcacactctgacttctgagggaaggagcagtggttaagagagaggaggggttggctgggggccggagggaaaaagctctcataatgcctgcccaaggctgaagggctgtatcggctttcttcctctcttctccagctggcgttggtagggagagtaaatcaccatagagtgattgtgagctgaatccactggagacttctgtgagacacatctgtgacatcaccttgttatcactgtctgttctgcataacctcttttcacctctcccctgagagagggtgatgcccagaattaatgtcagggcagtgagcacaggaaaatgtgtggtaacttatttttgagatgcctgctaaaagtacacactcaggtcattgccacatttcttcaagactcctcagtggaagaaaaaccttccatgaacacaaagcccgatcatccattgttgctaaatcttcaagtgtgggagggacaaaaatctagaaagttttgaaaccttttaaagaatatttttatctatattttatgcatgagtgcttttgcttgtatgtatgtatgtatgtgcactatttgtgttcctggtgcaggtggaggtcagaagaaggcatcagaccttttggaacaggagatggctctgagtcacaatgtggatgctgggaacagaactgagaactctggaaaagtagctagtactcttaatcattgagccatctttccagaccagttttgaaatttcttttttttttttaaattggatattttctttattcacatttcaaacgttattccctttcccaccatccccccctcaagggaattcccccatcccactccccctcctggaactgcaaactgcagtttgttaaacttcctagattgttaaattaaattataataaactgttaatttttttcagaatattaaaaaaaaaatagctggccgggcatggtggtgcacgcctttaatcccagcacttgggaggcagaggcaggcagacttctgagtttgaggccagcctggtctacaaagtgagttccaggacaaccagggctatacagagaaaccctgactagaaaaaaacaaaaaacaaaaaacaaaaaaaccgaacaaactaaaaaacaaacaaaaaaattgctgggtcctcaggtaatactatgttcaattttctaaggaaccaccagactgatttccagagtggttgtaccagcttgcaatctcaccaacagtggaggagtgttcttctttctccacatcctccccagcatctgctgtcacctgagtttttgatctttgccattctgactggtgtgaggtggaatcttagggttgttttgatttacatttttctgatgactaaggatgttgaacatttcattaggtgtttctcagccattcaagtttcctcagttgagaattctttgtttagctctgtaccccatttttaatagggttatttgattctctagagtctaacttcttgagttctttgtatatattggatagtagccctctatcagattggtaaagatcttttcccaatctgttgattgctgttttgtcctagtgacagtgtcctttgacttatagaagctttgcacttttatgaggtcccatttgtctattgttgatcttagagcataagccattgatgttttgttcaggaaaactacccctgtgcccgtgttcaaggctcttccccacttctgtcagtttcattctatctgtttttttgtggaggtccttgatccacttggacttgagctttgtacaagaagataagaatggatccatatgcattcttctccatgttgactgccatttaaactggcaccatttgttgaaaatgctgtcttttttccactgggtggatttagctcctttgtcaaagatcaagtgaccataggtgtgtgggttcaagtgatccctcattgttccttttgcttacttatttaagaaaaaacattttatgtctgtgggtgttttgcttttatgtatatatgtgcaccatttatgtgcctggtgcaagtggaggtcagaagagagcttcaaatcccctgaaactgaaattatagatggttatgaacggctatgtgagttctaggagtgaaatccaagtcttctggaagagcaaccagtgcccataacacctgagccatcttttcagcccctaaaaagtttgattgattgattgatcgattgtacatgtatgcgtgtgtgcatgtacatgcttaaatttactatagcacatacagagaacagaaaacaacttgtaggagtcagttctctcttactatgtgggctcaggggttcaaacttaggtcctcaaggcttggtttcaggcatcttcctccaaccacttactggtgctccctttttttctaaacgtaggcacacaacctgtacacatacatgcatacacacaaaaacctctctttgtcaagctggattctttttaaaaatatcaaatcatgtcactcctctgttcagaatctctactagctttctatttattttatttatagtagcaacatactaacaagaacttcctgtgaggacttcccttcacatttttttcttttttttaccctattcacttgttttctcccatcttattcactctgctctagccatattggtcttcttgcaagtcctatgataagctcttcaacctttgggctttttcagtactgtttttattacttggaatattatatttagccaagtggtgaacttctcatcatctgtattctgtttaatgtagtctctgtgaagcctgacccaaccatactatttaatactgttgttttttgcttccacactacactctgatctcattgctctgctctcttaggtgccagatggtaaggcatatgcagcttactatgcatatgtttattatttaattctctctactactatgaaagaacataagtgtcctgcagatagttgtttttgttttgttttaatagtgtgtatatgggtgttttgcctgcatgcatgattgtgtaccacatgtgtgcctggtaaccatggaagccagaagagggtgttggatttcttgggattggagatacacatgattgtaagccataggtagaggataggaatcaaacctgggtcatttgaagagcagctagtgctcttcaccactaagccatctctccagctccctgttcactgggctattactatcacactattactgtttttcatgatttttattaaggttattttctggaaaatataatttccagttatatgtttttacatcttgccattagatcaaaatacattaagtgtgctttggtatttgccactaatcatggagccagtatctttagatttggaagtgaaatttcttcagaaaagtgtatgtcctttctcatctagtctcctaagattttaatcttttagtatcatctttacctgcctgatacttttatttcttcttctgtatccagttaccatatttctactgccaccttagagcatttctatcctgttagataaactaagtaatttttaaaattcttcagtggactaataaaaaggtaacaaggtggaagaagatgcttctaagccaccttcctgtcagtgaagttcttttggtttctttatgtgtattcaagcatttccacacagttaaaaaatataagatgtttggttgtgctatattttactaattagtattcagggtgtaaattcttcatttgtgatattgtttgtttattggaggcaaggtcactctatgtagtgtagtctggctttggatttcttcttagctgcttaagtgctgagattataggcatgtgccttcatgcacagaattgtaattaaaaactttatccataaagtttgggtttgcatttcttattttattagtctatctatctatctatctatctatctatcgatcatcagtctatttttagatgcaggatcttactatacatgcccttgctgtcctgcaactcaccatgtagaccaggctggcctcacaaaagatgcacctgtctctgccttcctagaattatgattaaaggcgtgaccaaccatgtctggtcagaatattctttttatttatttatttatttatttatttatttatttatttattttggttttttgagacagggtttctctatatagctctggctgtcctggaactcactctgtagaccaggctggcctcgaactcagaaatccgcctgcctctgcctcccaagtgctgggattaaaggcatgcgccaccactgcccggcctattctttgatttataatgcttgtgttttccacagaactttattttgcatgttttttaggatttaactatatcattatcttcaaaattaaagcagtattattcccctctattcacttaaaattttttttcataatatattttggtcatggtttctcaactcctcccagatcctcctatccaaacaacttcctgtatgttctctctctctcaaaaacaaataaaaaaaagtaagaaaaaaacaaaaacaaaaaaaaaaccccaaaaaacaaaaagctcacaagaaaatctgagtttgttttgtgttagccagctactcttaggcttgggccttccttagagtgtgattggtacaccacagattttccatttgctgtcagatatcaattgcaaatagcttcctaattagaggtggggtcctatgtccacttccttctctcactgctaggtcttttatctggcttgaacctgagcaggtctgtgcctgttgtcacagtttctgtgaattcacatgtgcaccactcctgttgtatctagaaggtactgttttcttagagttatccactatctctgactcttaaaaatctacctgcctgttcttgcatgcagatccctgagccttgagggagaggactttgataaagacattccatttaatattgaaggctccagtctctcacttatcactctctgcatattgtccagttttgggtctctgttttaataactatgtactgcaaaaaagctgtttctctgataagggttgagcaaagcactgatctgtgggtatagtaatatatcgttaggagtcgttttatggctactttcctttagccataataaatagtattaggctttcttctaggtccatagcctagccagtctcaggttattggccacatcagcagtgtcagatatgggtttcatgtcatagagtgggctttaaatccaatttctaaaaaagtacttggttactcctgtaatgtttatgtcactgttacatagtgtatcttgtaggcaagtcactcttgtaggttatagggcttgttattggatgattacctttctcttttgggattgtggcgaataccttccagcaccatgaatgccacctagattgtagggctaaacttctagttgaataccagctcaacttctccatgtttaatatcataagtatcttcagtaatagggctttaccaacagattttggagatcaaccaataaccttagcaatagcctgtcgtattttataggaccccctttggccaataactcaacaagatgtaacccattcaaggcacttgaggttttgtttggtagcatcagatgtctagttgggtcattgattcccccattatatggtgacttctttaaattcctttcgtacatgcatatatttaaagaagtttctacagcagattagtatatatgatttttttcagaaagcctttagtgttagttctctctccataatcctttgccttgctctcctttccccctccctatattaatcctcttattctagtttcctctttatctctccctttcctgggagactcccaaccccccttgctaggtacctaacctgtagttattctgattgtagtacacgtattaaaagcttaaaagctaacatccacatactagagaaaacctgaaatatttgccttttggatttgggtttcctcacttaggatggtttttgtttttgttgtttttgttttcctacctctatccatttacctttgaatttcatctttcttaaaagctgagtaatattccattgtttaaatgtaccatatttttattatccatttgccagttgataaacatctagactgtttccaatgtctggctattatgaaaagagtagctgtgaacatggataagcaagtatcaatacagtagggtatagagccatttgggtagatgcccaagagcaatatagctggaccttgtagtagatggattctcagcttcccaaggaacctcacagtgatttccatacgaaacagggtctcactctattctcacattatggaattccaggtgtgacccaccacatccaatacatttttagacgtttagttgttgggttaaaatttttgaagtttgtcaacatttctgataagtgatgctagattactttcttagaagcaatactagtttaactcttttggaggatgaaatagtagagaatgaccctagggccttttatgtgttgagcataatttaacttataacttaaattatataacttataacttaagttatatttaacacataaaagttgtagtatgtagcgggctggagagatggctcagtggttcagagcactggctgttcttccagaggtcctgagttcaattcctagctcacaaccatctgtaatgagagctgatgccctctgctggtgtgcaggtgtccatgcagatagagcactcatacacaaaataattgaataaatttttaaaaagaaattgtaactaaactataaattgtgtaagtatactataagttataggaaatacactattgaactatattcctagcccttttctttttcttttttttggggggtggtggtggtggtttcaatacagggtttctctgtgtagccctggctatcctggaactcattctgtagaccaggctgggcacaaactcagaaatccgcttccctctggctcccaagtgctgggattaaaggtgtgagccaccactgcctggctcctagcccttttcaaaagttctctaacttgcctagcttgacttagaacttgtgattctcttgcctggtttcctgagtagctgggattgcagattgcactatcacacctggtcagtttccatttttatcttttgagaggatgatctcatacagctttggctggttcccaatgctgtgtaactgaggtgaggtataagccactatgcctagttttgtgcagtgctggggactgagcttcatgcttgttaggcatgcactctgctaactgatcacctccagcaccaggagattccttttcgttttgttttggtgacagggtcttatgtttccctggctgcctggacttctctgtgtagacaaggatgaccttgtcctcctgattgtcctggggtttgctcttgctttgtgctgtcctggggattgaactcagagcctcatgcatactagacaggcactcttacaaataagttacatttgctcccagtttgtattttattttattttactttattgtaatttattctgtgtatgagtgctttgcctgcatgtggatgtgcataatggaagaggattccccagcactcgaggtaaggatgattttgagctaccacgtgggttctggaacagtgctctttaccaagccattttcagccctcagttttacatttttaacagcaatgtttaaggatgtccaaaaaggactacaaggtttctctatgtaaccctggctgtcctggaactcttgggaccaggctgaccacaaactcagagatctacctgcttctgcctcccatgtggtgagatcaaagttgtgtgctacctccacctggctcaaagactgctttcttatggatagtgagcattttaatttttatggtgtttttctttttttcttttttctttttggtctcataatatttattgagaattgatgaatagaattctttttttctttttctaattagatattttctttatttacatttcaaatgttattccctttcctagtttcccctccaaaaatctcctatcccctcccccttccccctgctccccaacgcacccactcccattcttggccctggcattcccctatactggggcatagagccttcacgggaccaagggcctctcctcccattgatgactgactaggccatcttctgctacatatatagttagagccacaagttccaccatgtgttttctttgattgatggtatagttccaaggagctcaggggtactggttagttcgtattgatgtttctcctaggaggcttcagaccccttcagctccctgggtactttctctggctccttcactggggaccctatgctccgtccaatggatgactgtgagcatccacttctgtatttgccaggctttggcagagcctcacagtagacagctatatcaggctcctgtcagcaggcttttgttggcatctgcctagtgactgggtttggtggttgtttatggggtggatcctcaagtagggcagtctctggatggtcattccatcagtctctgcaactccctccatgggtattttgttccccattctaagaaggaacaaagtatccacactttggtcttccttcttcttgattttcttgtgttttgcaaattgtatcttgggtactctgagcttctgggctaatatccacttattagtgagtgcatatcatgtgtgttcttttgtgattgggttacctcactcaggatgatatcctccagatccatccatttgcctaagaatttcataaattcattgtttttaatagcagagtagtactccattgtgtaaatgtaccacattttctgtatccattcttctgttgagggttatggtgtttttctaatgtaggccttcatatatttgttgcaacagaatataggaaaacataacctttctttaagtcagaacttttgttagtttctagttcatagcaaaattgaatacaagatatagaaacttctcatattatccattttccctttctacaatctcctctactattaaacacccacaccaaagattatgtgtagtcacttttagtaagcatggcacctcaaatgtgtagtttacatttttattcacttatgtacattttatgttagttttcatttgggtcttgacatatatacagtgacatatatctattattaccatggctatgagtttgttttgctatccttaaaaatcctcatatactgtcttagcatctatttctttattttgactcctaggctaccactaatctttttaccatatatctctctatcatttccatattgtcatatagttggaatcatggactattccaccctttcatgctgccttctttcagttgctgatatgccctcatgtttggtttggtttggtttgagacagggtctcactatgtagtcttggtcagcctggaactctcttgtgtaaaccagcgtggtcttaaagtcatagactgcctgtctctgtctcttgagtgctggaattaaatttgtgaaccaccatatttggctatgtaattgttttgcttgcttatactgtgtgtgtacctaagtgtctatagaaatcaaaagagggttattgtatcccctagatcccccatgttggatctgggaaccaaacctgggtcccctgcaagaggatcaagtactcttaaccactgagcattctcttcagcccatgatgaagattctgttgtctggctatcctatactttattaatttacattactggaatgcattttgattgtttccaagtactagccggtctaagtatgattgtttaaaacatctctatataggtgattattgcagacttaagttttttgctatttgattgaatatttggcaacctgatagctggtccatatatttagagtaccttagttttttattttgggctctttttagagtggtgtgtgtgtgtgtgtgtgtgtgtgtgtgtgtgtgtgtgtgtgtgtgtctagctgtagcatacacttggagaggctagaatgatcagtgggtatgtatgctcctttgtgactgactcactaccctgagatgggatcttcagcgaatgagaagctctccatttttgcaagagctcagattgtccctacccctgaatgctgggttacaggcatgacagctttgtccagtgatgtatgtagttgctggagatttgaactgaggtcctcgtgcttgcatcgtaagaggtcttgcctactgagtcatctacctccccactctagttttgttgagacactgtctcactgtagttcaggctggccttgaaaatctgatcccctgcttcagcagtctcgagtgctgggattacagacacataattgccatccccagcagatactacattttgtaagaaactacaaagctgtcttcaaacctgtcttattgtaaattgcattttgttgactattaggaagaatgacattttcccccaagttttattagccattaaaggttctctatatagccttatctatagccttgtagaccttacatcggtttacttgagcagacagtaagtataacaagagcttgctatactcattggttggttttcatttattagtatgggggagtgtgtgacattgatgtacaggtggggggacaactttggaggggattctgtcctcccactttcatgtgggctctgggaattggttggttttcatatattattatgggggagtgtgtgacattgatgtacaggggtcaggcttgcatcacaagaacctttatcctctgagccatctttgctgacctcatattggtaatttcttgtttgtatttgcatttttaaaattatttactcctacctccagcatgattacagagacagatgaactgaagtggtgagggagtgaagaaaagatagacatatagacacatgtacaggaaagctggggtaaggtggtcctgggtatttctgatggagaaatcacagcacccagaagttatcgtgcatatatagatttgaatggggaggttgggttattatgtacagctgaacaaggccattacacagagataaaccaggaggcagggtttacggtatacaaatagatcaaggagacatgattagccaatcttggtaggaacaggtatctttgtaggtaggggagcagtcatcaatcaggctgtaaacatcacaggaagggagctctggtgaacagtttctgcagctgatataagtatccacattcagacccctgaggaaggctttgctatttccctctgaccttcaccttcagctcctgcccttgggagtgggggaatttaccatattctaattagtctgaggtctttgacatagccagtttatgtcaacaatacaacattcttagggtttcttctactctccacaatttatttatttatttatttatttatttgtgtgtgaatatatatgcatgtgtggaaaccagaagatactggatcttcagaggtggagttaccgtagtttttgggtcacctggtttgttatgtagtgttgggctctgagatccagtctcatgattcccagtgctctttaacccagtctgatctgttggggggactggagcagatcttgccttggtgatatctgttctcagcattttgaccttcttcttgtcccctaaagacagcagtgtgttactgagagagggaaatacgtctgtgtgctagtcctttaagagaaaacctagcggaagtgatgtgcagagaacatctgcacttggggctgagtggggaaagcgagatgcgctgcagctggtgtaaggccctggcaggctgaggcgctgctgtctgttggggtttacttctgtctacattgaaacatggcttgggagggggtggtggcctgccgccagcctcagttagcctgccctcctctttcctcctcacccacttcccccagcctcccctccctcatgctttaaagtcacatttccaggccagacgtagaattaatctctgggcacttcacattgctggcagctgaaagcaggatgtgggatttttttttctttctttcttttttttttcctctctctttctctctgtgtcttggctgacttttttacctctcgaagaatttggaaggccgtgagattccccccccccccccaaagtactgtggagtttttcagcttgctgatcaccctgctgcggcttcaccctaatagacttcatatgttgatgcagttgacatcagtatcaaactattttacatgtgatctggtgtatttcctgaggaaatctgcaagatatttattaagaactaataaaataaacctctccatgagtttttaggtagttttcaatttttcatgtcgctctcgtttcctcttatcaatgagttgctattttctctctctactctgaccattgcaaaaggaaacaaaaataaatgttttaaactgttcctgaagggacaggagagaatagttctgccatgatgtatcagctagggctgtatttttagtgcagcattgtagaaactaaaaatatcctgttatagtggatcctttttataggtctcttttgctctgtctcgttctctgtgtgtgtgtgtatgtgtgtgtttataatgttgtaagcacaagtgcctttgtgcatcagcagccgctcttctcattacagctggactccattagtccttgaaaattaatgtaatcctagttaagaaaaaaattaattactctaccagagctgtgtttcatccaaagctagtgttagctccctagctggcagcttagtttgagaggctccagggacccatggagttgtggctttggtatcatagcatttgctgctgtgtttttcctgttgagagcattcctcacttcttaagggttacacatgtggcatgcagagtgactgcagacccctctgcctctgtgaattactgttcccatctggtcatccccagaaggaatgtccaccacaggcttaactcacctgcctctgctggttttcttcctgggtttctttatgacagagttgttttctcatgtgccctgcagaagaaaaaaacctttgtgaaagtcttaagaggtgggcaaaatctgccaaggagaagtctgtgtggatgattaagaatgacagtcacaggctgaagaagtggctcagtggtggatcaattgcctagtatgcctgaggccctaggttcagtcgcgcgcgcgcgcgcgcgcgcgcgcgcgcgtgcgtgcgtgcgtgcgtgtgtgtgtgtgtgtgtgtgtgtgtgtgtgtttaaagcaaagtaaggatgacagtcatgatttgttaaaggtttgggcaagtttgtttaatgcataccttttattataaatgagcatgttagagttgactgccagtttctaatcagacttcttagcaccagccctgaggagggatggactggctcatcctgtgagtaatatttccagcattgtgataagtgatctgggatgtggtatggggcacagtccagaactgactgtagtctgcttgccttcacaacatagatcttgtataattgtctgcttctgatgacctttgttttgcctctctggggacctggtagggtttggggcatggagaagaagatgtgttatttgtctccttaactggtcagactctccaggccctctgctgagtggtcaggcaggatccatctgtcttggacgacacttttctttttgtgcggagcttgggcatgaacagcttaggcctgggtaagtcacgccaggcctcccagtgtgccgttatggcatgaattcttgtggagctggtcagaacaaaaacagggttagtgcccttttgtttcttttgggcatgggctcttgaggcttgtattgggacctaatgttctttcctgctgctaactgtaggtcttctttggctcctccttcttaccctgtagcttcttaccctggttgagccttcagcttccggtatttgatccctaagcactatagttcagtaaaagtaataattaggcattttacacatgtattttattagtgaagagagctggtgtgtgatgggctgtaattctaatgcattcagtttccagatttaaaaaatgtaaaaagaacagtttttaacagaggcaatgggcctgttatttagagttctcagctaagccgaaatcagagcagcgtgggacctgtagagagctgtgctgctgagaagatgcatagccacgttccttgttgttacagtctgtgcagtgcccgtccttgagggtgtttgacgctggcattggaaaaaaggaacccttgttttccaagaactctgctctctctcagcttgataagcatttaaaaataaaagctgcacaattgaaattggcagtgcatcctcattcttttgtctctctgtttatttttttccctcatccctcaacatgtgtgctacagcccatggttattacaccctcaagaatgatgtcctggaactcagcgagcttgcaccaaggtctgcccgccctacactgtttgaagctggctgaggcgtaagtggcctagcactgggaggctgcagattagccccaacagctccatctgtggcacatttcccctttctcctggagctgttgcctggaattttgagttctagaatcccaattgtcagctcaatcttgttagtttttgtagttaacttaattgatttgtttacctctccattggaggagctcaaaaagaaagtactttggcactgataaggagcagttctgttcttcctttcaaaatagattcttgtgagctaagatttcatatcaaaaagctacagtggcttaggatagggaaaaaattctagttttcccagagagcagtcctgtttctaaaagattactagtgccacattcttccattttcagaactatcttggtttagctgatcagttttatactctagccagaggaatttagggatgttggagggaacaaagaattctccatagaaactgtggtgtgtgtgtgtgtgtgtgtgtgtgtgtgtgtgtgtgtgtgtgtgatgactttgtgaggcagcaccagactgttctaaacatcgtatgcagattccactggagtcatacacatatatatgaatgacctcaacaagaattacttgatcgatagcagtgaggactggctttcccatttgagtgtgttctggttaaagcaacttccaaacaacatgtcacttgttctagcatttctggttatcgttgccacttggttgagtcagaacctggaatgagtttggttagggtgtagtttcaggtttgcaaacttccttcctagttgatgctagcaaagtgtgagtgcctaatgtaactggatagtgcctgatgtaactggatagggtgttactgcaggttaggaatccttgcttctgctggctgcttagactgaacttggtattactgcttcccaaagaatagttttggtttgaaaactgaaggtcagcagttcgaaagtactgagcttgaagccaattctgtggtttgtcttaagccactgggccagcagcactgtagtcctgatcgattgatcctcaacaatatgaaaccacgaacagcaactgccagacgaaactccatctcactccattcccttctccgacatgtctttctgcctaggtcccctttctttctcctcgattgcttgtcttctccttggttatatattttacttttgggggtttatctttttccatctctctgtctctttccataacagtttttaataatgttttagttagttccagccttttccctgaatggatcccattggaaaatgcatttgaaaggaaacagttatacacttcccctcctttgaaactgtttggcaccttttccagtgcagtaaaccatacaacatgtattttcaaagtttccaaacacagacatgctggcgttaaatttatgaaaaatattttactcagctgtatggtaactgtgactttcagagatcctgatcacatttgaaaattggtggcgacttttggaacctcaacaggtttttagatctctataggaaacatagccaaactggctcttgggaagtctatggcactttgagctttggccttgatttgcttgttgggcaggccaaattgaggcagatgtagatgtgggaattctcagtcacacccagaagctaaagggaaagtctgtaagccactgaaggataatgcattgctatgctgggcctggggacaggagagcagtcctcctcctgttgaatgcgaccaaggggagcagtaaagtaaccctgactgtgtggctcaggctttgcttttgagactgggtctctggtggctaaagctggctttgagcttgctgtgtactcaaggatgaccttgagcatctacttttgttttttctgtctcctgggtgctaggattacaggcatgtggcaccaggaccagttttatttcctttgcaatgtcattgataagaagagctcattattggcattcaaagcacgtgatactgctaatgttataaatacttacctagctttccccttttaaacctgtggtttagttaaaattgtattagaggcaggtttaggtatttgactgaggttagagtttggtcagtaaaggcagggattcttctcaaggatccgagcagttgatttagattaggaatactgtttaagtaagaagccttttagaacagggttcttcaaattgctcaaacagctgcatcacatcttggctcacgtagctttatgtactacaccattttcagcttttctttgcctatcagcttgacaggggtgagttctgccttagagcattgagctaaattctgcactgccttcttaggccaaaagctgcttaaaacaccttacagaacctgggtatcctgcaggccatttgtcttactcagtccaattaacaagagtttatgtaggaattgggggaggggagaacatgatcaaatactcctgtctcttcttccccaaatgctgggatcacaggattttaaaactactcacaaagcagaagcaggaagatggtgaactagagaccagtcttagctacagtgtaagttcaagaccagtcctagctacagtgtgagttagagaccaggtgggcaacttggtctcaaaatcaaaaatcaaaatggagggctggagagatgtttcagaggttaaaaacactgactgctcttgcagaggacttgggttcaattcccagtacccacatggcaccacacaattgtctgtaactccagttccaggggatccaacaccctcacatagacaaatgtgcaggcctaacacctgtacataaataaataactgtttttaaaaagtaaaaaagaggtggtaatgtgtttttagcatatctggagcctactccctagtactgaaaaactccagcagtgtttatagcagggattctgtagttactgttgactgtattagctttctgttataccagatactaagaaagtcagtttaataggggacatttattttagctgtcatttccacaggtttcagtccatggttggctgacattgtcattttagggcctgtaatgaggtagtacataataataggaagtaaatggcagagcaaagccccttggctcaggtgtaaaaggagagaaggaaaggaccaaggtgagctccagtgcagcttcccatgaggctccaccttttaaagcttctcctatctcctgatagcaccaaggtgaggaataagcccaaatatagatagaactgacaagtttgcccccacaaatacaaatttggaatacctggcaaaggcagagtgtccattctagattctttaggtcaataggcttactggcaccttgctgggttgctagttactttcatcttttgctgcttcctcactttcttccttggcatcattgttttattttgcagttattctcttgacctcatttggactttaaagctagaggttccacagtgttggtattggatgaagtcatcacatataccagcttgggtattgattttggactgtgaaatgtaggacctcaccttcaaacattttatccttatgtcttagtcttcttttgccatgaataaacatcattaccaagacaatctttgtaatagtgttacagtgtcagaggtttagtccattgtcctcatgtaagggagcatggcagcatgcagggaagtgttggcatagtaactgagagctacatcctgatctgaaggtggggagtgcggggtgggatggagttggcacatgctcttgaaacctcaaagcccacccccactaacatacctcttccaacatgccacagttcctaatcttttcaaatagttccattccttggtgattaagcatttaaatatatgagcatacaggggcaggggagggggcattcttattccaaccacagcacctacctacnnnnnnnnnnnnnnnnnnnnccccccctctctctctctctcgccttcctgccttcgtgccttcctgccttccttccaagacagggcctcactgtgtggccttggctgtcttcaaactcagagatccacctgcttctccctcccaagtgctcatattaaaggaaagcatgatccactgctgtccttccattcttcatttttaatgctggatggagagatagatggatggatgccttgatgcatgtgcgtgtgaatgcatttatgtatgtacttatttgtttgtttacttacttattgatttttcaagacagccctagctgtcctggagctcactttgtagaccaaactggctttgaacttagagatcctcctgcctgattattaaatacaaatgctgggattaaaggcattatacagcttccacctggcttaattccccttttttatgtttttaaagttattttttacatcgtgtggtgtgtgtatgtgtgtttgtagtgtgtggtgtgtgtgcatgtctgcccaccatgatgcaccctgaaagtcagagggcaactttggaggtgcattctatacttttaatctttttaaaagatttatttcttttatgtatatgagtacactatatgctttcttcacacacatgaggaaagggcatcagattccatacagatggttttaagacaccatgtagttgctgggaattgaactgaggacctctggaagagcagctagtgctcttaaccgcagagccatctttccagcatcgaattctctccttctcccatgtaggtttcaaggatctaactcaggttctcaggcttggtggcaaagtgtccttatcaactgagccatctcagcagcccatctttttaatacttttattaaaatataattagtatgtgttaggctgaatatatttaatgtgcagttgtccttgaacttatgatctttctgcctcaacctccagattagctgggattataggcctacatcatcataccaccttagataaattttacataaatggaacttgatgctgtatactctttacatgattatttgaacatactttgtgctgtggaacgatgcattactttttctttattgttaaattatatgggtataccgtattatttttatctattcacttgctgatagacatttcttccctcccccacccccattgataggaacaatcctggtacgagcattccagtgtaggtctttgtatggacataggctttcatttctctgggtcaatgcctaaaaatgtgatagcatgttcatttggtattttttattcttttagaaaccacaactgttttccaaactggttgtattggtttttttcccactaattttttaatttattcactttacatcccagtcgcagcctattctcctcccagtccccaactcacacagcccctcctcccctcctcccctccctatgcccccttctcctctgagaagggggaggcctcacctgggtaccaactcaccctggcatatcaagtaattacaggactaggcacatcctgtcctactgaggccagagaatacagcctaattaggggaacaggatccataggcaggcagtagaatcagaaacagcacccctctaccccatgcccccaccccactccaattattggggggcccacatgaaggccaagctgcacatctgttccatatgtgtgagtggcctaggtccagctcatgtacactctttggtggtggttcagtttctgggagcccccaagggtctaggatagttgacactgatgatcttcttgtagagttcctatctcttccaggtcccttaatccttcccccaatttttccacaagaccccttgagctccatctaatgtttggttgtgagtctctgtatctgtttctgtcagctgctgggtggagcctctcagaggatagttatgctaggctcttatctgcaagcataacagagtattgtcagggattagttcttgcctatgggatgggtttcaagttgggccagtcactggttgtacaccccctcaatctctgctccatctttgttcctgcacttcttgtaggaaggacagattttgggttgaaggttttgtggttaggttgatgttcttatttgcccactgggagttctgcctggctacaggaggaggtggtcacttcaggctccatattctccactgctaagagtcacagtttgagtccccctcatagactccctggaaccttccctgttctaggtttctcaaatgtcctagagataccccttcactctcctgcccacccccgctctccctacacttgattctccctcctcccctctcctcttccctctcccacacagttccctcccttgaaccacctctgatgtctattttattttcccttctgtgtgagattcaagcatccaccctcgggccctccttgttatttagattctttgggtctgtggactatagcatgggtatccagtgctttatggctaatgtccatttataagtaagtacataccatgcttgcccttttgggtctgggttacctcactcaagatattttctagtttcattcatttgcctgcaaatttcatgctgtccttgtttttaatagttgaatagtatattccattgtgtaaatgaaccacattttctttatccattctttgaatgagggacatctaggttgttttcaatttctggctattaagaataaagctgagcccggcgtggtagagcacgcctttaatcccagcactgggaggcagaggcaggcggatttctgagtttgaggccagcctggtctacaaagtgagttccaggatagccagggctatacagagaaaccctgactagaaaaacaaacaaaaaaacaaacaaaaaaattgctgggttctcaggtaatactgtgttcaattttctaaggaaccaccagactcgaaaaaaaacaaaaaagaaaaaaaaaaaagaataaaaaagaataaagctgctatgagcatagtagagcacgtgtccttgtggtatgatggagcttcttttgggtatatgcccaggagtggtatagtggttttttgaggtaaaaatattcccaattttctgagaaacaaacaaattgatttcagagtggttgtacaagtttgtgctcccatcagcaatggaggatttgcacttccctgatgactaaaggtgttgaacatttgtttcttagccattagaaattcctctgttgtaaattctccatttaactttgtaatcctgcccccacccctgcttcttaaagtttcacttatatgagtacactgtagctatcttcagacatatcagaagaaggtatcagaccccattacagatggttgtgagccaccatgtggttgcagggaattgaactcaggacctctggaagagcagtcaatgctcttaaccactgagctatctcttcagccctatgtaccccattttttaaaaattaattttatttgtaattcattttttatactccatattccattacccacccctccccattcaccatctgacttctccccaccccaccccatctccacgtggatgtccccacaccccaccccacctgatttctaaactccctggggcctccagtctcttgagggttaggtgtttcatctctgaatgaacacagacctggaagtcctctactgtatatgtgttgggggcctcatatcagctggtgtgtgcagtctgtttggtggtccagtgtttgagagatctcaggggtccagattaattgagactgctggtcctcttacaagatcaccctcctcctcagcttcttccctaattcaacaacaggggtcagctacttctgtccattggttgggtgcaaataactgcatctgactcttagagctgcttgttgggtcttttgatagatccctttctgtgagcgctccatagcctcagtaatagtgtcaggctttgggacctccccttgagctggatcccacgttgggcctgtcactgtgtaccccattttttaattggattatttggtttgttgatatctaacttcttgaattctttatatattttggaatcctggctctctgttagatgtaggattggtgaagatgtttttttcccattctacaggctcccattttgtcctattgatggtgtcctttgccttacagaagcttttggtttcctatttatttatttgtttaaatttatgttatatatgtgagtacactgttgctctctcagacacaccagaagagggtattggatcccattacagatggttgtgaacctccatgtggttgctaggaattgaacccaggacttctggaacagcagtttttaaagttttttattttatttttttaaagatttatttatttattttatgtatatgagtacactgtagctgtacagatggttgtgagccttcatgtggatgttgggtattgaatttttaggacctctgcttgctccagtcaactccgctcactcagtccctgctcattccggcccaaagatatatttattactatacataagtacacggtagctgtcttcagactcaccagaagagggtgttagatctcattacaggtggttgtgagccaaaatgtggtcgttgggatttgaactcaggaccttcataagagcagtcagtgctcttactcactgagacatcttgccagcctcaacttgtcatttattaattgttgatctctgtgcctgagcttttgatattcagttcaataagttgtctcctgaaccaatacattgaaggctgttccccactttctcttacattactggatttagtatatctggttttatgttgaggtctttgatccacttggacttgagttctgtgcaagatctatttgcattcctctatatccaggtaaaccagcaccatttgttgaagatgctttcttttttccattgtatggttttggcttctttgtcaaaaagtcaagtgtctgtaggtgtgtgggattctttctgggtcttcaatttgattttattccacccatctgtttctatacaaataccatgcagtttttattactattgctctatagtacagcttaaagtcaggaatggtgatatctccagagattcttttattatataggattcttctagttatcatgggctttttatttcccatatgaagttgagaattgttcttctaaggtctgtgtcttagttcgggttttactgctgtgaacagacaccatgaccaaggcaactcttataaggataatatttaattcgggctggcttatagattcagaggttcagttcataatcatcaaggcaggagaatggcagcatctatgcaggcatggtacaggaggagctgagagttctacatcatcatctgaaggctgctagcacaatactggcttccaggtagctaggatgagggtcttatatcacaaacccacagtgacacacctacttcaacagggccacacctctgggctgaacatatacaaaccataacaatctgtaaagcatgaccttggaatttttatgggaattacattgaatctgtagatggcttttggtaaatgaccatttttactatgttaatcataccagtccatgagcatgggagatctttccatcttctgatatattctttaatttctttcttcagagacttgaagttcttgtcatacagtacacgtctttcacttgcttggttagagttacatttacaccaagttatattatttgtgactattgtgaagggtgttatttccccgatttctttctcagcccatttatgtttagtataaaggaggcctactgatttctttcagttaattttgtttccagccactttgctgaaggtgtttatcagctgtatgggttctctggtagaattttggggtcacttatattacctgacttcttttttccagtttgtatccccttgatctcctttagttgtcttactgctctagctagagttttatgtactttattcatgagatatggaaagagtagacagccttgtcttgaccctgattttagttgaattgcattgtttctcgccatttaatttgatgttggcttcctgttaaaactgagtgttttactggatggtggcacacacctttaatctcagcacttgggtggcagaagcagatggatctctgagttctaggctagcctggcctacaaagggagttccaggacagccggggctacacaaagaaactttgtttggggagcgaggggagactaaaaacttctaagaatttcaggtgttggacaaactggccagcacttgtccatcttttatatattatagccagccagatggttgcacagttgtattttatgccttgttttacattttccttgtttaaaaaaaaatgagaacattttcatctatttatttggcaatcatgtatttatttgctcaaatttccatttattatttaagctaaaagaatttttgggtctggaaaaataactcagtgggtaaaatgcttgataggtatggatgaggatctgagttctacctcttggaacccttgtaaaagtcaaatgtagtggcatatatctataactgtgctgctagagagcggagacaggcctagccctcccagagggattactggctagaaagtattggcaaaactgcaagctccaggttcagtgagtaaccttgtcttagaaaattaggtgtagagcaatagagaaaagacatctgacactgatcgaggttccgtatgcactaggaaacatatgcacatacacatactatctatctatctgtctatctatttatatatatatatttatatacatatgcatttatatttatatatacatgtatataaatatatatgtatatttacatgtatataatctcagaaattttatacaaaatttttgggacagtatatgtcctgaaactcactgtagaccaccaggctgggctgtaagtcacagagttctgcctgcctctgccccttgaatgctgagattaaagctcagcttctcgtgagaacatttttctttgtcttttcatttttgtcttttgaaaacaagcattttatcttttgatgaaaacccatttagttttttgtttgtctttaagtttaatgttacagatatagtgccaattgctattcttaaaggattgcagctgagctaccaattttttaaaaatgcatctcagtatgtgtctgagtaatgatacaaagatgcaataaaaatgtacaagcaatttttatttatgaagaaaacattgctaagactccagttttaatcaactttttttttctttgactgccttttcttgaaaaatacatataccattggcttgagatttgcccttttgcttgttttttgagagtcaaggcatggttgcacagttcacttagtgtttcctactggctgtccttgtcatctttcttccctttctcactagcttctcctcgtgctgctgtccgtgcactgtacctatctgatgagtcatagtcttgctgaaggaactgtcttgttttagtccctgcccatcaggtgcagggtctatcttcagtgaacctttcctttatcttattttttttctgttgcacctgacattcttttgcttgggccataggatacctggacatcgccttcatgtcaggctgcacatcacaaaaattataaccaggcagcatctggacagggttaccaaccactgctcattgagaagctgccctccaaatctgtaaattacctttttatatttctaaaattagtttctgacatcctgtaacaaaatcttttagggggttttccttttgttgttttcttattttaaattttttagttggaaataatcatagattcataggaagttattttaaaatgtacaaaaaattgggcatagttgtagtcgtctattaatgtacacctttaatcccagcactgagagataagagagacaagcagcacctgtgaattggaagctactcagggctacacagcaagaccatgcatctaaaacacaattcaaggcatggagagatggctcagcagttaagatcattagctgttcttacaagaggaccaggatttaattcccagtgtctacgtggtgactcacagccacgcccagtcccaggggctctttctccctcttctagcctctatgggttatgcattttggtggtttacagacattgaggcagcatacccatatacattaaatttaaaaaacaagaggaaaaatacaaagcctaaataggattgtccacatctttaattccagtttttaggagacagaggcaggtgaaatttggtgagtttaaggccagccaagctgcatacaataaagtaaacagaacaagagcaacagaacgaaagcctactaagagatcctgtgtactgacgaccccttgtcccagtgtgtcctgagtaacttgagtttatatcagatcatagcacagtctgcagcttttacctcgcttatgtgtgtttctgtacatacaggctcatgaatatatgtgtggatagtttgtgtgttttcttatcacaattgtagtttcatgaactattccaaaattgatgtacaaaactgttctataattataaagctcctcattgtttctgtttagaatttttctctttcttctgtccttaattattaactctttccagccatgaatctcttttcaccccaataattagattatttaatagtatataaattgaattacataatgtatagccatctttttttttttttttttaagtcaaggccttatctagcataggctggccttgagcttgctatgtgtctgaggataacattgaacttttactcttcctgccttcaccaagtgctgggattacaagcatgtaccaactcacactcagttctagtgtgtaaccttttcaagttggatctatctgagcttgattttctgaaggtgtgtacatcatactgcatttaccagttgcttatttctttttattgctaagcgtactttgggtcatgaatgttacacagtttcttgaattcttcacctgtacaggaacatttgggttatttccagtaaggctgttatgaataaaaagtgttatacattttgtaaacaagttttcatttctctagatttatcgggagttaaattgctagatattatatcgtaaggactattttagaagaaactgcccaaccatgttttagaatagtagcatgatttcttttacattcttgtccataacatattctcagcatttaacagtttggtgttattattctctttattatttcaaccatttggataaatatactaatctcattgtttttgttttcatttccctaatgtctaatatttaacatgttttcatgtgcttattttccatttagtaggcaatatgaaatgcctactcatgtaatttgttcattttataaatgcactgtttgttttcttgttatgtttgtaagttctttatatagtccaggtacttcctagtctagtggttggtgtttgatagatgatatagtttgtaatttctaatctttctctataacttgccatttcattttcttcatagggttttttgtagagcaaaaggttttcacctcttaaattacttatgtaccttttatttttatatgtatgtgtgtgattgcataagctgatatgcctcacatacacgcagaatcttgtggagtagagggcatcagaatccctggaattggagtcacaaacaatggtaagctgtgggtgctgagccagggtcctctggaaattcagaaagtgctcttaatcgctgagccatccctccagcaccatagtggtagtcttcatcttcctcctcctcctcctcttcctcctcttcatttatttttatgtatattaatgtttcacctgcatgtttgtgtatttttctatgtagtgtgtatgtgcctggtgcccaaagaagccagaagagggtgtcgcaccctaaaactgagttacagactgatgtgaatgaaccaccacattgatgcagtaaaccaagcatgggtccctgcaaaagcagcaagtcttcttaacctagttagttagttagtcagtcatcctttttgagacaaggtttctctgtgtagcccaggctgtcctggaactcagagatccacatgcttccaccttccaagtgctacaattaaaggcgtgtgctaccatgtctcgcaagatttttatttttatatgctaaatctatcagctgttcctcttctgaattgggactttaattttaaagtcttagaaacccacacctttaatcacagcacttaggaggcagaggcagagaggcaataggacctgtttaagtttctggccagtcagggatatatagtgagaccttaatttaaaacaaaaaaaaaaggaggaggaggaagaagagaagaagcaagaggaagaggaggagggaaaaaaaagacaagctgaagaatgtttccatgcttaagagcacttactgttcttctacagtagagtctcttctagcttccataggcactaagcagtaacatagtgcatagacatgcatacatgcaaaaaaaaaacaaaccctatattaattaactaaaaaaatattttttaaaaaagatttagctgggcgtggtggtgcatgcctctaatcccagcacttgggaggcagaggcaggtggatttctgagttcgaggccagcctggtctacaaagtgagttccaggacagccagggctatacagagaaacccctgtctcaaaaaaccaaaaataaataaataaataaataagtttatttatttattatttatatgtaagtacactgtagctgtcttcagacacatcagtagaaagaaagactttctggtcttaaaaaataatttctaaaggaaaaaagaaatatatatttttttaaaagatagaggaggaagagcaggaatagaaaaactatctttactttgagctggcaccagccatcactcctcttcccttttgatttgctcttctgtgaaactttttttttttttttgcccatttctttagatgtcagtataggagtgatgcctcccataaaatactcagtaatgttttgagataacatatttaaatgttgtgcacctaacttttacctcactatgtcttagatgctctgatacagacctcatgtgttgtgcatacacatcacatgtagctgtggtagactcgtactgtgcatagttaagcccacaggtgagacaggcatgtatctacttgagatgagcagtacagttcttgagcttcctcatggttctgattatcaagggtgtaataatttaatgttactttgtcctcaaggagcttataatctcattggtaaaacatgccacatacataaaatactagggtaaggtattgtctgttagtgtgcatcagagtacattgtcttccacatttttctgccctttgtattatgtgcattgagcagcttctgggtgttgttgatagagaatgtgtgagggtaaagggggctatacagagacttaggagaaaagagtcatgtggggatatgtaattaatttttatactttccccagtaaaccatcgaccctttttatgatgtcatgagggattccttaattttgcagctgcttcctgattacgtcagagaggaacctctcaccctacagcctagagctgtactcctccaagaattggaaacaaatgaagtgctgaatatctaatagcttccacagggatagccagttcagacttcccaggcctactccagcaactcttccccaagtatttctgaccccctgaagtgtctttgttctgggaagacaggatttggcccaaagccaagtatgtgtgtttggcagggaggtggtggctggggacttcttgagacacactacttccctgtctccaggtgttctgcaatcctgggtctctgcccctttcctgcatctcctttgatggaggttatctttcttgagttttccagacttctggaactagaagacggtcccctttcccagttgttacctctttcttgccctccccatgtcatttgttttcactttctcccaccctcctcctagcggacttctcacacttgcatgtcacttatttgctgttataagggttatgaaatggtctttatacaaagtttctttattggtgtttttagagacagtgtgtcttggagccttggagcctgggttggctcatgtagctgaaatgtaacctgaagttactgatcctattgtttgtaactcccaaatgctggcattatgaccatgttcgcctatgctctgtccacatagttatgtacttcctcttcattcagacgcatttgtgctcggttagcttttctaactgcccctactccattacccttttctagctgccctaacctattgtggtgttactaggttaatggtgtgagtatgaacgtgtctgcaattgaatccagggcctcacgcttggcaagtagtcctctactgagcgattataccatcaactcttaactagatcagtcttcacaaaatgtccaacatagcttcattcatgaagcttaagtgagtgctctctttctgtctgttgaggtcaagtttctttcagcattgtaggctctgtagtttttggctcttgttatgctataggcagacttcattgagtgttttgagcattccagcatgcatccccggggtaatgtacacagtccctcctgtgccatccatttctttcagtgttcatatcttacagctcaacctagaaatggtctctttcatttaaaatctttgatagatagtagatgaaaatattttcattcttttcagagacaaaaggtgtctatttccctgctcccctatgagttgtcttcttccttagattatcaccttcctgtgggcagaatcctattgaaatttctgtttcctccaattgcacacctagataagtatttttttcaaataatgggagaggttattttggtaggaattttaaatgctcttttcctacacatctactactttgaaaagaacttttacaaaaaaagaagatgaagaagaagacattgcctgtgacagttttacagtcttgtaagactcaactgaagcatcaggtgtttcaattaaggttcatcataaggaaactttctccgtccctctgtctgacctcttgactataccctgtttatgggatgtgtcacagcttgtcttagactgtgttaatcgaactcttccaccattgtcattgtatgtagcttgggtctatcagtgttccattcttctgactcattgattccacgcttaagggaatcaaatgcccaagggcaagaacatctttgcttttgatctgagatcttactgcttccttctacctcctccttagctagccactgtcacagagaactctgtggctcaagcaacagcagaaagacactctctctgcccacttcctgtagacagggagctttgggtgggctgcacaggaactatgccagccctgcatctaactggtgactgacgcatgagagaaacagcctgatgtttgaaagatacaaaagagccaacaaattacctccaggtggtgctggcttggaggtggctagctattcattttctctgagagtagatgggggtggggaatcagtgaagaagtggttgactgaatttttctttagttattattagtaatgtagccaatgcactagttgcttgtctgtgatagaatgggtggtggatccagtgtcctctgaatccttcccactgctttcagggtagcgaacttacatatcactcaccctgagccagtctttcattactgttcccatccacttgtcaggaactggctatgtgtactaagaattctgctggtttcactgttggcaggcttttgtctgtcaccagccaaaccccatccaactactagggttttctccaaatctctcccatacaacgacttggtaccttatcccaggagttgatcaaaaccagtaattctgagtcactgtctcttggctgggcttacaggtccaagcaggtgggcctgcctctcttctgctcccctcctattccctccccacctctctgcctcactcccatttcctgcaggaggatgctttgccatcctggagccatcaggcacagctttgctttggcagcaccattgcacacacacactggtgggagaggggacgtgtttatcacttttcctggagattatctgtttaagcacttctctgacagttacaataacaagggcagtgtgttgtgtttccagcagaaggacacttgctgttgaaagatgtatagcactaattagaaatacataacatccggccacatggcagccttctcccggccgccccatttcctgatttcatacaactttgacgacagttggtttatgttttccatgaatatgttctcaaaaaataaaaaatgagaacgtctccctgttacataggagcaagaagaacatttctgcctgagagcaggtatttggccacaggaacactgggaagtatggtcacttgcccacttgtaggagggaccaaaaccaattttagacctcagcggactttcttggtaagaaatatttccggctgacatccctagccaaaaccatccccctaaatccttaagaaagcctgcttttggaaagaaggggaaaggctatttcacaatgttaatgagttcttcagctcatgtcagcctctgctacctgacacaaagccagaggaaccatgcaaatatcaaggcaaacaatgccttttcctccccacccacatcacttgctggtctgagtgccagcacaacttcagatatacatacatacatacatacatacagacagacagacagacagacagatagagatatagatatggatatatggatatatagatatatagatatggatgttcattagactagacctagattcctaaatctagtcctaaagtaagtgggctctggaccgtctagatgttgttttcctacctactttcataaatgaatactctcagggagtggtatcttgacatttctagctcataatgcctgtatgaggccaagaacatcctgaatatactacacactcaatacattttttttcacttgaaatgtattgggtccatggttatcatagttacttgggtaaatggtaattctagtcaacctactaaaagatcctttagttacaaaacccacaatttatttgtagctatgttctctactgaatttagcatatcaaagatgctctgtatgtgcttgtcttatgaccaagccatggacacaggccttttgttaatggttgccagatagcaaggccagtctagggatgaccaagacccacacattcttagatagcttgggatatgtctacctgcttagttagggaagaacaccccttatttgtaccttttcttcacctagagcacccatataagcaggcagtgtgctctggagcctttgcctaagagaacatggtgatagagaggttaaaataaccatgcaaggcagctgcaaaactgccttcagactgatgtccatttttataccagaggctcctgtttttacagagcttccatacctgatagcagtacccaacccatactgttttggtttttcgagacagggtttctctgtgttcccctggctgtcctggaactcactctgtagaccaggctggccttgaactcagaaatctgcctgcctctgggcatgcgccaccacgcccggctccaacccatactcttgagaagacacagataccattgcttgtaagcagttcattcttgttgtgcactagctcccaccctgaactctgagaaataatgtagctgtttattataaaacttaagatgagcttggagaaagtcctcaccctctgccagttatgttgctaacgagaatgaactttatacccagtttgtggaacaaagacttcttcctccatctctgtagcctttgcaggtaacttctgcctaaaatgtccaattgatcagtggatgttaattttatcaagtgtttcaagctaccagaatgtggcctctactcatcctctcagcttcctctctcctggccttattccttcactttggactttgttgcttcgtaaaggcacactacagtagtggcctgcaggaacccacatttagatagaatgggattaacagtgctgctgcctatggcttagggagcagggagacactacacctttccttgggatgagttacaggtcttcctctctctgctcatatcctttctcctcttgatgcttacatgcttgttatctttgtctcttttttaaaaaaaaaatattgtgtgtgtgtgtgtgcttgcacttgcatgcaggcgcaagcctatgggttcacatattataatgcaggtgttggagccagagaaaactttccagattcagttccctctttccactacaagggttccaggaatgtaactcatgttgtagggcttagtggcaagtgcccctacccattgagccatctcacctactctcttgtttcctatctctttaaacaatggcttatcttagcataagactaggagtgatgacttacttattctaatctcatggattgttacgacttccttacagcctgtcacagttatatttattgtaaagggtgacatttgggaccattgggcatctggaaagatgatggaaagaccacaattgaaggattgctccccttatgctattcatatgttgagcccttctaagcagcacctggcttctcacatccagcactttgcaagtgctttggagtaggcattgtgttcttcagtcattcttgctcctgtggtgtgaagacttaggaatagccatggttgtgtagtgtctcctggagtaacttgtttaggtccttggcaaactagtaagctggcaggtcaaacaaaatgcaggcagggacagagatcaaatgtgtggataattatccttttaacactaggagcttgagttttcctgtgaaggggatcatcagattagctgctgccaaagctggtgagtttggccggccactgtgtccatctccctgtgtgtgctgggtgtctcccctctgaggctgaggctgaggctggactgctgctcctggcatgttgttattgcctcataactggatgggatggcagtgaagagatcactgagagtatgtaggtaaaggcagggatgtggaagtattatgaagactaactctgcccatcaacaaagtggctcctctcagtgacctaaaactaggtggaagttaaagccaggaagtaagagtgagaaaccagggtgctggcgttagaagccagatttactttttaacccgctgttgaggggcgggggaaactaacactgatctagtacattatgtaataagcattgtttttgacaaaggtaattctctcagcaaaaataagttaatgtgtttttgtgtctcatgtgtgctgtcttaggatgaggaatatagagggcctaggcctgaaaccaaagttggtgatctaagaagataaattgtaaatgtgttattgactgtgttcctgctaatgaaataaggttttggtactatagctttatattatcaatagctaactaaaacagactctgcaactccagcttattttgtgcactttgaggtaataggacttaggggaagtgatgtgataaagaatttatagaggtggtgaaggaatcatttttcatcggtgtataacctatgatgagctgcttatgctccactaaataataacctatacccatgctcacactagctactttaataataacctatacccatgctcacactagctactttaataataacctatacccatgctcacactagctactttaataataacctatacccatgctcacactagctactttaattaatcttggtgggtcactgaaaaaatggagggcggagtagggaggtgcacatgatctaaatgcactcatatatggttaccaaagaataaataatgttttttaaagaaatggcaggggctggagtttgggtttggaggctcacagtgtccgtaactcccagaggacctgtctggcatccccaagccctagccatgcacatcgtctgcacattcacatgcaagtgaggcacacataaaatacaaagaaatctctaaagcaaaaaaattaaaaataaaagataggaaaataagagggggacttgttgggaactacaaggggttcagagggactagcaaggggtaagagagggtaaagagtgaatatactcaaactacattatgtacatgtataaaattattttaaagataaaatttaaaacaagatacaattgagttatgtaagatttcacctttttccaatgatctaacgttgagcattctagaaaagaaagtgactttgtggtattgccttcttacatacactctctttgctagaaatttctcacaccgtgtaatctagaagaacctaggggttggagaggttgctcagtggttaagagcactggctgctattcccaaggacctgagtttaattcccagcccccacttggccgttcacaactgtctataactgtctagttctgaggtatctgacaccatcacaccattgtatataaaattaaaatatgtatatgggagagactaaaatggaattgtgttaaattttatgtaatgagtggtacatttttaattaaaaataataaattaaaaatttaaaagacttgcataggggatcttgtgatatcaagcatccttctgtgtgcagggcatgctggcaagtgctatatatataatataaagtcataaatctacttcaagagagcttacaaccaccacctgtcattttagggaaagaaaacaaagctgagcactgtggtcagggagcagagtagcacttggcccctagagtgtgatggagtttcctttgcttctttgcagactgcttctcagaggagtgtcgttctgtgatccaggaacaagctgcatccttgggcttggctatgttttctctactggtccagcgctgcacatgcctacttaaggactctgctaaaggtaagcaggaggacccctggccactgggttttccagttgcccagccctgtccagatgaaccttagagtgctggtgctcagtcttctctcagctcttcggtctgtttccttccagcatgttcttctcccttttgttacattaaccagcccatctatgcctatagtctgatggcctgtcaggtcctctttcttctttatgactctcttcatttccttctttactttagtagttaggaatttcatcctgcctgtgggctgttatgtgagatctttgtttattggctttgttttcattcattcattcattcattcattcattcatttatagacagtctctcttaatgtgtaatccttgttgacctggaactctctatgtagaccaggctggcctcaaactcacagatctgtctgcctctgcttctgggattaaaggcgtgcaccaccacacctgaatttttatatgttcttttatctttaaaaagacctgaagnnnnnnnnnnnnnnnnnnnnnnnnnnnnnnnnnnnnnnnnnnnnnnnnnnnnnnnnnnnnnnnnnnnnnnnnnnnnnnnnnnnnnnnnnnnnnnnnnnnnnnnnnnnnnnnnnnnnnnnnnnnnnnnnnnnnnnnnnnnnnnnnnnnnnnnnnnnnnnnnnnnnnnnnnnnnnnnnnnnnnnntggtttacagagtaagttccaggacagccagggctacacagagaaaccttgcctggaaaaaaaaaaaaaagacctgaagagggactggagaaatggctcggtggttaagaacactggctgttctttcagaggatccagatttgattctcaacactgatgttagctaacagccatcagtaacttgaattgcaggggatctgatgctgtcttctgccctctgagaaccaggaatgcaagtggagtagacatatatgtaggaaaaacacctacacacattacatataaaaacaaatacaaaggtctgaagactacttatgagtcttcactttttttttttttttttttctttcgagacagggtttctctgtatagccctggctgtcctggaactcactttgtagaccagactggcctcgaactcagaaatgtgcctgcttctgcctagtgttgggattaaaggtgtgcaccaccacgcccggcgagtcttcactttcattttcctatctccccagtgcaagggactgaacaagtttctttatgttttcacaattttattgttttgttttgttttgttttgtttgtgtttcaagacagggtttctctgtgtagccctgactgtcctggaactcactctgtagaccaggctggcctcagacttagaaatccacctgcctctgcctcccaagtgctgggattaaaggcgtgcaccaccactgcccggcaattttctgtttttatgcttttttatttctgtctttttggtatgtggtagctgctgtacccaccgtggactagctatcttgagctcactgaactaagcaggtgctactagccctcgccttgaggtatcataccagatcctttatattttaccctagaattctaccttatatcattgtagccaagaaaggtagtagtaaaagcataccttccttttggtttctgtatcagtatttgcaagcaacaagactcttccctctgttgtctcactacaccagtgttgtgaatgcctcctgcttctagagttgccttttattcaaaggtaggaacaatttatgttgaaacgacttcatatttacaaaacagttgagtttagtggcttattaccataaacccagtgactcaggaaatcttaagaattccaggtcactcctggctatatagagagggagtttgaggtcagactggactacatgataccctcaaaaacacaaaaatagggccagcaatatggcttggtaggtcataaacacacacacacacacacacacacacacacgcacacacacagagtaataataaaattcaaatggataatgtaaaacattatctagactcccagctttttctagactcccaggtagttaatattttactatgtctttaaacatgcacatgtacgcttattgtttttgttctgaaccattgatcttaggctgaaagcatgatggccctttggctctaaatacttactttgtatttcttcacactaaggatgaaatcttaacagtaccagaatctgggagctaaggatgtattcagtggtagagtatttgcctagcatttacagacctaggttatatccttagcaaaacaataagcaaaaaagaacagttgccaaatcaggggttggagctagagcaatggctcagcggctaaaagcacatattactgtcaaagcagagaacataagttttggtcccagaactcacattcttcacagctgcctgtaactccagctccaggacatccaaatgtccttctggcttccagaggcacctgcattcatgtatggatgcccacatatagatatatgcaagtacacataattaaaaataaaatcaatttaaaaaacaaaaatagaaaatcagtgctgatacagtaatatcattgaatatataggcgtaattcaatttgtacttatttccccgataatgttctttgttgagaaagaggcatttaaagtcactctgtagcccagtctgacttcaagctcaaaaattctcctggctcagcctcctgaatactagactcaacaggcatatgctatcatgcccaactctgacaatattatttgggctgcagggtcaaggggtggagtgttctaccctaggctctaatttaggatcacacactgcatttaagtctctttagtctccttcaacctatctctctttgtccttcataaccttgacattattgaaatacaagccttttattttgtagaatattccaccatttgggtttttctgatgtttccttctgattaagttcaagttttgcagttgtggcaggaactctgatgccatcttggcgctgtgctaaagggattctaaaacggtgaactggaggccagagtgaagacttaatgctggagcccaggagaaagacagcttgctggttctctctctgtcccactttcagagtccctgaggggctggtgcatggcctcacctttgagtcctactctcctatgaactcactctccctctgctaagaggttgctgctgtctcagcatgctagtcttcactcagcacacataggccccgttctcatgccttgtctctgcagctcagctgtcctctcctgaggaccaagaggaccaagatgacatcaaggtatcttccttcgtcccggacctgaaggagctgctccccagtgtgaaagtctggtctgattggatgcttggctacccagacacctggaatcctccacccacatctttggatctgcccttgcagtaagttggcctgccaattcttccacaccgtgacagtggttttagtgttcctaaccccccccacacacacacacaaacacacaccaccaccacacacccctctatgcctagtcctaagtcactgtctgcttccttttaaccattaaagtttccttctctcatcctcatttgaagcttgagttttccattcccttgtcacctgtcttgtccctgatgttgtgggttattttggcctattgtctaatcctttcctttaccttgacatctccccttttctcttgctctatggctgtgtcttgtttgtcctgttcttactttctcacctcacttcatcctgttctttttgttgatgttcatactgctgacgtgtgtgtgagacttcacctctctgcctacacttcagtttttctttgctaactggtctcacttcttcatcttcacttgtggcatttactgtgtgctggggatgagtgggtacataagctctcttcctcttcagttcactcattccctgtcttctcaccttgccctctgtgtagtgtctctcagggtatctgttggggtaaggtgtattgatctgaggatatatgatatttgcataggtggtctatatagatctgtgtacttgtagggcagcgattttgtggggcttattgatgtttcagaataatagtaaaacatacaatggaatttgccattgtaacaattttaatgtttatgatttgttgccatagattacatccagagttttatataaccaggtgtgttctttctttgtctgtgtttggattcagtcttctagctctgccagtcagagtactatttgtacttgtgtgtctgtggatctatgtatcttagtgtctatctgcaccaagtattaagttctgtgtttttacttctgtgtggttgtctgtctaaggacaattcagaatgcctatcagtgactgcctatgtggctgtatgtgttacatctgtatgatatgttttttgtttgagcctatgtccatttgcatctgtggtttttgtgtccttaagtttgtgtttaggttcatacatccatcctcgtagcagtctattctggtgtctgaatctatggcaatacctttttttttttttcctttttatatttatttattcattcatttgtttattttgtgtgtgtgaatgttttgcacacatggtatatctatgcactacatgtatacttggtaaccatagaggttagaagaggggattggatctcctagaattgtagttgtggacagttatgaactgccatgtggggcattgaaaattgaacctatgtcttctgcttgaacagtaagtgcttagctactaagccatcaccttttcaacacctaaatacgttttcaaaagtccatgcctttgcccaaatttatatattgatatgatgtgtttgttgatttaatcgtttttgtgagctaatatttgtctctgttggatgaggagtctgtgtgtgaggacttgtctgtgtcttcctgtctgtctcagcttgtctcagcttgtttctacttgcctttttttgtctccctttattagggagacaaactgccctactacccaagaatgatacacattttaaatggcttgaaaaaaaaatcacaagaatactaattcaaacttaagaaaattacatgcaagtcagagttcagtaatgttgtatgtgagcacagccaggttgtttatttttggtctatggctgttttattttatatcacagcaacagagctgagtttttgccatagagactgtacagcccacaaagcctacatcaatgactccacaaagaagacctgaccctcgatctctcattctttcagttcatattagcacagttatatctgcatgtaggtatcatctctattagttctttctctccaccccccctcctttctttctcttttccttcgtctttcccactatctctggatctttctttatgtcattgatttttctctctgatccactcaccactcagtctctgacttttctcttcccataggtgtatgcagtgaacactgttttaggttttgcaggctatgtagctgtgtgatttgtgttttggaacaagcataggtacctaatatttcatcatacatgtccagggctcttctctggtagaagcaaacactagagggtagaatgtgaacaccttagctgctgctgggaaatgaggaagggagtttgtctgggttggctgccaggcatgtatatctcctaaactcatgggtgacccacagagggaaggctgcagcagagatttctggtcagtagtttctgagctccctgtgtgggctgtgtagtcttgactcttcgcctgctttccttttaaattgtttccttgtacctcaccccaagaggcacccctggactcccgctttctctggttcctccctagctctagctttgtaactgtatggacagtcctcccagcatcagacagctcacacacttcctgtgagccttcctaggtttccagaatttgttccagactggaagtctcatgagcagggttgaaccctgagttgggcagctggagtctcacaaaagagctaacagacctgctggccaggggcagctgtttcccagcagtgatccctgaagagttagcatgtacagtctcaagtttttaggctattagtctgtaatgtgggcgagaaaatttgcaatttggggggaaaatagctaggaaaagacaactttctaagtatctacaccactgcttctgatatgggaagggcccttgagtagtcttttcttctgtcagggacagggaagcagaccatctgtccctagagcttgagtctttctgggttaccttagcccacatgcataggtcccttagctctggtccacccgtcttgggccgtcaggttgttaatccttctgtagctcttctcccctcatcttttcacctcctcccctctttggcttttgtttggctttggaaatgcagagcttatacaggaaatatcgggcttcatttgcttgaggtgctgagcctgtttcccctttggatgttggagctgactctgtgtgcccatcttttttggttttacgagacagggtttctctgtgtagccttggctgtcctggaactcactttgtagaccaggctggcctcgaactcagagatccacctgcctctgcttcccgagtgctgggattaaagacgtgcgccaccatgcccagctgagcccatcttttgacaaggactcaatctatagctggacacatgaactagaagggcatgggacacatgaatcctacttgcttcatttattcagacttcttcacaggaaaaaaccaagtctggcccattactatattgaatttgccttcccagtaaagatttgtagcttaagactcttgtgaatctaggcaggagatatgtcagtgtggttaggatttaggttcccttgttcctgtcttctccttcctcccctccccctcccatcatctccccttctctcttttcctctcccctccctcctctgccactcatcatgatcagcagctgactgtctccagaatgcaagtttaagtgtcaagcagcagttgctatccttgggcctgaccccaaggcatggtcatataaggactaagttcagcagagcaaaccttgtgtgactaacactaggggtagctccattttctagccttaagatctgagcattagaaaggtggattcacagttttaattttcctctttcctaattttttcctataactggctacctaagtactcccagtaaataccatgtttgatatcattggcaagctttggtggctctgtccctttcaaacttgtgtcttatagtcatccatccaatctatggacacctttggttattgaaacaaggtttttctctataacctggctgatctggaactcactttgtagtccagactggcttcagatttgtggcaatcctgcctaaccttgaagtactggtattaccggtgtgagtcaccagacatggcttttatgacgtcttcttttgaggctatagggaatggcataccctagttagttctatagaggtcagaaccataatacccctgacactagaaagttccttcttgcagatcttcattttgaaagatttaggaatgctctccagggagtacgaaggaaatggcttacacttactgccggcccctttttgtgctttcattggtccttgcctgcatttcttctctgatcttaagataaggtagctagataatctatacttttctcttgcatttcctctatggaatccacttccagatgatccctctgacctgttggaaccttacttcatcctgactccttcatttgtgccttctctccttggatggttagtcatggcacacaatccttcactgtccaatgttcaccattagctttcttggttctctcctctttgtcttttctttctagtcagatctactgttcctaggtaggaacatatggaacccttatggtgatggtgacaggatctcattactcttgaagagctgacaagggaagatttgcagagctatttgttcctttccccacagtggcatttagtgggtctggagtcagcatataggtaagaagactgcacttggctctgttaggagatgtgatagaatggcttcgtgtgccaggagattgtagtgggctgtggcaagtggcttccttgtccactgtaaaagacagtatagaggggtttggtcattttagaacagacttcagcgtttggagggaccacccacgtgactgtcaactagcacaatttcttagttcttctacaccagggcttttttgaggcaggaaaagcaggcagctgctttctacttcactaagtgaccatgaggaaaggtgttaatgtcagctgatggaagaaaagctcaacagcagtcttccatgaacccagacataggaactccttgtatcccaggaccttgggcagagccagggcagtgggacaacctacctcatttcacagtctctgccgaagccaaatcttccctcatcttgatctctagttctcagtaagtgaaagagtcaggggactctgagaacatccaaacctagcccagctgtggcagttggtttattgctttcagctggtacttgaacccaggtcctggtcttggaggctttcccaggtttaatccccagagctttctctgcagctgtatgacactgtgctgaccccgaatgaggataggaaaatagaaccagtgccaagccagagtctctttttcatttggagtctggctgtctgcccatgaccagggttacataatgggaaacatagctggggctctggagagcccgcgtttcaccaggctgcccagaccttcgcattctgacgctatatatcttcctaattgtagctcggatgcatttatcacagtgttggattggagtactgtatttttttttttttaaatctagaaattcctggacttgctgcttttccattgcttctcctatatagtctgcagatcatacatgaaaaaaaaaaacttatagggagccttctgaggctccctcatcagagagaaaaggggtgtgtcctcagggagctcacatatgttggccttgtagctgagataggaattcttgagttaaagaaacagctagttcgtgcacctcataggcaactctgaatgagaactaatcccaaatctaatcggcagcctttcaaggacgcttaatcgtcttcccaaagagcattttaggaggtcactaagtaatagtccatcagcacttccctgaaggaagtgctggtgactgtgggaagcccctttgctaccctggctccccacccagtctccctggctccactttggggcgtcagcactgcagcctggcaccaaggggttcctcttcctccaagtgctgagcatggggcacacatgatctctcccatggcaggagcctctgtcttctccccactcctcccacaggactccttgtgaaagaaaggggtgttggtctaaggctttagtctgacctttcagggtacaacagctgaccccagggagagactttccagcactggactaaggttatttgggtccagtatatgctaaactgaaaagacgtgttggagtggttacagctaaaagtttgcagaggcaggaaccgtgagaatccgcaccagggaggccgccaagggctcctctgctcagaccatggagatgtcagaatcccctaggggctgtttttcccaaacccagtgctgatgggtttaacacaccatagtgatgttacagagactatacataagagaatgacttgagagaactgaaatcaaaaagagactgtgacctagagtgggtttggggaggtgacataggagaaacactttggcacctgagaaatcctacagagattacagtgatctgttactgactgtagggctcttgctacactgcctagcaacttggaggagcttgtgtccttgctgtagtacagcttcagaatctgatttgctctgctagacagaactgattagggctgaatactttctttcacaaaggacctagttgacttgcttttatatgaactatgactgttgaagggataatcttcaactaggttacctagtaggcatctcgtattcgtgaagcaaggtatcttgctacttgccttacctcctagaatactgatctctttgtgttgtggcagcatctaaaacacagattttgtggttcctgtatctcagtgagagagctgcatctccacccttatagcctattatagttcttgtcactgaagttccagaactgtggactcatcccactataaacaggctttgggcaggacttactaacattttatgcctaagatattattcttgtagcaccactagacttgttaggtttagaaccatttctgcaactagctgcttataccctgccattttcctgcagttaagtaagaaatgttccagggcaaccagggattaatgttgtctatagatccagagagttgggttcccaaagggaaatacatttttttaagcagataatatatgccattgaacatttgtttgattgttttttgcctttcccatgaatttgtgctcactgggcttttagcttccttgtacctactttctataccaccttggctgtttccagatttcttcaccccaggaacccaaaacccaacttgtttcccatctgtacaacctctctgatcttccatagctctgaaacacaatgcagggcttcttctcactcacctctttccgggtttgttctgcagctgtggagtttgaatgttagtgtttaaacaagctggtattacacaggaaacggccacctccacaggcccctgcaggcttgtaacatggggtcattgtacttgatattaatcaccagtcagcctattcccccagtaaaaatatgaagaagtgtgtgaatgcttagtcttccttggtctttctagaaagacagactgagccctggtcagaccattccaaccttttgccattccttaatcctgtctgttggagctctggaaacagttctacctgactttccctggcagatagcagacctttctctctttccgcatttcagacaaggagatgatgactgtggtataccatgtctcatatgttccacacctcagtcttgcagggcacatagctgtatagcatcacctgtgagaactatagaaacacaaaaaactgtgggctcactagagaacaagcttctcaattccctggactgaatagctttctaatgctatttgcagaactaaccctagcctgaagggttaatctgattccccaagtcaatatcctccaaacaaccagccaagagtgtgtgttggttcatttctgtgaaatgtgtttccccagtcacctgggctggcctgggctgcattgtatcggccagcagctgcactgcactcaaactgacagctacattaaaccttggaattctgaggcaataaaaagtaaattaactcttcccccaccccaccccttgctggtggagtaagtgaatgcatgtctgtagtgaaccttggtactgagtgcatacctctaactagtcattgctggtctgtctcaggctaggatctggcattcagactacagccagagctctgctttcctagtgtgtggtgtgttcttcgaggttgggctagtgggtcactttgcaactgctgatccctgaacactaatcacaccccagcttctgagagacttcattgtcgccattctgggagccataaatgggtttattgaatacagtttcatattctcaggctgatttgtgtctgcttggtgaagagtgtaccctaactttagtgagattttgtaggctctggtacattcttcaaatacaagttgaaccagaagaagccagaaggatttgtctaagccaagcataggaccatatacctgtgatcccagcagtcaggatcactgaggctttgaagccagtcagggctacatggtgagttccaaggcagcctggactacagagtgaggctcttcatacccttctacccacctataaccttcggtctcctcagcaaaaagctagataggaatgggtggcagaggggcttgactgaaccccacatgttctcaagtatcttcaagctcttcatagccacaaggattttactttgtgcccttccatcaacctggactcctaaggcttcaagggctgctatgaggtgaaggttaaatggcgcttcttattaggataagaaagaaacatggggaaaaaattcaagacgtcccccttctgcttaaacaggaaactgttcacgcatggaattgacctctcaacccttacatcatcctctcgcagatattagcttttcagttcaggcctctcacctgggtttttggagaacatctctttctcctcctcnnnnnnnnnnnnnnnnnnnntcctcctcctcctcctcctcctcctcctcctcctcctcctcgtcatcatcgtcgtcgtcgttagtttcttgattcttatttcccatacctttgtcacaggttggcccatgggtaccaacaagatcaggctgacctgattggagtgacttttcattgaagcattttttatatctccttgattctgatcagtctagcttgacccttggactgcttttatttatatttctgacttgggaactcagggcacttcccatgtcttttggccccagctgctgtcttacaaaatcaacagggtaagaactctcatctaccttatcactgcagtgtgtcataaggttttggcacaaggtgagtagtaatgggcaaaagatagaggtgggcaggagtccctagtgatgagcagcagtctctgggaggagtcagtttgctttatctgagccttaggggacaggagagcatggtaatgagaaccacatggtaccacatatttcttcttcttggatccaagatggtaagggtgggaggatgagagggatgtggggcctcccactgaggaaactgtgggtgattttctgccgcctctctctggctggggatactactgcctacaccctcatccctaactatgtcctcaagcagccttgacctgtttagcaccaaccatgacctccaagccaagaattcagatgggagacttttcaccttcttccttcttactggcgtttttcctgtttattttccaaattgctgctctgcagccaagcagtgcctgttggccaaagctcaccacgctgtgggatcagactcaggcagtgggctcaagtggccagcagggcactgggggaggaagcagggaactggaagagcctccctgtgtgtctcccatgggcagcactaacctcagaggcagccctgagcagccctatcacatccggtgcttgtctctgcagccggaccggaggataaactatcagagctgtggggcagtgcatcattcctcttattattttcttctctgcagatggggtcgtggaaagttcagttccttttaaccctcaaagttctgtttattctacagctggtagcctgagtgccgcgtttcccattacatcacagaggagcccaggcagatttctgcacagaaaaacgtgttgcaactgtttatttttttccatatttaaacatttctgacagccaaactcagctgagccaaaagatggagctttgtgaatgagtctggttgttggtgtccatgcagagggctttagaaaacctgcatccccctggtgattcttcccaaacgtgttcttcttgctaggcaaagcctgggaagtgacttggttctgcagtacacgtgtgttgattatgtgccgttgtatgattaatgggaccatgttccgcctggttcccaggacgctcttgaaaacaagatgtttcatttcattgccttttcctagtgtagtgatctcagtaaataaaccacctcagcctccttccacctggagctggtgagggagggagtccccatggctctcagtggcaattcctggaatgccctctttcctgtcatcttggaatgggagttgggggtttaatggcataggtctcagcctaccctgtaggctcatggacagtacccctgggagatttcaggggacccttagaacttattggcatagagtttcttcgtactcagtctttcctgtggagttttcttgttgttttgttttctatttgttttttatagtatttctaacatcttagcatctagagggtagatgctattccatctcctgggttagaagcttttctggaggagaaaatcaagtctgtaaacttggcaaccattggatacaattacaattgaggttcacttaggcaggcaaagtttaggtgatgtttagcacccaccaaacagtctgagccacaataggtgatggtatgaactaaatgaaccttctttctataattctaccttggagttttaagtagagagagagattttgtagttttagttttcttctcaggtttatccagaacccgatgatgtgggactggctgaccaagcatcctggtctgtgttggactaggggacttaagagatgtgaaaattttagtgctaaaacttggacagtcccaggatggttagtcatcctgtgtctaatgtacaagtgagagaaggaagaaggcgtgggacagccaagatagcattgaaatgagcaagaagctttcccttccagagcagactttggcaagacaggaagggggattttcttggacatgtattcattttactgcttacatatagagaattactttataaagtatttctaagagggaagcctacgtgactacacagtgtgactactccctgtgtgcctgtggctgaaggagagaggctagtgcccagtttctgtctgtgtggtatatacttgactatgcaagagcagggacttctgagagctgccgtaggcactgggtatctagactgtttaaagtgtctcatcatactgtctggaaaggtgacagaaccagcattaggcaactggttctccaaattctttttctttctctctggttaggattaaaagtcccccgatcaatttcacctttacatagagagtacacacacatagatggtagctatgggcacaacttaatattacatttttgataatatttcttgggagctgccagccagccttacagcttttgttgcaagtccctttccattcccagagcaggaagaacactttcaccgacctctttagaaccgttcttcttttcttgtcttgtttctcacagggttgctgtggatgtctggtcaacactagctgatttctgtaacatactgactgcagtcaatcagtctgaggtgccactgtacaaggacccagatgatgacctcaccctgcttatcctggaagaggatcggcttctctctggctttgtccccttgctggctgcccctcaggacccctgctacgtggagaaaacctcggataaggtcagctgcaggccaaacatcccttcccatttacccactctcttaattctccagactttattcttgggaagttttctgtgcaaacggaacatgattaagtcattgagaagggtgttaagggaaaatatcgaccttttagccgctgacatccagttctgtgtcctgaaaaaaaatccctctcaacttcctttggggggggggggtgtctcctgtgtatgtgtatgagagagagaaatgaagggggggaaggaannnnnnnnnnnnnnnnnnnnnnnnnnnnnnnnnnnnnnnnnnnnnnnnnnnnnnnnnnnnnnnnnnnnnnnnnnnnnnnnnnnnnnnnnnnnnnnnnnnnnnnnnnnnnnnnnnnnnnnnnnnnnnnnnnnnnnnnnnnnnnnnnnnnnnnnnnnnnnnnnnnnnnnnnnnnnnnnnnnnnnnnnnnnnnnnnnnnnnnnnnnnnnnnnnnnnnnnnnnnnnnnnnnnnnnnnnnnnnnnnnnnnnnnnnnnnnnnnnnnnnnnnnnnnnnnnnnnnnnnnnnnnnnnnnnnnnnnnnnnnnnnnnnnnnnnnnnnnnnnnnnnnnnnnnnnnnnnnnnnnnnnnnnnnnnnnnnnnnnnnnnnnnnnnnnnnnnnnnnnnnnnnnnnnnnnnnnnnnnnnnnnnnnnnnnnnnnnnnnnnnnnnnnnnnnnnnnnnnnnnnnnnnnnnnnnnnnnnnnnnnnnnnnnnnnnnnnnnnnnnnnnnnnnnnngcgcagagctcctggcatgttgtatatacgatcatttcctcacatgtttaaatagtgcagcttgtgttggcagtgctcttactcagctccaaatggtttgcatcatgcttaaagcaccctccttccttccctctccctccttccccagccacagaactctgcactaggaaaacagccagggctttttcccttctctaaggaggagagtgataaataggtgactagagagaagcagacaccatgtgttaacgtacaaaaaaagcttttaggaatatgaagcattcctcgctgcctggtttctattttccttcctctaaggagtgttttaacttgacttttttcttgtctgtttatagaaaacaaaagccattccctgttaccctggtggggactgtggagagtctagtttaacagttgggtctttagccagtggagagtagggcattctgggttgttccatcacactcgtggggaattaacagtctcctgtgctaaggcacttttcagagagtctgtggcatcctactcccaagaggagagccctttggggagtagtccatgattggcttctcaagaggaagtctttttttttttagatgaatgttattttaaagttttgttgttttgcggaagtgtctcacatatacccaggctgaccccagaatggctgtgtagcagaggctggccttaaacttctagtcctcctgtctcaatctcccaagtgctaagataaggtatgtgtcactacaaaaaggaggaagaactcttcaatcaagatgaaatgcataatagatacagaagtgattttgttaagtcagtaactgacgttcggggttgggatctgaccaggatggagtacttgcctagcctagcactttcatggcagctcacaactgtctataacctcacttccatgggacccaacaccctcacacagacaatgtccaggtaaaacaccagtgaacacaaaattaaaaaaaataaaaaattgttttaagccttgagttcaattttccacaccaagacagaaagtaaaaactgaattctaaacatgacctataaatatggggttgctttgtttgtttgtttgtttgtttgtttgtttgtttttgagatagggcctcaatatatagccctggctggcatagaatccaaagagacactctacctctgccttttgagtgctacgattaaagatatgtgccaccatgtctggcctataagagatgttactactgtgctgcctaagtctctatatttatgcattaatataatttatacataaacagtcctttagaaaacaaaccagaacaactaagttgtctaccaaccacaagattctaggtttgatcctcacagtacaaacataaatatagagcaaaaaattaaaaccctggggtcatatacatactattgtctcttttcacatatttcaatatgtccttatatggaaattgttatgtggtgctgagaatcaaatatgtaataatttttatgattacttagggttttgttctgttttggggggttaccttttacctttttttttaaagatattttctttatttacatttcaaatgttattccctttcctagtttcccctccaaaaatcccctccctctttccccttccccctcctccccaacccacccactcccattcctggccctggcattcccctatactggggcatagaaccttcacaggaccaagggcctctcttccctttgatgactgactaggccatcctctgctacatatgcagctagagccacaagttccaccatgtgttttctttggttggtgttatagttccaaggagctctggagtactggttagttcatattgatgttcctcagaccccttcatctccctgggtactttctctaaaccttcattgaggaccctgtgctccatccaatggatgactgtgagcatcacttctgtattagccaggcattggcagagcctcacaggagacagctatatcaggctcctgtcagcaggctcttgttggcatttgccatagtgtttgggtttggtggttgtttatgggatggatctccatgtggggcagtctctagatggtcgttccttcagactctgctctgaactttgtctctgtaactccttccatgggtattttgttcccccttctaaaaaggattctgagcttctgggctaatatccacttatcagtgagggcatatcatgtatgttcttttgtgattgggttacctcactcaagatgatatcctccagatccatccatttgtctaagaatttgataaattcattgtttttaatagctgtgtagtactccattgtgtaaatgtaccacattttctgtatccattcctctgttgaggggcatctgggttctttccagctactggctattataagtaaggctgctatgaacatagtggaacatgtgttcttattacatgttggagcatcttctgggtaggatccaggagtgatactgctggatcttgcagtagaactatgtccaattttctgaggaaccgccaaactaatttccagagtggctgtaccaacttgcagtcccaccagcaatggaggaatgttcctctttctctatatcctcaccagcatctgctgtcacctgaattttttgatcttagtcattctgactggtatgaggtggaatctcagggttgttttgatttgcatttccctgatgattaaggatgttgaacattttttttaggcgcttctcagccattcggtattcctcagttgagaattctttgtttagctctgtaccctgtttttttaaatagggttatttgattttctagagtccaccttcttgagttctttatacatattggacattatccccctatcggatttaggattggtaaagatcttttcccaatctgttagttgcctttggtcttactgacagtgtcctttgccttacagaagctttgcaattttatgaggtcccatttgtcgattctttatcttacagcacaagccattggtgttatgttcaggaatcttttccctgtgcccatatcttcgaggctcttccccacttgagacaaggtttctctgtgtagccctggctgtcctggaactcactctgtagaccaggctggcctccaactcaggaatctgcctgcctctgcctcccaagtgctgggattaacaggccaccattgcccggcttattataaacagtgaatttatgccttttagcagaatttgagcatgtcttccctgtagttaaatttttttttaagtagagaaatgttctagggcttgggcttatcaaaagcctatatccaactgcccagtggcgacctttgtactcccttgattacttgagcattggtagcagtagtaaggagtcaagtcatgctcagccgtataaactagttcaaggtcagccaagacaatatgagagagtccctgtctcaaaaaacaaaacaaataagccctggggacagagcattaaaattggaaacttacctagattgtgcaagggcccagggctcagtccttagcactgaaaataaaagaaaatttgtaaatagaaataaaaaccaaaggctggaaaaatgttccatggttaagaacatttgctgcttttccaggagacccaggtttggttcccaacatccacatcccatcacaacagtcactaactctgcttctaaggaattcggtgccctctctggttttggtgggtacctaaacacagataggcatgcaccaaaacacttaggcatataaaatgaaaatctttgaaaactcatactcttgagatttgtttaataactaatggctcttggaagaccctttctttcccaggaggaatacttgttttacgccttcgcagaattaaagagagtaaaattctgttctgcttgtctgatctcagaagtgagtaataatgtgggtatgtatagtaggaggctgaagacaactaagaattgtttaccttgctgaggaagatgttgagaaactaagtatgaatatcttgggttagtgcaccctgataatcaatcaatccatctatcttttttactctctcttctaacctttgttgatactaggtggacttgatcccagaaaatcattctgggagatactgtcacttagtgcagaacaagggaggagtcctaaccagctttagggcttccttaccctcatttttatcagctcatcagtattcccagctgtaatgttggataccaaatctatggcctagatggagaagaatgaggtcgtctgtataccctcaccttttggaagctgcttaggtggcagtagcaaccagtttgaagtggttccacttccaagactgtgagagggtatttcagaattagcgtccctacgtctcaccttacccactcttcaatttgtcttcattccttctcatcctgctcatttcaaaatcttagagttcttggcttttgtttttatcaaaccttcatatgtaaaccataagcaaatttgtttcttctttgcttttaaaatacatccaagtttttaaaaagcatgtagatatgattcatatccacacctttattccattcattgaagtaccttctaactattcctctggtccctagtctgtttctcagcatcagtgctgagtctgctggtgcaagcctgtaatcctagctactcaagaagtgaaggcaggagtattataaattcaagaccttccagggcaaacttggggctgactagataacttagtgatactatctcaacgtgaaaaaaactagctttcctagtatgcagaaggtcctgggctcagtctctagtaacaagctcccacacccctaaaattaataaaatctataaatcatactaatttttacttctaaacattatgattagaacattttctacttggagtaaaatgccaacattttaataatgggcttctgtaccatctctgatctgacaataccttcccctgttatctctgacctcagctcctcagctcttactgtcctcctcgttccccctatgctctctggacacattgcatatcggtcatcttcgccattcctcatgcagtacaagcactcatgcctttgcagttactcttatcctaatctggaaatgctctggatcagagcggtgtgtagctagatcacgtctgtgttgttgtcaccttgttggaattggaacaggcttcctatataaaaatgctaccttttcctttggctctaagctattgttttccatgacgaggaaaaatcaatcatctgtcatgcattgggccctaacctagacttttctgtctagtaattcctctcaataaacctgtctaagcatttataaaagaggggccagaagctcaagagagtaataaagataatgctaaattcacataggtcatgtcaatggctaacccagaagatgtgtattaatgtgtcaaaaagaatctttaggaagtcctgacctttttagcaatatgataggcattttctcagtcccctactggctattagtaaaaaatttaaaatatctcaaggacttagttacagcactactggtgacttcattaatagttgagattagtcatgtttggtccaacttgtatgctcagtcatcagaaactcattgagcatgtaactatgtatgtaaccacacagtgtaggtgctccaaacatatagggtaaatattccactttggggaaccatttgtggggtatatagatgtaaatggctatatacatttcttgaagcctgtaagacattagtaactcttactgttttcctgagatgctaatagtcctgtgaatgcattgccttatgagcactgccttggtgtgaacattcccaagtcctgtggaattctaggtttcttttattttgttttgttattgttgttttggggaatcgtgaattgtagattaaaatacaagttttgtgggcaggagagatgactcagcagttaataattgttactcttgcagaggacctgggtccagatcccacatggtggctcgcaatcatttataactccagatccttcattcctggacatctggtactctttgtgggcaccagtcacacacttacatatatgcaagcagaacactcatacacataaaaataaaataaatcaatcaaaaatgaaagctttttcaatcaaataaacagagtacatcactgagtggcttgtatcttttatattttaaaatatgttgcagggatagatagcctttgcaaagttttcaagctgacttcactcttggtcttctttagatttactttatgcatgtatgtgtatggatggcacccatgtgcaagtgaccatggaggccagaagatgatccccaggagctacagccatagacagtttttagctgccagaaacgagtactggaaagcaaacttgggtactcttagctactaagccattcctccagaccaacccttagctttttgagtatgttgaacatcttgaagggtcagtattctgcctgaaataaagaagccatggtagaaagttcaggtacagacaagcatggtgactcattccctcaggagaagggagaagggaagatagtgatgaggcaggaagagacctatctagaaccaaccaccaggggaaagagaagattgaccttacattcactgagtgactggtaggcacttgaatccagaggttatgtagctaacctctgcaaaccaaagcaaagcaactagtaaagaattgtaaaattgtagctgtgtgtagtggcacatgcctttaacctcagcaatcaggaaacaaagatgggtggatctctgtaagttctagtctagtctggtctacatagtgaattcttggaccgccagagctattatagtgagaccctgtctcaaaaaaaaaaaaaaaaaagacaaaacaaaatataatttaaaaattaaaactgttgtttcaatatttcaagccccattagtgaaccatagtattcttggggaataggggaaaggaagatctgtgtactaagttccagtctagcctgtgctactgttgcaaaaaataaaaacaaactccatgttctgagatatatatatatatacatacatgtacatacatacatacacacacacacacatatagatagatagagagagagagagagagagagagaaagacctttaaatcatagcactcaaaggctgagacaagagaattgagagatcaaggccagcctgtactctggagacatgtacatctttaatcccagcactaaggaggcaaaggcagtcagatatctgcgttcaaggccagcctggtctactaattgaattttgagacagccagaactacacaggggaaccctgtctcaaaaaaaaaaaaaaaaaaaaaatctctaatgtataataggatttacttcaaaattatctgggtgactggagataggtgggactataaatgggaaagagaagctaaatgctgagcctgttgaccctgaataatggatatgttgaatccattacagcattctactttcgtatgtatataaaatttccattataagctttagaaataatacccaggatcttaaatatagtcagtgagtgcttgaatgctggcaatagtcgtccatacagatgcacatactccataacatgcatgggaagttagagggccactgttagggttcagttctctccttccaccacacaggtcctaggaattgaactcaagttgtcagcttgggtgacccatacctttacctgccaagccatcttgaaagcaaataaacactgtcatattatattgttcaagataagggacaagtaatgaagccataaagttgatagtttttcagtcactgattgtgttctagatagtatggtgctacggtcttcacatgtatctcctcaccaaaatcccagcagctttataggtagaacctggtggggagtgatgagaaggacaacattagaaaaaagatacagagtgcaagttgtagtttgaatataagaagtttaatagaaattaatgcagcctgctagcagacctgagacaggagtgtcagttgagcccaggagttcaaggcatgctttgataacataaggaaaaccctacttcaaaatgccaaaccagtaaacataaagtttaattatctcctgtaaaataaatgcatgtaattgtatagtttatatcacaaatatcataaatttttgtttagtcccttagtcatttatttttgaggaagttaccggtttttgttttatcaataatgtcattatcaagcagcattatacatactttgatgtttcttcattaatttacaaggataaactttgcgagtagaattgctagactatagagattgtaccaaattttagggtttttcatgtataaaaccaactgtagtgccgggcgtggtggcacgtgcctttaatcccagaggcagaggcaggcggatttctgagttcgaggccagcctggtttacagagtgagttccaggacagccagggctacacagagaaaccctgtctcagaaaaaaaaaaaacaaaaaaacaaaaccaactgtagaatctgagagtatctgctttccaacttcctcacagtcctgaatgagttagcttttttgtaactttttctgagatggacaagagtgacttctgcctcccatgtgctgagactacaggtgtgccactgtactcggcatctttgctttagtcttgtggagctattttgtttttatattgagtgagatgagaatttgggggactcttgaaggaaaaggtgcagtatttttttctatataggcaataagaaatattcccattgcagatgtagttcagttggagagtacttgcctggcatgcataaagtcctaggttgatccccagtaacataaaactgggcatggtggtctaagcttgtgattctagacggaggcaggaggaccaggtcagttcatcctcagctagaccagccctggggcacatgaactcttgtctcaaaaaaagaaatgctttaagctggagagatgcttcagcaaagggggagggggggggcggtgagggagaaagaacacaccagggagcatcagatatggtggtgcatgcctttaatcctagtactcaggatgcagaaacatgcagatctctgtcagtttgaagccagcctggtctatataatgagttccatgacagtcagggctacatagagaaatcctgtctcaaaaaaaaaaaaagctttatatgccccagtacaggagaacgccagggccaagcaagtgggagtgagtgggtaggggagcagggtgtgtgtgtgtgtgtgggggggggggnnnnnnnnnnnnnnnnnnnnnnnnnnnnnnnnnnnnnnnnnnnnnnnnnnnnnnnnnnnnnnnnnnnnnnnnnnnnnnnnnnnnnnnnnnnnnnnnnnnnnnnnnnnnnnnnnnnnnnnnnnnnnnnnnnnnnnnnnnnnnnnnnnnnnnnnnnnnnnnnnnnnnnnnnnnnnnnnnnnnnnnnnnnnnnnnnnnnnnnnnnnnnnnnnnnnnnnnnnnnnnnnnnnnnnnnnnnnnnnnnnnnnnnnnnnnnnnnnnnnnnnnnnnnnnnnnnnnnnnnnnnnnnnnnnnnnnnnnnnnnnnnnnnnnnnnnnnnnnnnnnnnnnnnnnnnnnnnnnnnnnnnnnnnnnnnnnnnnnnnnnnnnnnnnnnnnnnnnnnnnnnnnnnnnnnnnnnnnnnnnnnnnnnnnnnnnnnnnnnnnnnnnnnnnnnnnnnnnnnnnnnnnnnnnnnnnnnnnnnnnnnnnnnnnnnnnnnnnnnnnnnnnnnnnnnnnnnnnnnnnnnnnnnnnnnnnnnnnnnnnnnnnnnnnnnnnnnnnnnnnnnnnnnnnnnnnnnnnnnnnnnnnnnnnncaaactatgatgctatatgtttccttctctgctttgcctgtttgatccagagtctttgtaaacttatatagtgttttgaaaagtcccctggcttatagcaaagagacattacaagttcagatttaaatttttgtttgttttgtcttttctcactatatagatgaggaacttttcattatccatttcacaaatgtgtttctggaactgaccttcattcttttttgtttgtttgtttttggtttttcgagacagggtttctctgtatagccctggctgtcctggaactcactctgtagaccaggctggccccaagctcagaaatctgcctgcctctgcctcccaagtgctgggattaaaggcgtgtgccaccatgcctggctctgaccttcattcttatgttttatttatttcgtgtggaaggtgcacttgtcacagcataggcgtggaagtcagagggtgtctgaccatgtgggtcctgagaatagaactcaggtcatctgggacagtggaaggtagctttaccccctgagctgtcttgctggccataaccattttattgtatatctctctctttgtgcctttttgttaatcttatcttttttgtggtttcctgccattaccttgatgtactccagtacttccatattgtatcagttattgcttaatatgtcaatctaatttcttagattctggactctgatattttgtctggtttggggtctttttttttccttttcttttagatttatttttttctatgtgaatgagtattttgcatgtatgtatatgtgtctggtgctcacagagcaggtatcatcagatgctttggaactagaatcacaaatgattgtgatccacattgtgggggctaggaatctgtatttttgtgagagcaataagagttcttaacctctgagccatctctccagccttaaagactgtttctctgtccatgtctttggcaggtgaagtatctaggtattcttttttgttctagcctgataagtctcacatgttagcattcattaaaaccatattgccagctttgttaaaacacagtttctgggtttcacatgaatgttactcattgtgggggaggagttgactaaaattgtatttctaacacattcttaggccacactagtgttaaatcttctacatattgagaacaactgcttttagagacttgatagttggtcaaattgtagttacaaggaaaaattttcagacctggtaagaataaagattccagggatatttggaaaatttaacaggaaggttatgagaggtagttaccaattctggctttaacttttgaatgtggaaaatattacctgagagctcacatacatacctcacctcttgttgcctcttgagctcactttctgagctctagaaaaaagcaattatcctcaaattataatgagcaatctctcttgaatgaaaatgaagacactggtctgggtaatctttcctaaaaggactctgaggcatacagctaacaacacttcatgcttattgtgtatttactgctgtcctaggccctacattatttcatttaggtttcccagaagccctggaataatgttaagccttaaaactgtgccaagggggactggagagatgactcagcagttaagagcactgactgctcttctggaggtcctgagttcaaatcccagcaaccacattgtggctcacaaccatctgtaatggcatctgatgccctcttctggtgtgtctgaagacagtgacaatatactcacctacatttaattaattaattaattaatttcaaaacaaaataaaaaactgtgcccaggatggcatgactaagcatgatggattcaaactctggccatctaagtgtcatgcatgctcagagaagtgtagtaggtgtgtgatgggacaaatagttatttggtgcttccagtccttgagaccttgcacacccactcaaacatacacatagactcaaattgatgaaattggtagtcattcatggtgttgtacacttataatccttttttttttccattttaaacaagaagtttatttaaacaacaagacgcttgacttgaagggaaaactatctaggatcattttgttcaagagtaatttatccctacttaaagacagattgccctacatgtaacagctacgtacaaaaaagttataaaattgtccttggttttacaatgataaatgaaaaacattaaagttctccaatcgaacaaggtatgcaaggatttggtgttgttgggttcttttgttaaaacaatgagagcaaaataatttactggaatataaagataagagctgaatgagcatgccactagtggagaagggggtattttcacaaacccagtatttttccccagaccatctccatctcatgtcaaccagaacaggtcatttagtttaaaaaaggaaaagaaagagagagcactatgcgtgtgcacatacaccagttactttatgtacaataaagaaatggggacagggaaatgaaagaagagagaaaactatactgtagtagtcaggatgtggtgggaccaaattgtggctttctaattgagaatgtattcttggtctataacaaaattctggagtaaagtagcaggctccctttttagtagacacctccagtctgctgctggaacacatcagtcgtatcttcatcctccatttccaactgtgcaggtgtgtctgtttcgttgattggctgcccatcaaaccggaatctgatctgcctcattgacaaaccctgccgttcacaatgggctttcattagtttactaagtggtgtttgcctcttaatcttaaactgcaccacagaaccatcctgtcccgccaccttcaaattaatatgatcgttgttctcagtcttgactccttccttgggtttctcgtcggccatggcgagcgccggagtctcctcagctgccgcttcacaaaagaggcactgggtccgcactgagggagcgcacaagcagcaccaggagcccacttataatcctagtatatttaggaggcagaagcacgaggagtgggcaaattctgattttactaatagttcacactacagattctcaactcagaatcgagttatgtccccccaaaaacattataaattggaaatagtgctggagagatggctctgtggttaagagcactgactgctcttccagaggtcttgagttcaaatcccagcaaccatttggtggctcacaaccatctgtaatgggatctgatgccctcgtctggtgtgtctgaagacagcatcagtgcactcatacaaataaaataagtaaatctttggactggtgagatggctcagtgagtaagagcactgactactcttccgaaggtcctgaattgtggctcacaaccatctgtaatgagatctgactccctctttgggagcatctgaaaacagctacagtgtacttagatataataaataaatctttttaaaaaataaattggaaatattctaatccaaatgcacttgatatacctaaaataaaaaaatcataaaaatgctgaagactatgtatagtctgtagtataaactgtctctaaaatcatgaacgcattcttttttttttttttttttggtttttggagacagggtttctctgtatagcccgggctgacctggaactcactttgtagaccaggctggcctcaaactcagaaatctgcttgcctctgcctcccaagtgctgagattaaaggcatatgccaccacgcccggcttctactggctctttataaacactatttgttgttctctttttagttgtgttgtacaagttctttatatattttgaatataaattcttatcagttataccttgtgaatatttcaattcataattgtgttctctctgttactttgtttatatagctgaaatagcaatttttttattcttaataaagttcagttttttaaaatttttcttttacagtttaatagctttttgccttagaaatttttccttatcgctggcgttataggcaaccatcaccaggtctagatagtctttgtttaaaaataatatttttttgtttgtttctcatttaaatttttctgcttcaccaggctggaaagatgactcagtggttaagaatacttgctgctcttgcagaggatctcggttcagggggcttacaattacctctaatttcatgttaggtatttgtatctgatactctcttctggtctctgtggtcacctgcacatatggtacacatacacacacacacacacacacacacacacacacacacattattttatggctttttattcaattagaaatataattactgattaaagttttttttttccttactgcacatttttgagatatgattgtagggctcagccattaaagtctaatttaccaccaaaaatataagatgtgactatattatcatcttacttccactggcttttcataaggagttagccctctttgtgatgttttgttttggctcttttggtttttttctttgttttgtgttcctgttgggtatccgtaagttgaagtcagaggataataactcaggtgttctcttttttccctccttgagacaagctctcttgttagcctggagcttgctagttaggctagactagctgaccagcaagcccaaggaccccctggttctgccttcccaggtttagaattaaaagcacatgccaccacacctagcatttttacatcagtgtggggggtttgggggggggtggagctcaggtcctcatgtttgcaaaataagcactcttactgaccaagttaccaactcagctctgacgtttttcattttaacttcagttttagaagtttgagatatgtatcaggaggttttattttgcttgagtttttttactggtactcttagactggtaggcttatggtttttcatcaaatttggagcatcttttggatattcttttttttttaaagatttacttatttattatatgtaagcactctgtagctgacttcagacactccagaagagggtgtcagatctcattacggatggttgtgagccatcatgtgattgctgggatttgaactcagaacctttggaagaacagtcagtgcttttacctgctaagccatctcgccagcccgtgaatattctttttttctgtgccagttctcccattttggaattctgtatgtatatgtccagactctaggtaaggttccatagattggtgaagctcctgttttcttcagtttttgtcttcaaattcattgactgtttttctgagcctcccttcctccaccccattgttatggtttttgtttatgctttttttggattttttttttttttaaataaagtctcactatatagtcctggctggcctggaactcacattaagccaggcatccagaggtgggaatatttgttagaatggcttttaggcagtggtccagctagtttaacaatggctgtctaccagtggaagttccaagaatccaatagttgttcagtccacaaggctgaatgtttcagcaagtcttccaaaaagtaggctttaaacagtgaaggaatagagttgttagggagagctagcaggcaaagagagagagcaagcttcctttgtccaagtactttctataggctgccagcagaaggtgtggcccagattaacggcagatcttcccattttaggtgtctctttctacttcaaagattcagattaaaagtgagtcttcccatgtcaaatgcctttaaaaaaaaaaaaaaaaaaaaaaagtcccgcatagatgtgctcagccattggattttagttaattcagatgtagtcacattgacaaccaagagtagctatcatacccagcttaggtttttttatgggggagagctgttttgtttgttgttgggttttttgttttcttttgttttgtttttttgagacaagctctcattctgtaactcatgttggcctcagattcactatgtaggacagggtggcctcagacttaaggcaatcctcttgcttcagtgtcccaagcactaggaataacaggtgtaagccattataactgatttctttttttagaatattatgtttgatatctatgcatactcagcaggcactgagatggatgctcagcctcttttcctatttcagtctgctcttaaactcatctaggaaatttatttcattaccttgttttttagttcatgaatttccattttgttcttataatttccttttctgtctgttcacccattaaggctatatttctatgctcaatatgttgtaaccagcacttgaaagtctgagttaggagataatgcaagtacaaggccaccctgaactattcccccacccccaccccagtctcaagggggaaagctatccttttcttaaagtctttaaagtcctggctaattctagcatccatgccatctcacatttgatttctatcatatatgcattgtactttgctcttctttatgtctagtgatgtttgtttaatcagtggacattgtgtccacaagtccaaatagactctgtattttgttaatgtcccctggagagtgttgaatgtttttgtgattttagttggtaggtaaagttctgtctggttgtaccttacttcagtaagcttggtttggagaagaaggttattgtttgattgcttgtttgtttgtttgtttgtttgtttttgagacaggatctcactgtgtagccaggcttgccttgaactctcaaagatctatgtgcttgtctctgattcccaagtgttgagattaaaaggtgttggacaccactctcacctacctatacactgttaatgatctaggaagtcggtgcatgtgcagccccagtcatatgagcagacactactcatatattcacagatgacatgtatgtctctccacttttttgctataggcagggttttaggttttttttttttctccaaaatttatttatttcttgcacttgaagtattcctctatgacctccttggcctgagattctttgccatagtccttaatcactaacgcaactgcaaccaaccaccttccgtggtttcccctctcgatcaattttacagaggcctacccattcccctagtttcttgttgtcatcagcctttatcaggttgatttggtgctcagcacaaagtgcctccaccagcttgacatacatgggctcatcacagttggatgcaagcacacagagatgggcttggcgcttgtctaaggctttggcagcttcgcgtatgccacgtgctaggccatcgtggatgagggcggtcttcagcacctcttgtagagcagtgatgacgtccattacacctccagcagctatgccttcctctgccatggcggtgaatcacgggtgacgctgaatcttgaacgcacctgagcttccgcctccgcgcaagtcggcggcggcggcaggggaaaagcagggttttagttttttgaggcagaggtactatataatgcagactgtcctggaactcttgcctcagctgggattatagaggtgaacctccgtgtctggctctaggcttattttaggctccgttagtgtttcagggttggagagagaagctcagtcagctcactgaagacccaggttggatttcctcactcatgtggcgggtctcaacttgctgtaactccagttcccttttccagcctaatcaggcactaggcatgcatgtagtacacagatatacatgcagactcactaccactggggggtgtgtgtgtgtgtgtgtgtgtgtgtgaatattagtgaattagttctaacttaactgtaagtgttgtctttactcctcaagtatagctgcttgcaatgagtgttaacagtattaccatttctttctctggcagctcagactttagttctcttatccctaggcattagtctttatttggcttacatacacatctttaactgccatgtatttactagtgcaataaaagatctactatctatttatatatcttccttgcatgtttatggccttgcttatttttatatcattatcatcatcattactgatatgcaaattccttatatattgtttatagttatgtttcatgtattaaaaatgttttctcctgtttagtgatgtttatataaacttatttattcttttaatggggctggagagatgacttggtagttgagagcactgattgctcttccagaggacctaggtcatttcctaaaatccacatggctgctcacaactgtctgtaaatcatgcatgtggtgcacggatatatgcaggaaaaacaccaatacacattaaataaataagcaagcaaacaaacaaataaataacgtgtgtgtataattttacaatgtacaaatttagatttttatataggcaaatgtgtctgttttctgtgtgtctacttggatttttaatcatgcttctctcttagtacacttattttgtacacctgtttaattagatacagttcagcagttaagagcactggctgctcttctagaggtccttagttcaattcccagcaaccacatggtaggtagctcacaaccatctgttgtgggatctgatgctctcttctggcatgtaggtatacatgcagatagagcactaatatacattaaacaaataaatctttttttaaaagtttgtgattaacagagtatgttattcatgtatgattcatgtatgattgacatgatacagtcaggcttctgccatttttgactgcagaagaaattctagtataagtcatcgtctagaacaaaggctgttagagtctggtgttgtttgggctgtgatgtgtgtgtatgtgtgtttccatgatcattagtgacagaaaatattaatctttagctgccaggataaaagctaaatgtttttaactagcagttaacttagaaatcgtagatgaaatcatacatgagccctatttgtagtagtgcttatctagcaagactttttccgtttgcactcccataactaaagaaaaggaaaaacgagaaactgttcttaattctagactgcaaaggaaaacgtggtttgcatgtgtgtagcaaaaagctttggaaggttggaattgcacaatgaatgtaggttgagcaattgcttaacaaagcatgggggggtctcctttaaaaaattttattacacttatctggtgggggaaggggctcatgccatagcatgatgtgagggtcagaggacaacttgcaagagtctttgcctccttccaccatgtgggttctagggatcaaactcaggtcagcagggttgatggtgagtgggctttaccctcaaagccatctccctggcctggaatgtcttgctcttgtgaaattggggaactctaatgctgccagaataggggttttccttttgatttcttacgtgccatttactttcacacttttttttcactgtttgtcttttcattcttttcttgaagtcttcttgtgggtttttcttcctagactttctttaaagcatccatgtgcccacacttcagttttaacttgagatgggcagaacacagttccctcgtggcctcagtttgtggtgcagctgcttcttacaagtgcatgctggattgcttctgagtgtttgaagcctggttaccaagcagcctgaattccctgatgttttagtactagaactttgcagattttataatcagtgtactgaggggttttgcctgttttgcttttaatattggtcaacacctcttgatgaagatcagctgcagactttactgaaaagtaaaatcaaaccttaagcttgaagtatgagtgacaaccagtaagatccagacaggacttgtttcagcaaaagggaatgttcttgtttctccctgggctgagtgttgctcctcacatttgtgattcctaggcctgcttgtgattctctccacttacctgtgctggggatcctggagtctgttcctcctcatctctgctctgtttctgaggaacaggagaagttgttgggacaggctgccaaaaaagcaaaagttaagtatgtggatttcatagccgcatatatgagtgtttgtggggcagagaacttctaatgaaaaacatttgtgttgcatcgaaaacagagggaggcctggttagagtctgtctgctttgtctgtcagtctgttccctaccaacactagcactgttctcctgggaggctcaggcatattgtggtttcttctgccctttccatcccctaatcttgccagagtttttgtgtcccgatggccccacgtgtattttggagtgagtctacaagggtggtgactggctttggaggtactcaagcacacatatgggcattgggaccctctgtggggctactctgaagagggggaagggtctccacacactgagaaaaccatatttgactatacacacaggttttggaccctccttttactgctagcaaagcacaaagcagaagcaagcaagcccgctgttcaggcttgccatttgatgtgtaagtgcttgaaagggatacacctgggtgcccaagcttgcatctgacaggctgatgtctgtcaggttgtttggcaggatcccctttgggaaatgcagaagagaaagtgcaaatttccctgaggatagtgtcactccaagatatgaaaagacgtgtaacttgagctttcccaacttgaaccccctccctcaccccccccccccagttcctctgaaattcacatttgttcatcattgggtgggggtagggagtgagaacaaaaaaagcagcaactttactcacatttttctcggtctccaagaaggtacttcaccaatgtggttttcacattttcagggttttggctggtgaataagattgagcagaaatgctccttcccctgataacaatacattcagatgcaggatcaggagcatatggattaaaaccagacggtggatgattaatacttttgcttatagaggtagacatggcaacttcctcaatttaaatgaaaaagccttttctctgcatgtgtatataagccagtgcttaggctacatgcttgttgccttaaaggtgtgtgctaagtttctaccttagttacagtttccaagtattccttttctctcttgaagcacccaagacatacttgaaggcttatgctgagagacaaaggtgtggagatcaaccacaactgtaggaatggggaatatgttctccatcttgagccacggctttctcagctctccagtactgatgactctaaacacacatctttatcgatactacttacttggttcctttggttgtatgccctcactgtaaacagtatatttttctttcaaactattgaatttgggctgcttattcccatcatttcatagaccaatgatatgaataactttggtatatatagaatcaagtttggtggtgcttacctgtagtcccaccacttgggaggtggaggtagaccagcttctgctatgtagtgagtttaagaccagccttaattttgtgaaactttggtgaacaaaacaaaaaacaaaaacaacctgtcattgcagatactttgtttcacttcctaaaaaacatggtatttcttcaagtatacatttaattattacttaacaggtgtttgtttattaaatatgtgtgagatttgtttttattaggttctgtacacattagaccattcaaggctaggcctctgacttccctggtgatttctgcttacacataactgttgtttgcagaagcagagactgctgcccaaaagaaacaggaaatgaaggaggacgatcagactgggacttagtatctttttatctccatagtggaggttgttttctctctgtaacaatgaaaattaaggagcataacattccttttattttaatagaaagctgattctggtttactactccctttactctcagggtgtagcagttacactagctctgtaagctgctggtgcatatcctcagaatgtacaccctcagaatggagtcacctccttagtttatccctttcccccagggaccaaattgttagtcacagttgtagggtttttgttttgttccctcttcttccaattcagtttttttttttttttttttttttggtttttcgagacagggtttctctgtatagttctggctatcctggaactcactttgtagaccaggctggccttgaactcagaaattcgcctgcctctgcctcccaagtgctgggattaaaggcgtgcgccaccacgaccggctcaattttaattttgcattttaattcatgcattcttgcatacatatgtgtgtgcttacgtgtttgtgtcaaaagacaacttcaggagtcagtcagttcgctcctttcgccatgggttctgggatggaactctgaggtcctgaggcttgcacatcaagtactttgacctgctgaactgtcttgctagccctgatttatagtttgacaaacacccatggttgtgtaactatcacaacataaatataaagtgttttatatcaccccaaaaaattccctcatgcatgcaaccctggtccttgcatcctgcccccaggcaatttttctgctttttttccttattactctgccttttctagactgtcgttaagcaagatcataacaatatatggctttgagtctggcttcttacatatgatatataatgcatttgagattcatccaggtcgctacctttgtctgtaactctttctgttattgccaagcattgtatagatataccacagtttgtttatccattcaccaattagtgaatatttgggctgtatgtagttttcagtaatcatggatagaacaactgtaagtatttatgagtaagttttaagttttcatttctcttaaatgaatacctagcaatggaaccggtggttaatgtaactgttcaactcttttccaaagtggctatactattctataaccagatagatagatagatagatagatagatagatccatatatatgcagtgtggttctgtgtcatcatcaggacttggcaccatcaggttatttgaagggttttgttgttttgttgttgtttcgtttttcttcaaatcattgtgataggtatctcatacatggttttaatttgcacttttctcatggctaaggatattgagcattgtttcatgtgtttatttgctgcttgtatgtcttctttgctgaattgtctgattacatcttttgcctattctttaaatagattgttggtggttggtcttagtggcacacaactataacatcagtacttgggagacagaggcaggaagatgaggagttaaaggtggttgatttgtttacgaagtctgttttgaggaatgatctaatgtagctaagactgtcctggaacttacaatgtagccaaggttgaccatgaatttctgatccttttgcttctacttcccaagtgctagaactaaagtcatgtgctacagtgtctggtgtatgcagtactggggatcaaatccagagttccctgtatgctaagcaagtgttacaaacccagccctcttactaagatgtaaagattcttcatatgttttagataaaggtcttttgtcacataaatatgtattgtaaatattatctcatgctctggtatgtcctttacttcagagattgtttagactgactcaatcttgagacatggaggtagaggaaagtaaggagattgagaccttagtcagcagatgtgtgcaaggagcacccctttggaaagagtttacaacttttagagttacaattttaggggagaagggaggttgagattgagttgtacagaccagacccctgaagctttcaaccactccctagttcctgcccctacttctgatgttgattctggactcttaactgagttcagcctggctctgttgccatcaactccagacccactgaggccttggcagttttagaaaacagaacggacgggcagtcttcttgtttgagtatgtcccagaatgaagttgtttgtggtagtcatcactcctaagccctaaagtgacactttcagggagccacctgctttgtggaggggaaacaagcatcagctgagcttagtccggacactgccacatgggctttgtaagagaacaaatggcagtactagaaagcccctgaggcagctgagttcagttctcagaatgtacattaaatgtggatgcaatatttaccagagattctttcatgttccttgaaagtctttccacagagcaacccatttaggtttggcatagaaaaacgtattctgcccatagaacaaaagagaagggaagatgctatgtgaaattttgttgcttttttgtttgtccaggctggtttcaacttatgatcctctcaccttatagcttcctgaggattacaggtgtgtgctataactacaggtgaatcctgtcactttttaattgctggtccctgttgacaaatttttctaacacagcacttgcctctagcagaatttcttttccctttttgtgtatgaagtgggtcactgacacagcctgcctaagaacccagaggactgttcctttctccagggtaatgttgtttggtcaaggctctctggcctttgacttcagtagaaatgatgtacacagagaagaatttctgacccttcactaatctgagttatttagaatgccttttagtaaacaaggcatctgcttctgggcagctctgagctttctttttcttcttttgaaggcacaatttcctctttttactaagaacaaataaattcaatagaagaaaactgcaacatggagtaatcaccttgttttaaaaaacatagggagggttaaaaacaaattgtgcagtaaatctgcaagtgtgaaatctgagggaaacgatcccatctggaacaccctaccaggggtaccctggctgggttgtggaacagtgcagattgaggagggaagaaacaaaacctgtagtcttgaaagatgacaggctcattaattgatgtccatttcagctggtgctgtgccagcttatgttggctccactccagcgttcctgtaatttgggagccaggtgtgaagcatttttgttccatcttgttccccagcatctacagaagccttacacatctcacttgagggagaagccctctggaggaaacaaatgttcaggtaaaggtggaaggcaagtatcatagctgcgttatagatatctaaaagaaaacaaaaacaaaaacttctacactcgagtgagatctgggcttgagaattgagggaacagatattaagtggcttcaaaataattattctaatcagaccagtcattttgaatctttttaaaggtaggtattcatttgtgtgtacacatgcttgcatgcacatgcgtgtgtgtgtgtgtgtgtgtgtgctctgattctgtgccacaagtgtgaggtacccatagacaccagcagagggcgggcatcaagaccccttggagttagagttggatgcagttgtgagcctcctggcatgaagctggaaattgaactcgggtcctctgaaagagctgtacatattcttaaccactcagccgtctctccagctccctctaccccttttctttatttttttaaaacatgtcttactagacatacagggaaacatctttcatattcgcctttgtgtgattcagagagcagcaatataaggaatgacggaagatagccatcagagttgtaggtgatcacttccacctgtgtttcaaagaccacagtaatagaagcagctgagagattaattacgagcccctgactgcagtgtttctttattggggggacggggcttttttcttttcctttttttcttttccctttccttcctttcttccttccctccctccctttctccccctcacccccccacacttctcttattttctctcttccctgtgtatatgcatgtgtgcatgcccgaactcatgcatgcatgcaaaggccagaagtcaactagtgtggtgttcaccttattttttgagacaagagctctcacctgggacctggggctggctggcccacaagcttgagggcctctctctgcctccccagtgctgagactgagaacacttgccactgtaccaggctttagacgtgagtgtttgggattaaacgctggtcccaatgattgtgtggcagtctctttacaaactgatccatctccctgggttttttgttttttgttttttagtttttgttttattgatatcaatgaacacagtagaaatcatcaagcagtagccatccagcactttgatattagacccttagtacagtaggccaaagaagacattcctgtcacaatccaatctatatccttccaagtcttcaaactaaattgaatattaaagaaaagagagttcgtgttagatgaggtaacatatacctttagtcccagcattcaggaggcagaagcatgtggatctctgtgagttcaaggcagtctggtctatatgaattccacagtgagaccttttctcaaaacaaaacaaaaaacaggtagttctgggtatgcctgggtcatctctgagaacattaaaagccagttgatgttttaccattggcttacatttttatataaggccatttctagtcttccaaaagagctgtttcctacagcattcctatagactgacaactgaaagagccccttatggttcctccctttaactctgggtcttatgcaaacagagctgacctttgacattgagaatcagaccacattatccaggagaacccacaagcctgtttccaaggcttcagatgtcctagactcatagggaatcccatgttcattgatggcttgcttgcttggtttgtttgtttgtttgttttaaatcaatactggaagctgtgaaatgcctgtaccagacagttcaagaggctaaggagctaaaagaaagatttcctgtaattattctaattctttgtttattgcttagttgggtttttgtttgtttgtttgtttggtctcactctgtagccttggctagcctggaactctctatgtagaccaggccagccttgaactcatagagatcctcttacctctacaccccgagtgctgggattaagcatatatgtcaccacatctggttagtctagttcttcaaagtatgtccatcttgttttatttatttgtggtaaaacatatataacattaaatgtagcattttaaccatttttaaaacctgaggttctgcagcattaagtatgttttcattgttggacattatcgccatcatctccaggaccttttcatcttttccattggcatctctgcacccattcctcatcccctcaacttcctgcccttggaaactacccttctacatttttctctccttaaatttgactatgctatgaactctagatttctctttttgtgactggcttatttcacttagtatgttttcaggattaatcctcattgtggaatatgtaagaatttcctaattttttttttttattttttcaagacagggtttctctgtgtagccctggctgtcctggaactcactctgtagaccaggatggcctcgaactcagaaatctgcctgcctctgcctcccaagtgctgggattaaaggcgtgcgccaccacgcccggccattcttaacttttttaaagaccaaattacttcattataggtatgtaccacactttgtttagctgttcacctgttggtcaacacagggtagatagatttatttgtttgtatgtttgtttgtttgttttatgtgttctacctgtgtatatgtatgtgcaccacatatgtacctggtgcctatggaggtcaaaagagcgcattggataccctggaactggagttaaggatggttgtgagccattatgtaggttcatgtatttttgtgtgcttcctataaatcaagcagggcctagcatatgttaaattaatgctttcctaccaagctatacctctagcccttgtttaatatatctgaagccagaaagatggctaaatagttaggagcaattacttctcttgcacagaaccatttgttcccagcacccatatatagggcagcttacaaccacctgtaaatccagctctagagaacatgacgccctcttctggcctcttttgggcaccagcacactcatgcatataaacatgcacatgggtatgtaatttaaaataaaataaatctttctcatttgattggccttggattatctgaacatttcccccctctgaagtaaagtgcaagtatgactttcaatcaactcctactataggcaacttgtgtggcttcaggcaattcatatagcctctttggactcctttatctttttcagtgaaacaagaaaagttatagtggtcctacccaactcaaatagctctctgtatggataaaagaagatcagatttgtgaaaataccttgtaaacattgatgaaaatgctatagataatagataatatcattctggccctttaagtccactgttaatagaacaccttatcggagctgaagcaaggtctcttcagtaggtgaggaaagcagagcacagctgatgtacatcttcctatctcttcatcacccagtgtagagttgtctcccctgagctcagtcaagggtcacatccttgatagagttttcccctgcagtataaccacagagtcagagcagctttggttagaggtgtagatagcatggacttggacatgaagtgaatattttataccgttttcatgcttttcacacacttcaccgggtttcagtgacatgtaactttgttggtttggaactgtgtgcttccacacacattgtttttcttagttatatattctgtactcatttagttatatattctgcactcatttatactactgtttctttgcatcaaatatatatgtagggagggagagaggatataagtaactaaaagacatgaaacacagtaaagatttggatgagcatcattcacctcaggaacagatgcagaaagttagaatctgtactggttcaaattcaaggtgagtctccactccataactcacagtgtccatacggacgcctagttgagctgagaatggatagcgaggaatgacacttctttatatggctgctggtccaaagtctatctatatttttctttggaaaattttggaggaaaatgggggcttcattaagactttatcatagagatttcctttctttcttatatcaaacaatgggttaatgggtttgggtttcgttttgcttgagtttttttatgggggaaggggagtattttgttgttgttttgcttttgtcactttgaggcagtctcatacagcccctactggccttttatagactgatgattaccttggactgttaatcctcctgcatctacttaacaaggacttggattgccagcatgtaccaccatgcctggctaagcaatgttctcaatgcagagaacaaattatctgtgtgtgcatggcctatttttggaactacatgagtactcttaggtaaattcaagtgctgccaccaaaagggaaaacaggtatctcctttgcatttgatttattaaacataaatttaaatttttttatgcattatttgtgtgagagtgagagtgaggtacacattggctgtcagagactggccttcaggggtcagttccgaggcagagaacttttgcttctgtggctgagctgcatacttcagaagatgtgacctgtgaccttgcacagttctcctgtctctgcctcccaacccacagcacagctggggcatagcaccagagctcagttggcttctataccccctgagccatctcccagtccatcccaccccccacatcatagttccttgcctcttctgggttactttcaagtgggatactgatttttgaaaaactgcaaaggtctttgtactttttttatttttttgactttctgaattttcctaaaagcttatttaaggaaacacataatgcaaaccctctagttttcttggctcatgagcattttcagtgatggtgatgatagtagtgctagtaataataatagccacggtgagattatatcttcactatgttctaccttccttcttaaacaccttgatgattttttttttttttttttttttttttggtttttcgagacagggtttctctttatagccctggctgtcctggaactcactttgtagaccaggctggcctcgaactcagaaatccgcctgcctctgcctcccgagtgctgggattaaaggcgtgcgccaccacgcccggccgatgattttttttctctgcttttctggtttgttttgagacaagagcttaccatgtaacctaaactggtagtaaactcacgaacctctttcctgccttagcctcctgtgttctaggattgcaagcttgtgccacagagactcagcttcctttttacttcccatcagtgatggtgggatctagaaccccaagtacacaagtgggttctgctactgagctgtatgtacccttagccccaaattgtttccttttgcctgggaagaggtgacatcattatctccatttatggagtgaggaaactaaagcttataaagtgacctgtgcaagctacacatctactgaggaacagtattggaatttcaatacaggtctatatgatctacaactataatctaatcctaccaggtttgtttattattattattattattattactgtttggttaggtttgggttgggggaagttgttttgttaattttgagacagaatctcacttgtaaccctgcttgttagaaatcactacatagaccaggctggccttgaactcacagagaaatacatctgcctctgagtgctaagattatgtgtgtgctaccacactcttttctaattcctccacatttttttgtttgtttgtttttgtttttcgagacagggtttctctgtgtagccctggctgtcctggcactcactttgtagaccaggctggcctcgaactcagaaatcagcctgcctctgcctcccaagtgctgtgattaaaggcatgcgtcaccaccgcctggcaattcctccacttttatgtgaggagtttaagatacaaaatgcttaatgatgtcttttgcctttgtactatggtaggatactttggttggttggttggttggttggttggttggttggttggtttgatgtgtttttaaatatttttattattaataaaagtgtatgtgtatatgtgcatgtatccaaagttaggagcatcctttggatgctcgagttacaagcagttgtaagctgcctgatgtgggtgctgggagttgaactctggtcctctgtaaggacagtacatgttcttacccactgagccatctctctagccccgtaggatactttgaaggattgtctttattgacacagccaaagtactgactataacgtcatgcttcctgagctggcatgataacaagagtctacagatcctgttttgttttcttaagaccaaagtgggcttgtaatttactgtttatccaaagctgggtttgaactggtgctgatcccacagactaaatgaaaagaggttcttaggtgtttctgagtgcccaagcaagctggtactggccctggtaatttctatcaattgctaaaaatctggctctttcactttaaaagctttataggggtaagaagagcaggtggcaaagcatggagtcatctcaggaggattcacacgctagtctactcacaactagtcctagagcctcactgtggggacaaaggaataaacctcacagggagagttagtgaccatgagccaaccctagatgagctctgagtctcaatactgcctttgtattctgaaaagacttcaacacatagtttaaggtgacctctagctagtatctcagactggcagaagaaaaaaaaaaaaaacttttcgctattggaaatagatcttcatatcaggccacaaagattttcataaaagactagaagtcaacccatactctctaatatgctgagagaacttaacctgtcattcccagcaaatctatcctttagagcaaaggtagcaagaaaaacataaaccctgtgtctacacaaagacttagacataaacattgatgctgatcattttcattatcgtttcattatgatttgtgtgtgtacatgtggaccttttgggagtcagaggacaattttaagcatttttcctcttttcaactagttttgaggtggggtcttttttgtctctgccatactttgtacttgaggctagctagcccaagaacttcccgggtgactttcctatctctacatcccatctcccataagggtgctgaaattacagatgcgtgctgctgcggcttcatccagactccagagatcaaactcaggttgtcaagcttgcagagcaagaacttttacctactgaacatctcatctgtctctacgctaagattttattatcacatttatttattcggtgtatgtgagtgtggagttagaggagagctttgtggcgttttctctacagccatccacgggtttcagaggttaaaccaaggtcatcagcaggcttggaagcagacagtctgatttcctgagccatcttaaggactcttgcttattttttaaccttcaaaaaaattacatgtattaatttttgtgtacagttgtaggtgtgcatgctacagtgtgtgtataaggtctgaggataactttgaagtgccagttctcgacctccaccatattgaggaataatttgcagtcctttgcctagtggtcatggagcatatctttagtcccagcactcaggagccagaggcaggtggatctctgtcagtttgaagatacccaaggctacagagaaaccctttcttaaaacaaaacaaaatagggagttggagagttggctcagcgagtaagagcactgggtgttcttccagaggtcctgagttcaattcccagcaaccacacagtggctcacaaccatctacagtgggatctgatgccctcttctggtatgaagacagcaatagtgcactaatatagataaaataaataaatctttttttgaaaaaaatcatactttcaaattttacagttcaatcatttttgtacattcatagagtattacaactatcactatctaatttcattgatttttgtctttttaatcacttcaaagaaaatatatccatcattacttccctgtctcttctaaccactgatttgctttcattctccagagccttgcctagtctggatggctcacgtgctttctctctgttccgtgcaccacacacacacacacacacacacacacacacacacacccatcccagcttgctttttctctcctttctgaataggtctcatgtaacccacgcgtgcttccaactctgagtgtagcacaggatgatcttcagnnnnnnnnnnnnnnnnnnnnnnnnnnnnnnnnnnnnnnnnnnnnnnnnnnnnnnnnnnnnnnnnnnnnnnnnnnnnnnnnnnnnnnnnnnnnnnnnnnnnnnnnnnnnnnnnnnnnnnnnnnnnnnnnnnnnnnnnnnnnnnnnnnnnnnnnnnnnnnnnnnnnnnnnnnnnnnnnnnnnnnnnnnnnnnnnnnnnnnnnnnnnnnnnnnnnnnnnnnnnnnnnnnnnnnnnnnnnnnnnnnnnnnnnnnnnnnnnnnnnnnnnnnnnnnnnnnnnnnnnnnnnnnnnnnnnnnnnnnnnnnnnnnnnnnnnnnnnnnnnnnnncaggactgagggcacatgctactacccctagtgcatctcccaggactgagggcacatgctactacccctagtgcatctcccaggactgagggcacatgctactacccctagtgcatctcccaggactgagggcacatgctactacccctagtgcatctcccaggactgagggcacatgctactacccctagtgcatctcccaggactgagggcacatgctactacccctagtgcatctcccaggactgagggcacatgctactacccctagtgcatctcccaggactgagggcacatgctactacccctagtgcatctcccaggactgagggcacatgctactacccctagtgcatctcccaggactgagggcacatgctactacccctagtgcatctcccaggactgagggcacatgctactacccctagtgcatctcccaggactgagggcacatgctactacccctagtgcatctcccaggactgagggcacatgctactacccctagtgcatctcccaggactgagggctcatgctactacccctagtgcatctcccaggactgagggcacatgctactacccctagtgcatctcccaggactgagggcacatgctactacccctagtgcatctcccaggactgagggcacatgctactacccctagtgcagcagtgctggggattaaaccgagggcgtcatggattcctaggtaggcagtctaccaactgaccacaaaccccagccttcctctgcatatttcatgtgtcgggaattggtctgttgtccttcactgtgatgctttcaaggttcatgtttcaaggtgatgagtatcaaaattctgatcttctctatggttgaataatccatggtatggaaattccatgccttatttgttcattagttcatggacatttgagttaattttactttttgactattactggtaatgttgctatgagcatttagttacaagtttttgtataggcatattttatattttgtataagcatagtttttcttgggtacatacctaaaagtgaaattgtttagtcatatgaaaacttcgtgtttaacttccgagctagactgttccccaaagccattgtgaaatgttatactctgattagcaacaactatgtagggtacatttttcctgtcttcaccaacacttgctgtcacttaccttttttattgtagctatccttgtacaagtgatgtggtgtctcattgtatgtgaggagttttttataacaggtttattattatgcatattctgactacatgtatgtctgtataccacattatatgtagccattgtgaacctgacgctggagttacaggcggttatgagctgccatgtgcatgctgggaactaaacctggatcctcagcaaataacaagtgctcttaaccaattgtgccatctttacagcccttcattgtttttattttatttattttgcctgcagtgcatgtttgtgcaccacatgcatgacaaagtctctctatgaagttctggctgtgctggaacttgatatatagaacaagcgaatctctaactcacagggatctatcctacctctgctttcccactgcagggatttaaggtgtgcaccaccatgccaagccccttactagcctctttaaaaatatttttattatagttacttcttaagtttcttattactatgatatatatattaaatgttatatatatatatatatagtatattatttatatatacatatgtagtttattatgacatttgcatacatgtatacagtgtacccttatcatcttcaccctgtttccttttctttttcttttttttgggggggttatatatctattatatgtaattacactgtagctgtcttcagacaccccagaagacggcatcagatctcattacagatggttgtgagccaccatgtggttgctgggaattgaactcaggaccttctgaagagcagtcagtgctcttaactgctgagccatctctccagcccctgttaccttttcttgttccttcccgttcatgctgatcctctttctctttccagttgtttttcagagacaggtctcacccctggctgacctggaaaactctctgtagaccaagctggcctgaagcataagagctagatttaaagtgtgtgccatcacatgtggcatcatgttctggcaaggacattgctattttgttttattttattttgtttttttaatgatactatgaatttggttggggttgatgattggagaataaatgagacattatgtacaggaacatgggcaccttaaccactgagaaaaacatctcaccccttcctcttcctctccctcctcctcctcccccttcttctcattctctgctcctcctcctgcctctcctccttttctttcccctcctcctcctccttctcctcctcctccttttgtgctccttctcctgtccctcttcctcctcctcttgtcctcctcctcctcttcctctacctcttcgtcccttctctctaatcctttcttcttttttttttttttttgttagtttgttttgtttttagtttttcgagacatggtttctctgtgtagccctggttgtcctggaactcactgtgtagaccagggtggatccaaactcacaaagatcctccttcctttgcctcctgagtgctaggattaaaggtgtgagccatcttagcatgtgctcacatatcttcttgaccaatcctgtgaagcagaactttctgtggcaatggaattgttctattcctacatcatcccatatagcagccattaataatctgtaacactgagtactagaaatatggctaatacaacagagaaacaaaaacaatttctagtattgccattctagataattctcttactctgattcccatcttctcggtatctctatttttcatagtatgccacccagtaccatcagggtcagctacctgtgagaacttgttctgttttagactctatcacacccctccaaatcagaaaattttgggctcataacccagcaatctagtttgacaaacttatctgttgattcccatgtcctgacacttgaaagccagttcttagtcttcaagccttctgttaaaagtcatactcaggcatgaaatgatatgatgagttttaccagaagttatttgctaacacactaactgcatattttaaaacaacaacagtatgattatagaggactttcaaaaataaagtgccaggaccagtgagatgacgtagcaggtaaaggccttaccaacaagccttaggacgtgaacttgatcaccaggacccacgtgattgaaggaaagaaccttctcatacaagttgtccccatctccttggatgcttggcacatatgcatacacactcagatagatgattgattggttgatgattgattgattgattgattgattgatagatgattgatacagacagatgagagatacacatatatacatagatgatagatagatagatagacagacagacaagacagacagacaagacagacagacacagatagatagatgagagataagcagacagattagaaatagacagacaaataaaggataaataaatagacagacagacagctatagttaaaaaacacaacaatgggactggagagatggcttagcagttaagagcactgactgttcttcctgaggtcctgagttcgattcccagcaaccacatggtggctcacaaccatctgtaatgtgatctgatgtcctcttctggtgtgtctgaagacagctacagtgacagtgtactcacatatgtagaataaataaatctttaaaaaaaaaaaaaccaacacagtgatgggaactattccactaaatgtcaagcatagccctacagtgtttgaattagagccgagggtttgatgcccactgtggtgtacttcccatatatcaggatgtttgtgaaataagctgctctggcttttttgtcgattggtttgtttgctggctttgtatctcccagaagagaaaaatctgcttctttggcgtgtgtttcaccctatccttttttgaggaggaggtaccctaccttttctttcactacttcattttactagggtgcatctttcatcacactcaacgagtgccttgagaatacttcctcctttttagggtttagcagacttcacatgtgtagctatcttcttttaatatgatttctgtcctcttctgcttgaaacctagaagagaagttggcttgctgtctcactggccgtgagccagatgtcataacttcaggcagtgccacgctgcatatctccagcagtttgaaatggagaacagagttagagataagatcagcagctttaggtgatggcattgtttcaaataaaccatgcatgacccaaagcttccacttcaaatggggaatgaaattgcttcatcctttgacagcttgctccatgaaagaaatttatcttcacttaattgctttagatcccagaaggctacatagagtaatttctaggagataattatttcaaattttgaaaatatgtgtctgtggacgtgaatttgcaactgccgtggagaggctggagggtaccaaaggtcttactgaacttgctcataggcttccgttctcattctgggaatcccctggagtcctagaccacttactctcggaatttgatgggccagtggtacagccctgtgtggctagggttaaagcatctggtctactactcttgtagtcgggtagccttttgctcagactcctgaagtagggaggggtgaagctggctggctggcttccggctgcatgtcttcatctagtctgactgggcacagattgcctgtactgtgggccagagccactgggggttccagtcagtggcagctgaaaaccagcaaacttgttgattttaaaacatgactatttagatgtcagggataaacttcctgtagatgggaacaagttccctaatctaggcatgtctgactttctagttcttgtctccttggcctttatatttaaaacatctaagcttccattctgattttattcatctcagccactgccagcctttaattagtctcttctgaaagtccatcttttttattctgtacctcctgcatttacctgttgtgtcccaagatctttacaagagtgaacagagaccctgagacttggaattgacatcctgagtgtctggtgttacaggttgttcattaggcatgtgagtgagaaacagtgaggtgcggctgagtgacacgatttacagacattccaaaagaaagacactggagagctgacttagggacaagggatttttgtattctccttaaaaatcagtgaatacctaagccagtgtgtagtgggactgtaccaaaattcatcactgtgttcagataccagcagagactctgtaaagcttaattaagacttacattttctactagagtctatctgaattgaatccttggaattttaaactcacaggggtcattcttttttttttttaaagatttatttatttattatatgtgagtacactgtagctgtcttcagacactccagaagagggggtcagatctccttatggatggttgtgagccaccatgtggttgctgggatttgaactccagaccttcggaagagcattcgggtgctcttacccactgagccatctctccagcccacaggggtcattctttaaggtgttctttagcccttccttttcaatcagggttggtcacaggccatggcacagtcaggagggagtgttgccttttctttcaaactcttacccaagaaactcaacagctatactgagtgagtcttatttacatttaaaaaggttatactaatgtgtctttgagggaaatctgcagcaagtgctgtcacatcattttttggagtcacgtcatttgaaggaatcacttttgctcccgagagcatctaaaagatagtctagagagcagtcaggccagggtatttatcctttgagcaagaaaacatttctgttctcaccacttctgtgacctcatctgaagtagtttttatcttgcccaccagtctgtcagtctaagagtagaaaactaaaagaagttgcccagccaagaattatagcatatcccattaattccagtacttggaaggtggaagcaagatcatcagttcaaggccagcctcaaggctttatgagatcctgtcttaaaaagccagagtgctgggggtggtgtttaatggccactcctgagttaaatacacagattctaattcagtgtctggagttgtccagcatatgaaactgagccactagtgagagatgtccatcttgtgtacttcctgagatttggctgagaagtaacagctctttcctaggatgcaaattaccttcatcataagcctaacttaccttgttagtggggagcttattttattggggtgtgggggggggaggagaaagagaaagacagagacagagacagagacaaagagagacagaggctgagagacagagagagagagacgggtctcactgcagagcccagaacttaagatcctcctgtgtcagtcttctaactgctggaattacaggtgtatgtgagcaccccagactaggttgcttacttaaacagccttattttctatgccctagagctcccatgatcacttaacataatttaagccatttcttttagatttgatctcccaaaagtagaacacaattcctttcttatttaattaaaaagactcataaagtttgtattggatacatagtgctttatcaaaaaggataacattgcgttatcctttatagtattcagctataaagtaatcccagcatatggaaggtaggaggatcctcagttacacagcaaatttgtgagcagccaaaaatggtgctggacttttcaagaattaagtgactttttttaaatgcatttttcagtgtggtccataaatcctgttatactgatgctttctttatactgatgtctgttcctttggaaagaagtacatcagattctaaacaaggaaaataaatttcaaggacttagtgtcatatcaggaataggcaagaaagaagcagtttggcttacaatatttcaaagaagagatacctaagaatgaagacatacatataatttgcttctctctcttaatgcttcctctgttgccgactgtgagtaaccaataataaccattaaccaattttgattgtttaaaattaattattctgggaatgtagtacagtggaacaacacttgcctaacaagcataaagtcagctggtctttgactccagcatttgtgaggcaggggcaggtggatctctgtgagttcaaagccagcctgatctacagagtgagacctgtcccctgcctccccccaaaaagcttattaggtcctgagttccatctctaacatcactagaaaacaacaaaactcaagtgaaatttaaattttaattctttaatcataatagccacattcaagtggtcagtcaatcacttcatgagttgaaggcctgtgctgtcaagcttaggtattgaaaatgtccctccttgtcagttctcttgggacatcactactttgtgataaaagtcaaggagttgacttggttactgagagtaggggctgagggaagtacaagagaaagtttcagaaaggagcctgcaagatggctgggcaggtgattgttggagaacatgctggcctcagcagttaagagcactgactgttcttccagaggtcctgagttcaattcccagcagccacatggtggctcacaaccatctctaataggatctgatgcccttttctggtgtgtctgaagacagctacagtgtgctcatataaataaatctttttaaaaaatgaatctaaagtatttttttaaacaatcaaatagagtttgattgacagtggggtagtacacacctttaattccaacactcagagacagaggcaggtatatctctgagtttgaggccagcatgttctccagttctagaatggccaagaacacagagattctgtcttgaaaaacaaaaataaacaaaaaaattaagtggtaaaataggatgtattatttatgatttagttaaaaagatttgatcattctagtatatgtgtatgcatttcatattgtagcactgtgaagaaagaagacaactttgtggtgttagctctctcggactacatgtaggttccaggaaacaaactaaggccatcaggtttccatgacaagtgctgtgccctctgagccagtgttgtctgtctgtttgctagctttctgtttattttcttgtagtgctctgcattcctgtgagccagtatgccatggtacacatgcaaaagtcacaggacaaccttgtgccatgtatgtcctaggtattgaagtaggttctcaggctcagcagtaatcttctttacctgatgggctatctcaagttcccacccctggcattgcttaattaaaaataacacttgtaaataattgcatggaggctatgaggagagatatgaagaggagatttgaatgtcaaaaatcagttcattaggagtaagtcagcatcagaagcagtagatgtcaaagagtaaatgatagatgctaattaagttactagtgaatattccagtatgttggatattatctttccaaagtgattgatttcatgatcttctatgaggtttttttttttaactcttttaatcactctttaatcacctctttccattgtttttattacacgcatggtcactctagtccattgtttttattacacacatgagtgttctgtctgcatgctctttatgtaccatgtgcatgcagtacccaatgagaccaaaagaaagctatcagatccgctgggactggagttatagatggttgtgaactgccatgtgggtccagggaattgaagccagatcctctggaaaagtacatctttcaaacccctcctcctctccttggaaagccaccagggtctactgaggctcttcattttcaggagtcagttcttgggctctagtgattgacagctatagtcaccttttcccactgagcaatttcagtagttcatcagaaaaggatccttaaagaaacagaatagtcaataaacatttaggttctacctagctttaaaagaaataatactttctaaataaagtcaaaactgctttctgttaccactgtttctatttttcctttcctagtagtattaatattataaatccactacatctgtgtgtatattcacaagcagtgtgtattcctttacctgtttatactatctacatgtcacactttctgtcctgatttgctttactcttcgtactgagtctgacaatttttagatttgtcatgtatagttgtgcatctttctcacttcgattttatatattattgcctagttatatgaatatatataatttgttatctgttctcttacagatacataattgttaaccattatcagcaatacttgaatgtatttgtactaatatgtgcattcatttaagaggaggggaattggaaaatagctcagtaagtaaaatgtttactgtacatgctcagggacctgagtttgaagctctagaacacagataaaagctggccatggtgtacactcctgcaacactagtactggagaggcagagacaagagaatcccagccagtctatagattggtgggtgccaggttctgtaagagatcatatctccaacaacaaggtggagggactggaaagatgccttagcagctgagtacaggcctccagaaatcccaggttcagttgacagcactgaaatggtgagtcacaacaccagtaagtctagtctcagtggatgcaacaccctcttctggcctctgcaggcaccagatgtgtaacaggcaaaacattcctatgcagggctggagagctggctcagtggttaagagcactgacttgtcttccagaggtcctcagtttgattcccagcaaccacatggtggctcacgaccatctgtagtgggatccaatgccctcttctggtgtgtctgaagacagctgcagtatactcacataaataatacatctgtctttaaaaactgacctcctcatttacttcacggtacgtgtacccatatatatgaaatgtgtatacacacacatgcacgctttaaaaaaaaaaaaaagacatcttggtgggcacctgtagtcccaacttcctgggaatggtaaaaataacattttggcctaggaatttttgattggcttgggcagtataaggaaacagtgtctatgagtaagggaaggaaggtactgagaaaaaagggttggtaggttgtatgtacgcgtatcagaaatttcttagctttttttagtgaccatgcccagttagagcttgctacctacaaatgcatgaaatcccatgttccttgtactttaaaagggtaggagtgatggctcgtggttacaattacagcactggagagccagagacaagaggtttcctgctcaaccagtccattctacatatagagctgcagaccaatgagagaacttgtttcaaagaaattgggaagtgttcctcaaatagagaatattggtccaatgttagattactgatctaacatacaagttcctagatttgattcccagtactgccaaaaacaaaacaaaataatacaaattcattcattaattgtgtttattatcagtccatctgtttgagtatgttagaaattttctgtgagaagacaattttgttttgttggtgagagggattgtttgtttggctggcttttggaatgattggttggttggttggttggttggttggttggttggttgattggttaatttggtttggtttgcttgtttttcaagctaaggtttctgtgtatagccctggctgtcctgggacttgccctgtagactaagctggtctcgaattcacagagatctacctgctaagacctggaattaaatgcatgggccaccactgccctcctaagaagacaattttaattaaaacaaggccaatgaaatatagtcattgcaaatatgtttaaatttatattgtatagaaaaaaaacagttaccctgataagcctaagcctataattttatggtttatctctgccctacactttctgacctttttattttttggttggttggttgtggtagttgtttggggtttgatttttgtgtgtgtgtgtgtgtgtgtgtgtgtgtgtgtttgtttggctttgtttttgtttttaagatagagcctccagaaaccctggctggcctctaacttgttatgtcactgaagatgagtaaactctgaacccctcacctccaccttccaagttacaggttccatggttataggctcgagccacaatggctggcttgattttttgttttttaattcatttaaatcttttttggtttgttttaaaattttactgttttaattttatatgtataaatattttggctacatgtatgtctgtataccacatgtatgctggtaccagagaagtcagaagagggctttagagcccctagtactggaggtatagatgtttgtgatcaaccatgtgggagctgagaatcaaacctgggttctctggaagggcagccagagctcttaaccactgagctgtttctccagcgctgtgccctttaatcactttgctgttaggttaagatattatcaaggataattacagtttcatatgggacaaaaagaagccttaccagatctgaagtcataaggaagcacgtttgtctgctaaaacttgtagttttaactgagaatgccagggctggtgagatgactcagtgggtaagagcactaacttgttcttctaaaggtcctgagttcaaatcccagcaaccacatggtggctcacaaccacctgtaatgagagctgatgccctcttctggtgtgtctgaagatagctacagtgtacttatttttaaaaaaacaaaaacaaaaaaaaaacaactgaggatgccagttcagtggtaaagtgctttgcttgcctagcacatgcaatgtgttccatccctagcacctccaaaactaaaggaagtaaaagttttactatatacattcatatctgtttcatttggaattgttttgtaaattagatgttcctacatgtgggttagtttcttagttttcagttgtatttcactgataagtgccaccatcctagttctgaagtctttcaaacaagtaaggcagtcaagcaaagtggtgtaatgtgtgtacctacaaccccagcagtcagaagcctggggcaagaagattgtgagtccaatggcttcctaagaaggttcaggctgggctacatagtaagtctaatacaacacaaagtctagtaggacaaatgtcctcttcttttcttgatgttttatagaagttgctcatggctttttctagcctcttttcatataaaattactttttaaagccaacagtagtggcatacacctttaacttcagcattaggaggcaaaagcaggcagatctctaggttttaggccaacctggtctacaggatgagttttagggcaggtagggtatacacagagaaaccctgtcttggaaaaaaaaaaagtggccatacatatacatatgagggtttatctctgagacccctgcttcactgcttatatgtcatcgggtagtgtatatagtagtttattgtagctagtccatttcaaaattaggaagcttcagcctccagcttgtgttatttttcaagattatttggggtcccttgagatcacacatgaactttagaaaatactgtttttctttggtaaacactgacattgtagccaggcctggtgggacttacctttagtcatacttagcatgtagaaggttgaggcagagggattgccaaggattcacaaccagcttgatctgcatatcagcacagtgataactttaaggcagtgctaattagtgagatcctctctgtcaagggttggagtggcattcattgtggtttgagtaaggctaaattaaaaatatagattacattggatagatttgtcatcttaacagtattaagtcttccagtctgtttcaagcctctgtctcaaaaaaaaaaaaagcaataaaaattgcaacaacaaaaagaaaaggctaggtatgcagctcagcagcagagcatttgccttgcatgcaaggccctgggctcagttcagtccctggtatcacacacacacaaaaggcttgaacagtagcttgaaagagctgtccctttccaggtcttacagcagtgtcccaaccacacctctcccaagcaagtcccactcctaggggagaactatccatgttctcaagagagtaaacaggaaaactaaccagtgcccaaaggctatcaaacacagcaggaagaaggtgctttcaaaaggccttggatagccagaagcagtgggtttgttgtgtgttccacctatgctttcttctaactgctgcaaagaagtcctccttccagtttagacagtagtgggactcctgtgttctgtctcccataaccacatgcatctgcttctcctgtaaagaaactgaatgttatccagcttggtggctcaaatctttaatgccagctttcagaagacaggtagatggatctctgagttagaggccagtctggtctacataacaagttccaagacagccagggctacacagagaaaccctgtctccatacaaacaaacaaaccaaaatccagaacaaataaaacaaagaaaatgaatgtcctatgtatttccagcctgacagctagccaggtccctaaaagatgacttcaccttgccaccctagcatctgtaaacccaccttctctctccatatgcagagatagctttttttattatagcatttagcttttcccacactgaagttcatctgtcgccacgttaccaaaatgcctatgctaccacttgggtgttctggtgtgagaccttacaagtgtcccaaccactccaccccagctactcagctctcccctcccgggcgattgtgttggaataatactcctcttgggttttagcatgtgtagtctgctatgggtggagccttgagctgttcacaggagtgctagtaatgtctggccttcagggctgccaaaggcaagaggatggcctcttcttggtttaaagcacatatttggattgtttgggggtagacttagatggagggtggagtgagtaaataccactctcttcctactgtgttctcaggaaatgattataaagcaactataagtgtgaataaagttaaaaaatggattggcacacccacctcaacaaaataaaacaacagatagactccatccaagacctacacccttatttttctgctggcttaactttggtactgtttcagagcagagaacggttgttaaaactattgctatgctcctctgtggaggagcgctgagagcagtactcagctgagtaagaggggaacttctccctctagacaaatgctgggctgtttccctgtctgctccacttccaagaagactatgagcagaattagaggtaggaggaagagccagtgccaaaatgcagtccctcagttggggagtaagtatgtttcagaccagtagtcacttgtcaatcaactcatgtccgatcctttcagctgcctcctttactctcacagctttctaagtggtacttccctgagttcttgaggatgttatcagtctcctgatgtgggtgatgtgctgcacagtgcacagcaccactgagtgtgttctcccttcgcagcagctgtttgccactggtagaggtggcgactgaatctgtgtgtgtggccacagtcagtgatgagccacccacccaggcctggggaagccctcagccaatgtggttcctgtggcagcagctaaacatgccagagctccgcataccttcagggctgtggtgtaacagccagctttatgcggtggcattgtttagtgttggttgacttgatttctctatccccaccctctgtgtttaagccagggattttggccatcacccagtaggaaaaaagctggcacttgctgagaatagcttcctgctgcctctcttgtggtagaagccaggaccaccttccatctctgcctcctccccatgtggcaaaaatgaagggccccgtctgtgctcagtatcctgctaagatcagggtgaggctatctgccaggttatctgcccagataaacatttattgtgtaatggatgcttttcaagtgctctgactggtcccactggtaaaattgtctagtttctctgggtttttagctaatatgtgggggttgatatccacatacagaactcctggagcctgagctgtgactgccatttgagttagctttgacgttgcccctccccaccctctgcctcagccattttgtatctgttgtcttgtcctgcctcaagggcactgaactcgcctctcaggtgtgcagtatctctagcctttagacggcagattaacagaagccacagggttaggagtcagcaactgacagctgcgtccagatgacaaagccggcattctaatactgttttccttgacaactagtgaacctggaggtgttttaatgaaggttgtaagaatagaggcagattttctgtttctaatccagtcatgctcagtgtatctggtcattgtccaattattaatgctataattgattttccaacattttattatgtagcaaatttgaaagaattttctagcaagcttagttatattagacacaattattctgtcaagatattttcactgcctttgccttacctgttattagtcctttgtccatcctttttttttttttttttccctatatttgtcatcaggatactttttctttttctttttctttctggtttttcaacacaggattttcttgtatagccctggctgacctgtggactaggttagcctaaaactcacagagatctgcctgtctctgcctctggagtgctaaactaaaaacttgagccattataccaagcttagtatactttttcttaatccttccatgtacacatgttttgttgaattcagtatttttagtgtttagagcaaaatacactgcaaagaaatgcataaatattaagtgtatctttgctgagttctaatagtgcatgtacctaagtaacccagaaatctatcaaatatacatttgtacatttcagttgggattgcattccctagaaaaaatataaacttgagagttggggctgtagctcagtggtagagcctagcatatgtgaggtcctaaattctatcccagtaatccccactttaaaaatgtacataaataaataaaaggaaaatctttggagtttgggagatggcttggatggtaaaatgctcgttgtgtaaacaaggggacctgagtttgagtctcggcactcatgtaaaagctgggtatagcagtagactcctgtaattccactgtagatggaggagtggaagcagggagctccctggggttgctaatctagccaagtctcaaaagaaaaaggtgaggcctagaaagatggctcagtggttaatagtgcttgctgctcttcagaggggagcctgaattcacttgccagcacccatgtcaagtgactcgcaaatgcctgtaacgccaactccagggcacccagcaccctcctctgccctcagcactggtacctgtggcatatgttctcatgagcacacatacataaatagaaattaactaattttaaaaggtggaaagggggctggcgagatggctcagtggataagagcactgactgctcttccgaagctcctgagttcaaatcccagcaaccacatggtggctcacaaccacccataatgagatctgacaccctcttctggtgcatctgaagacagctacagtgtactaatgtataataataaataaatcttaaaaaaaaaaaaaaaggtggaacgaagccaggcatggtatgcaccgttaatcccagcattcaggaggcagaggcaagtgagtctctgagttcaagtctagcccagttcatgaagtgagtgcaggacagccagggctcctgttacacagaaaccgtgtctctaaaaaaagttgagagcagttgaaaaagacacctgtcctcacctctagcctccagacacatgtgaacacacagatccccagagagagggagagattagattttcttattagaacacagtagtctttgtgtatccatatgttcatattttatgtcacatttttcattaattttcttactatagtgaatggaacttttaattgggaaaatctaagtgatttattaaaaccagctatcacatcaaacttttaatttttttagctattctctggatttgtgggttttctatgaatgttgacttcatacactgacaacattttctttcttggattttcttttttttttttttttttggtttttcaagacagggtttctctgtgtagccctggctgtcctggaacttactctgtagaccaggctggcctcgaactcagaaatctgcctgcctctgcctcccaagtgctgggattaaaggcatgcgccaccaccgaccggcggattttctttttttaagacaaggtttcactgtgtcaccctggtctcgaacttgatatgtctaccagactggttgaaatcacagaaagatacctgtatgctggaattaaaggcatgtgatgtcacacgcaggctcttttttggattatttatttttagtgttttgagacaaggtcttaatatatagccctggctggcctggaactcactatgtagaccagactggcctctgctctatgagtgctgggactaacagtatgtactactctgctatggtcttttttggatttttgaaacagtatctcactaagttgtgcaggaagttctagaactagccctgttgctcgtgttgttcttgaactcaaaaattttcctgtctctatcaatccccgatctctaggactgtgagtcttcactactgtgtctgtccagttttctctttttaaaccatgtatcagaaactttatgttaaataatattaatagtcattcttgtatttttggtagagtgctttaggattttaaacacaggcataaggccttgttttagagacaacatttagcatattaagaaagtatctttatatgttaatttattgattcttagtttagagaaatatactttgagagttcagtgtggctttccagcagctatctcatttgttttctttaatgtctttttcctaatgtcgttttttgggagttggtataattgtgttttaacagtcttcaagttactttacttatggtgcatccatttccatatctagaagtaatctttctgctttgctctttttaatttgggtaccagaactttgtcttgatgagaacagagaacaggtttctatttctgtgtcctagacttacacatcctactgtcagccttgcacagtactctcactggctttgatgtgtatacagaatcctttctggtcagcaaggctattttcttctgtagctttgttctcattgtttcccccttcaatctagtcccaaaactacagccagagtaagatgtaaattagaacattgaatgcctttactccgtacgcttagaggatttcatattactcaggagaaagaataccaagtccctacccagccttacttcctctctggtcacatccgcttctcagttctctctggcctacttactctttagtcatgacagctcatgctgctggaccgttgcacttctgttctctgtcccattcactgttattccactgcatggtctgctttctaacttccatcagatacctatcagaggtcaacttaccaggagttacttccgggatgacttatctgagtgctctgcacagacactggctcttaagaactggggttaatttttattcttagcacttgccatcaactgaatggtaaaacatttattttccttatttattatccctttgtgaatatatttattaaaagtttttatttacaattctaatcccaggcacttagagcataaacctcatccttgccattcctaaatgttaattaaatgaataaataaatgaattgaagtaactcaccaataaaggctactccgaaaacaattttaaatagaaaaatttttttttaattttttatttatatatatatatatgtatgcctgagtgtatttatgtgtatctcatgcaggcaggaagccagtgaggttagaaaagaccattgggtcccctgaaagaaaagttacagggaactgtaaagcaccatgtgggtgctaagaactgaacctgggtcttctgcaagagcaacaagtgcttgtaactgctgagccagctctcacttccttttcctggttctttctttattactgaacatttcaagggcttaggttttatatcttggggcttggtttatttttttaaggctagtgtacactatgtctcttcatggcatcctcccatgagcagttattatactgacgcctctggtcaccattcttctccagtgctctctcctatcctctggtaggagcaacgctcgggcctcctctacatgctaggcaaccttttaccactaaagagataaccccagctcaggtttattagttctgatgtcaagtctttgttatcatagccttgactggcctgaaattcaatatatagaccagaatagtctcaaacttctagagatctgcctgcctctgccccctgagtgctgagattaaaggtgtgtaccacctcacctagcattgggaggtttttgttgttgttttaatatttctactttggaatatcttagctaataagtaaggacagaatttagaatggtgctcccagaaatcctggtactcagaaaactaaggcaggagaatatagcacttccagccagtgtgggctacatagtgagatcatgtcatagtcgaaaatgttaagaatggctggttagagaccctttttattcctaattttatttatatttctcctttttcttaaatttatagcaacattgcatcttattttttcaaaacattcccttacatcagtattcattaatttttgttttcctttcttttcttttttttttttttttaaagatttatttatttatttatttattatatgtaagtacactgtagctgtcctcagacactccagaagagggagtcagatctcgttacagatggttgtgagccaccatgtggttgctgggatttgaactcctgaccttcggaagagcagtcgggtgctcttacccactgagccatctcaccagccctgttttcctttcttttcttcccttttccttacaactgtttttcctatttgtgatccatcttccatgctcattttctattagtttatatatgtctaggttttatggttttgaatatgccatcactagtactttggctgcattctaacccatttaaaaatgtattattctactgatccttttctaaacaatttttatcttgcagggttttttttttctttaattatttccacattaaatttttttannnnnnnnnnnnnnnnnnnnnnnnnnnnnnnnnnnnnnnnnnnnnnnnnnnnnnnnnnnnnnnnnnnnnnnnnnnnnnnnnnnnnnnnnnnnnnnnnnnnnnnnnnnnnnnnnnnnnnnnnnnnnnnnnnnnnnnnnnnnnnnnnnnnnnnnnnnnnnnnnnnnnnnnnnnnnnnnnnnnnnnnnnnnnnnnnnnnnnnnnnnnnnnnnnnnnnnnnnnnnnnnnnnnnnnnnnnnnnnnnnnnnnnnnnnnnnnnnnnnnnnnnnnnnnnnnnntgtcacaaccctcgagaggtcgtcctttacttccacctgagtcccagggctcagaatgaggtcagcaggcttgcttagcaagggcttttcttttacctgctcagctacactttacctttccacacttaatcttttttaaagtcttttgaattttaaaaaagaagttgatttataaaacttagcctttaggcctagggagattgctctgcccacaagatgacacatgcttgtaacaacagcactggggaactggagacaggaagcctgctgcttggtgatcccaaggccagtgacagattttttttcatgtttcttgtgtgtcactgtttgcctatctcttggagtggtttctctttccatcatttattaggattctttctctatcagcaactttgtcttgagggctccacctctggtacttttcaggacagagaaaatgaaccatcagcaccaagcatggaaaagggaaagaatgtgaaataaaattgagacaacatctaattaaaattttgttttaaacaaaagatttagtcagactacaaaataaagaccatgggcccataagatgatttagcaggtaaaggcacttcaggacctgagcggtacccctaagaccactgagtgggtaaagagaactgactaccacaagttgtcctctgaccaccatacataccgtggtatgcttgcacccacacacacctataaaatgttattaaaaattaccttttactttttaaaaaatgtagctctgttggtagtcattgcctaacagccacagaaccccagcattgcacacaagtgagtgtggtggcattcttctgtaatcccagcacacttctatggcgcagggtcatccagaactctggaaaatcttcatccagcatcgattatggagttcctgtattagatgttacccagatttagggtggttgtctcacttcaaatgatccagtcagatcactcacaggtatgcctagctgcttggggtttggttggttccagatatagtcaagttgacaaccaagatgaggagccatcaagtccccttctagccttctccaacctctgactgctccctgagactctgagcagttagggcaaacttgcaaatggcttgcaaagggcaggctagagtccattgattctcgcacaccctccttctaggaggctgtgtcaacagtccacagttgggatccttcagccatcgtaagcacaccaagcagagctcataaagatgcaacagttgtgacttgtatgccccagtgaactccccaagcccctattccatgggtcagagagttgaggtagcaaacacaatgttgagttctgcaccgagggaggaaaaccaagagcaccaggcagttctctgctggttttaacactgacacttttagaccccacccagtaataaaccatatatatatctgccaggagagatcagtgctctcattatcccttgcagcaaccacttggctctagaggccaagcagtcccctgtataccagctcagagttctctattgatgcagtcactcacaggtattagggtgcgttcctttctatggagagtagagcaccaacagctgtacccctgtgcctttcatagctggcacttaactcatatggtcatcatctgaccccactctctcctgactgtttccaacctagacattgttgcagggtggttttcagatccccagggtatctccaatccaaacaaaactttcagagtgacatgtggctatattgctctgagctgtggggggaaatatagattcatcctctagtgctagtataccagattgaactaagccataccaaacccagtactacatttagaactttgcagaaccctgggtttctcttggagctttggctgcccatcagtagatgtataggcagtgctacctgcctgcctctgttgtggcatgggttctttctccttagcgcccagagtaggaactaccgactgtttcttctgagtcacctttctactacttcatactttttagctctgtcctatcaccttcttgattcccattgctcttgccatctttctctcctccaaatatcatcttccctttgtaatcctgacacacctcatttgtacagtcacatagaagaaatgtctgttcccctttttaaaaatttgcttcattatgttcatctctatttttttccttctgtaggaaaagctccaaaaaaatcatttatttgactaattcagttttcctgttctagttaactgctatttgctgcatttcctgaggttgttttttttaattgtttttctctgtataactgcctactacggattgaaatgcaatcagtttgatttttaacctttttttattgaagccataactgtcatagagtaatatagtaaatttaaggtcagttaattgattgcctgattggttgattgactcatagtatgtgctacccaggatatcttcaaactcctgcagttctgccctgggttcccaagttcttggggttacatgtaaacatcaccacctggtatcctcagcttttatatcattctcttcatgctaactgctaccatgatcaagatcagaatgtgtctcacatccggggggttcccttatgccacttctcattggttctcttaacattattctacctcattcactgcctcttagttgtatctggttttgggctgcatattagttgaatcataatgtacatgtactttatagttgttctttcatccaacagtctatgagagtttcattcatttttattgcatgtaatgttaatattcattgttcattggtgtataatattttaatagtatcctattattatgttgaacatttgtttgtattaacgtttagggcctattatgaataacgctaccatgaacgcttttctgtttgtatctttgttaactatatgctcttttctttgaaaaaggtcataaagtatacataggctaggctaaggactgtagcttaggagtgtgacgttgctgcttgagaggccaaagcagaaggatgagaaggccaaggccagcttggatcctgtcttaaaactcaaatcataaaaatgtaaaaggaagggcatttttaaaaaaaaagaaagaaaaagtcaggctatggtagtgtgtgcctttaatcccagcacgcaggagacagaggcaggtggatctctgtgagttcaaggccagcttggtctacaaagtgagttccaggacagccagggctatatgtacagagaccctgtcttgaaaaaccaaggaggggggggtgtggaagggaagatactggggtctggagagatgactcagtaattaagagcacatgctgctcttcgctgaggacctgatttcattttcaaagcacccatgtcaaagtagctcacagccacatgttatactagtacttggcttctgtgggctcctgtgctcacatatgcctacacataattacagacatacacaatatgatcataaacattgtatacatttatcaaaatttcaaagaactaataaaaattttgcatcttttttatcttttttttttttttttttttttggtttttcgagacagggtttctctgtgtagccctggctgtcctggaactcactttgtagtaccaggctgtcctcgaactcaggaaatctgcctcagaaatccacctgcctctgcctcccaagtgctgggattaaaggcgtgcgccaccacgcccggctctaaaaattttgcatcttaacattaaaaagaaggctggattataactcagtagtacatttgaaagaacctatgcttagttcccaataccaccccaaaaacaaacaaacaaagaaaaaatgaggcctaactaaagtaggctctgctacacagattgcagagtggttgcacagtgtctcagacaggctccaatgtttgagagttttaactatacatctttgcaatctttattatttgatttgatttgattttttctagtgggtttatagaagaatctctttgatgtttttagtgtgtgtatttgagtgctttctacatgtctgggtgatgtctgaagccagaagaggaagttagatatccccaggagctggagttacaggcatttaagccaactgatgtgggtgctaggaatcaaacgactctctggaggagcagcagatgcctttaaccactgagccatctccccatccctgaatctcatgatttaaacttgcatttccctgatgaatggtgataattgagttctctcatggtgctgcaagccaaatcactaattctctgtggtaaacctgtttctgattccatgttttaacttgttgtctttttcttattggtttgtatatttgcctttaaaatgatcttttttgtggttatgtttgcttttggtttttgatacagggtctctgtgtattcttgactatcctgaactcacactgtagaccacactggtatggaactcacagagatccgtctgcctctgcttcccaggtgctcggatgacccagtttagtttagtgttcttagtctctcatttatttgtttgttgcctcatggaaagcctcagttttgtcttctgatagctaatacaaatccagctaactgtatcacataactgcataaccttggctcttggcctacttgttccagattaagggtcttattaggaggttgctgctgctaaggcctcatgagcgttcttctcaagcctttggtgggctgaacttactggtccttttcctcattccgtctcctctgcagtttctcttgtagcatattcctgcctgtggtgtatacttaccttttcatcagacatttcagtagaaaacaggaagggagataaggtgaagaggcattggaccattctaattacagctcagtgctggttcctatggatgtaacttagtgtagagtctttgcctaaaatgcttaaatgtcctgagttccacccccaggacaagagggaggtatttctttattttttgttgttagtaaaatatttccctgggggttggagagatggctcagtggttaagagcactgactgctcttccaaaggtcctgagttcagttcccagcaatcacatggtggctcaccaccatctgcaatgtgatctgataccctcttctggtgtctgaagacaactacagtgtactcatatacattaaaataaataaaatcgggctggtgagatggctcagtgggtaagagcacccgactgctcttctgaaggtccagagttcaaatcccagcaaccacatggtggctcacaaccatccgtaacgaaatctgactccctcttctggagtgtctgaagacagcgacagtgtgcttacatataataaataaataaataaaaaataaataaataaataaataaataaataaaatcatctttaaaaaaagaaaacaacaagcttatggatatataaaatatataatatatccatatattatatatatattatatagagataaatattatatatataaaatttgttgaccaccactctcctgatgtaaaaaatggcatcaacagtgtgcagtggaatgaccagcttgttaaatacagggaatatatcatcaaaattgccacccctagaataggcaggctccatactctcttcaatgattccagaaagttctctggatatggatcggtgttgaatctgttcagcagtgttgacaatctgatcagaagtgatatctcctacaaggcttaaatctcagcactcaggaggctgaggcaagagcaccatgaattcaaagctgcatagctagagcctttctcacaaaaacagacagacgactctgctttttagtatttaacatttttcctcttgttttcctcctctcctagtggtaccttgtgagccccagtaatcaggaaaaaggcagaaggtgctacctcagtctgagcctgtctgttctgaatggttccacagtcttctgcagacctatcttgtctctggttgtcttgacgatccatcttggggcagaccagtaagaggtgtaggactgacttactatctgccacctcacattaaaaacttgaagtcaagtttggtaagcatggcaaaagtatccggtgactctgggtggccaaaggttgtgccttagcttcttccaagtcagaagcagaaaaattaattcctaggtttccagtttaaatatcttatggtggctgctcattttattaagatgggtatttcacttagaatgtatttgtatggcctaaaaacactttgccaacaagctccagcaaccctcctaaccctcccgtccagagtccttgaattacatgaatctgtagcatgtccatgagtgctgggaatttgaactctggccctcagtcttacatagtaagtgctattccctgagccatccccatagttgcctaatatggatttatatgtataggcttgttactttataacaagtatatctgctatgctcccttaaaactcaggaaaggaaatgagccaggcatagtagagtacacctttaatcccagcactcaggaggcagaggcaggtggatctctgagtttaagcccagcctggtttacaaagtgagttccaggacagccagggccacacagagaaaccctgtctcaaaaaacaaacaaacaaaaactcaggagggaaaaacccaatgattcatgaagatgtctcccttaagtctttctatgttggatataaatgttgttacttggtatacacacacacacacacacacacacacacacacacacacacacacacacacagaggcacacaggctatgagtgaggacaaaagctcaaaggctcaggaagacaaaggaagaactggacagagacagatgcctaaagtgaagtaaggggccattgctttccactccatttaagatgacctacctgctgccttcatttgataaaaatgccacatgccccttttggcagctatataactgaccctggaattaggaataataactcaaggaacaatttgagaattttatggtcttatagtgccaaagacagcttgtcaaaggctgagcaggaaagcaggggctgtttcctatgttctttcagttttcatgtgggtcataattgtcaggaactagtatgagaataaagcggagtttagaagtttgaggctcattatgccttatatttcctgcttattgtttcctgtttgttgctttttggtgtaagtaaggatttgtttacttaacaaggcataatgctcctatttgtagtcctaacactcaggagaccaaagcaggaagtgtcaacttcaaggccagcctaggttacaaattaagatcctgtcctttttttttttttaattagaaaagttctttaagttttattctcaactctagtgggaaaaagtttaaataacttttattcttgcattataatacaaaacatagacttggaatggactctttactaacgtttaaaaagaaatgcagtaataaaaatttaactaagaatgccctgaatgttacttgtaaagacatcctcttcccccaaggaccaacctgattggggctctctagaccggtgcagagaggtgaagtccagctaacgacatcgccacttgtgtaagagattaaatagaaggcagacatatagagatttgtaaatatatacttggtgccagcaaaaccacaaaagatgctgtatttgtggtctagggaagtttaaatagttgtggtcaaacttaaaattcaacatagacttctcctctgtgatggaagccttccagaagctgcgtggtgggtgtgtgagctgcatagactcttcttacggagctgggctggaaaagaccgtttccttctttcatgtatgcacctaccagtgtgacttcctgatactccagtgacctgcttagagaggacactcagaggtcctttctgctctgtggctcacttgtgcaattctgatcaatagcatctcatctcagaacctctccgtgcccatcttacattgatgctagcacattctcacggtgttgtctttcttatagtaagtcccacctctctctacacttgattcttagtctatgaaagaagaacattgttttgtccactggtggggtcctggtgcctaaaatagcaactgtcataccacaccaggtgtgtaacacatattcaataaatgtactcagtgaagtgctttagagtgtttggggagtgtagtctaaagagggtctcgtgtggcagaccctaggactatgaaatcagcctgaaacacttcaaatatctttattttttccttttttggggggtggggatgggatggggtgtagttttttgacagctgggctgtcctggaactcggtagacccgctgacctcaagctcacagagatctgccttcctctgactcctaagtgctgggaataaaggcatgcaccaccaccactgtactttctatgctgtggaaactgtggagtccttgagacaggcactacagctttcagatgcacagatacctgacttacacaaagttaaagtttcattttcacaggaaaaaaaaatgcactgtttctggcttttgaaatggttgaaaatccattggtatgggatgtttgttgaatcggtatgggagctctttctaggcagtatgcaggctggagcacatacacactagttacatgcttttctgatatgtaaatacaatcctttgtgcccagcctttgatccttcaacaccctaccgggctgaggagtttgttgcaactgaccactcctaggctttggatttgagcacatctttctcctatctgctttctttgctgcctttagtagggtatcttacccgtcctcctctgttgcaataaacatgttaggtttttctgggtgtgctccagagcctcactgctgatgatctggagcattcagtaggacgtgtacttcacaaatgattttgataatctctgtgactctgttaagtatatgtattatgtatgtataaatatatggcatttatataagtatatttataaggttaaatagagagctcaaatgagtcacatatggcaatggctctaaagtagacaccagaaattggccacagggctaaggaacaaaagatctagaaacctaaggtaagatataatgtgcatttttataatgtatagtgtatttttcagctatacattactcagcagcttgggtttgacctgattggaactggagtgccaccagatcgtgagaaggtctcacattgaatatctagactgtgttgttagaagcaagggtggcttcagcttacacgacagctgttagttctgtcttgttgattttaaaaactcagactgtgtaggagttccctatacagactgatagagttttactctttctgtcctatcagtatgtagcaccaaaccgacactgaaaaatgtttagttagagatgcgcatgtccttctcatgtgcttctcaaactgaacatgcaccactcattgtgggttgctatagcaaagcctgctctcaccctgccaacagcacagattgaataaagaaacagcagtggatcaaggttgagctccatggaagctgctgagtgtcctcattgggctccaccaaatgagcttcccaacatagctgagcagtggcttgctacttgtctgtccctctgcagagtttctctgtgtagaaaacatcagaagctggggtctgtaaagtaaaccatctccagacccttcactggtgcttccttcagaaagacaagactgagggagcccagaggctagggagctggggtctttgacatggacagagtgaaatgcaagatgatagcactgcaaggctgctgagaaagctgtgcacttgaaaattctgcccaaggtcaaagtgttcctcaactcctcacaagtttggtgttctgagtttcttgccaaaaacccaattaaacaactgatgtttgtttgtttgtttgtttactcaagaccatccttgagtaagttaagttccaggccagcctggctacataagaaaaccctaccccaaagtaaagatgaaggtgacagtggttaatctataaaatttcattaaggattaaatgagaaaataggtggagatgtttaggtttaaaaatacaggtctttctcaatatgtgttcttatgtgagaaaatatttcatttagaattataacagcttttgggggttcccttaatagcagtctttccttaaaaagctgttacaatcctgccatacaacaggacccatgtatcttcccagatcatcatgaaattctagttcctgttttctgtaattctatcctttccatgatacatttccacactttccccatttgctgttgccattgcctgtgtctttgctgtcaaacctgttaaagtcactctatagtctaacattcaagcctagcacaaaagtgagctatgtgtaggtgacttttcagaaggcacagcaggtatgctcacaggcacaacaccccaggattttcctagaagcggaaaccaagccagggtctgcagcccttgcagcaacacaaccccactttggaaaagagaccatgatgtgggcgttcctgcctttctcttgctggcctcctttccacaccattccttctgcagtcccaccccactcagccttggcacacagtcccatgaacatgccacctgccttctctctctggccccatcctttggctgcctggtttattttttccacatcctcaccctcttccagctccaagttaaataaccttcacagatggcttgttccatcagagctgttcaagaacacagcacaataaagtagggtccagaagaagctgccagagtctgagactgctcttgctgtggtggttcaagatgattttgtcatcttccctagaagtccacagactgggagcagagggcttgcaagagatgaagaacagagagagggatcctcagtactgtaagcctatggcaacgagcagctacttctcagttagattaacaagtcagtctggactggctataccacatgctccattttccacagaagacaatgagagctctttgtagttggcaattctcccctactttttatggcatagaaacccaacaggaaatggcagtcctgtttgtttgggctagtggtttgagtcttgactgaacatcttcatgaactcctctaagaggtctagatccctgacttgtgtaaccttgaagggcagtattcccaactgtcagcacgccctaggggaggggttgggcgctggatgcctattggaaatcctgtggagagacaagacccagaatctcactcttcccttgacatgaccatggaggctttctgtctgccctgtcatcatcttcttattgctgtctctgacactcagcctctgtcgtgcctgcagtggtctgcagaagtttacctttcccatttctccactctccttccttctgttataatcacacgtccatttaattttgtcctcacactgagttagtttttcctgtgggacttgagacctccagaggctctctgtttcttttcctttccactcttttgagctacagcctttgtaagtagattcctctgaagtctccagagaaagggtagtgtgagctgttgatggttaaggtctctcttacttagttaacagagtgctcctgaaggacctccctccctccctccctctgtcctccagtaaagagcatgctggcagctgatctttttgaaagctagcatgacagggcagagaccagaatatgtgccatgatcagatgtgttatgcaaagaccttcaagaagaaacctgtgttaggacttagcttagcataaagctaagctatttcttagatccatgcaactcactgtctggtgaactaagtcttaccatattttgtctaggaaataaaaagaatctgaatgacaaaaccagaccaggtaccctgagaagtttttgatctttgtttactttgtgttcttacctgcatagtggtagtactgtaagacaactcagtgagtccaaatccagctgagtacatgttcatttcctccgccattccgcttccttttctgacctcccgggattgctgtgatgatcaaagaaaagtacttacagtgcttagctgctgcactcactactttacctacatcgcagcatttccagtaaattgggatattgcaaccaccaagaaagtatgaccagtgaaaagtgcaggtaggtgaggtaaaatgctggctggctgcacttaacccctcccctcaacctccactgtagacgagcttcacattcagtaccaggctttcagagctccatgatcgttgtcctggagggcaaacctgtttcctctctgctgctggaggtgttgctggtacatacagagatgtgaaccggttgccagagattgctttgcctctttgcatctctgctcttcttaaaggatccctcctgttatcagatctgatgagaagttagattaaaagcctacccagtctcctgtggactctttggtttacactctctgtggcccagagaggggtttaggggatgttggagacagccacgggaaagaaacagctcacccagtacacagtgtgtgagccagcagctcccttctgtctgctgcaacaagctcagtgaccactgacaagtctccagaacactaaacaggtgattaaaacacaagtgtaagtctttccaagcctcatagaaagccagctgacaccaatagaaagtttccattctacagctgtatacactggtctgccatttcttcttctgttctgaccagagaaaaactttatgctaatgttgccttcattccacatcttctttagcagcttatgatatgagaagaatctgaaccatctttttccaccagagacatctccagcctcttgctatcaaattaaattgtgagcctttaattctgccagaggaacaagcctagctcttggcactataccctaatagctgagttccagcatcaaaactcagtagcaaactgtctaaatatcagtttgttcaaaagatgccttccttcccatgttcactacagctttattcacagatacgaagttacagaatcatcagtagatggataaagaaaatgtagcgttaagtggagcacagtagagaaggatacccagagtcaacctctgacctctgtgtgtgtacacatgatgtacatacatagcagaatatcatccagcctttaaaagaaaagaaaaaaatgctctcatttactatttctacaaaggtagaactgcatgggagaactttacacatgaaattagtcaggcacagaaagacagattgcatattgtcacacgcacatatggactataaaacagtagagatgagctgggatatggaccacttgtctagcagacacagggccagagattcaaaccttgcaccattaaaacaacaacaaaagacagaagcaaagaatacaatagtggttatcaggctggggctgggaagtatgggaagttggtggccaaagggtacaaagcctcagggaaggggaatttgaagcacaggggtttgagttaattgagtttttcttgtttttgtttttgaaatccacatatcgtgagtggaggtagaagaggtggggtagtaatacaggtgtgctagagaatgaatgtaaagcttctgactataagaaagaaaatggtgccgggcatggtggcgcacatctttaatcccagcactcgggaggcagaggcaggcggatttctgagttcgaggctatttcgaaaaaccaaaaaaaaaaaaaaaaaaaaaaaggaaaaaaaaaaaaacaaagaaagaaagaaaatggctttgacatggtgaatatgttaattagcttgattaaattactttgtgttcataaatcataacagtactctgtaccatataagtataaacagttacaaattgccaattttattttaaattatttattatttttattttctatacactggtgttttgactgtatgtatgtctgtgtggagttgtcagatttcctgaaacaggaattacagaagggtgtaggtacctgtcttatggatactgggaattaaacgtgagtcctctggaagagtgctcttaaccactgagtcatctctccagccccaatcacttatttgcattggtgttttgcctgcatgtatgtatgtatgtatgtatgagggtgtcagatcccctggaactgaaattacagacatttgtgagctgccatgtgggtgctggaaattgaatctggatcatttggaagagcaaacagtgttgttaactactgagccatctctccagccccaatttttttttttttttaaagatttatttatttattatatgtaagtacactgtagctgtcttcagacactccagaagagggagtcagatcttgttacggatggttgtgagccaccatgtggttgctgggatttgaactctggaccttcggaagagcagtcgggtgctctaacccactgagccatctcaccagcccccaattttttttttaacgtaggtatatatgttgtacctgagtgaggttctgtgtaccatgtgagtgcaggtacccgcagacatcaaaagagagcatcagattcccaggacctggtcttgtatactgctttaagctgcccagtgtgagtgttaggaaccaaactcaggacctctgcaagagcaataggagctcttaattgctaagccatctttcgagctcccatgttggtttttgagacaaggtcttactctgtagcccaggctggcctagaactcatagtgttcctctttccagcttagaactaccatgcccacgaacaagaagcagagttggttttttgttttgttttttgtttttgttttttcaagacaaggtttctctgtgtagccctggctgtcctggaactcactctgtagaccaggctggcctcaaattcagaaatcagcctgcctctgcctcccgagtgctgggattaaaggcatgcgccaccactgcccggcagaagcagagttttttagtaaagggttctggagagagctttggcaccatcagcatttctcaggcaagggttagtaatttgcctagattcatagagtatgatgtggtcttccctagacctcctctggcatgtcagctgcacaagtggaatgcaccaggaattaatgcttcaagaaaccttcgagccgggtgtggtggctcacgcctttactcccagcactcgggaggcagaggcaggcagatttctgagttcgatgacagcctggtctacaaagtgagttccaggacagccagggctacacagagaaaccctatctcgaaaaaccaaaaaaaaaaaaaaaaaggaagaaagaaagaaagaaatctgcaacaagagctagagagatggctgaggttaaagtgtttgttgtttagtgtgaaaactggagtttggctccccagaacttatgtgaataccaggtggacatggtcacccacaagtaattccatgctcagaaagcagagactgggagtcctcagagcaagctggctagccagagtagctgaggatttccaagatcataaaagtgccatgaaaaatgccaggtatagggagctgcccttccagaggactcaggttcaattcgcagcacccacatggcagctctgtaattgtagttccaggggatcccacacgctctcacagactaacatgcaggcaaagcaacaaaagaaaataaaagataaatacatcacttttgaacaaaaaaagaaaaaaaaatgcaaagtatgaactggatacagtggtacatacctgttatctcagctatgcaggagactagcacagggtgaaggagggggaaaggagggggaagggagagaagaagggagaataacaaaagcccagccataaatacctttgagacaaaaacttgataaccaagttcaattaccagatcctacttgaaagaaggaaactgacttctgaaactccacatgtacattgtcctctgccctccacatgtacactgtggcctcatacacaacaataataataaattaaattgaaaaatagtaaggtgtgagctaggcatggagctctgtgccaagcaaggtgtttgcctcccataacttaagtctaggttctgttcctagtccataaaaagaagaaagtaatttaaggtcatatacaccttagcttaaatagagttgtattttgaaagactaaaattttgtgtttattttcacataatcttctaacctctgtttcctcatttaattattttgttgttggttttgttttgagacatggtctcaatatgtagtctaggatggcctcatatccatagtgattctcctgcctcagccttccaagatctgggattacaggaataagccaccatgcttcgctaaccttctagcctttaaaacagtaattttgaactagtctagttaaatctgtacattctttgttcagtgaaagaccagtttccaaaattaagtcagagagagtagagagattgtatagtatgtaagagcatttgctgcacaaatataagcacttatttgaatcccgatgacacatatgaaaaaccagagctgcagggagcagaaggattgctgggcagcctaaaaggctcagtgaaggaccccatttcaaaggaataagggtaaaagagcaagatgcccgaagccatcctctgtcttttataagactacatacacacatacacacacacacacacacacacacacacaccactgtaacatgaagagccattgaggaaaatgaccagtatcctttggcctccatacacatgtgtacaatcatgtgcccacatatgcacagacacatacaaacataatctcaacatttgggagttcatctttgatccatataacaaattcaaaaccaggctgggatacgagaccttgtttttaaaaataagtagaaagatgtttgagttggtaaagtgcctaccttacaaacatgaaagcctgagtttagagcctcagcatccaaataaaagccaaatgacttaaatatctataaccctagtgtgggggatggaacagagaccaatggagcccaaacctcattaaatagccagtctagccaatcattgagctctatgttcagtgggagaccctgcctttagggaaacagaaaaagtgcaatagaagacatgaaatatctactctaacctccatatgcagaaacacacactatacatacacaagatgaaaataatgttttaaagtattcttaaaaggaggaagagagatgactcagtgatcaagagtgggtattactcttccagaggacccaagtttggttcccaacacccatgtgaggtgactcacaactgcctataactccagctccaggatatctgccttagagggtgccttcactcacttatacatatacgattaaaaataaaataagctggggttggagagagaactcagtggttaaaagtactagctcttaacctggcttgctcatggcagctcacagctgtctgtaactccacttccaggggaatccaacactctcacatagacacgcatgtcagcaaaacaccagtgtatagaaaataaaattaatcaggtggtgttgcacacctttaatcccagcatttgggagacacatgtgaattcaaagccagcccggtgtacatagcaagtgtacatgcaggaaaaatagccatatatgcaataaaaataaatgttttcatgtgcatattctggcgttggagagatgtctcagcagctagaagtgcttactattcttacagaagatcctgacttggtccatatgactattcataaccatctgtatctccaattccaagagatccaatgctctcttctagcattgtcaggtaccaaggcacatgtgtggcgggtatatacctgccatccaaacactcatacacataaaataaaaaaataaatacagttcataaaaagtgcatattccaagatctttacttcaggaatactaattaatttagtgttgtgtagaccaggctggccccaaactcacagagatctgtctgtctcagtttcccaagcacatatgctaccacacctggctacctcgtttataccttatcccaaatttttttgttgttttttttcgagacagggtttctctgtgaagccctggctgtcctggaacccactttgtagaccaggctggcccagaaatccgcctgcctctgcctctcaagtgctgagattaaaggcgtatgccaccaccactcgactttatcccaaattattgacagacatttttttagcatagtgtatcttctttctaattgcaagacataatagatcatattagaatcaggactgaacttaatattgacccaatttaaaatggcttactacctcagcactaatctcaggaaacttctctgtcttttttctttctttttttcttttgagacagggtttctctgtgtagccctggctgtcctggaactcactttctagaccaggctggcctggaactcagaaatctgcctgcctctgcctcccaagtgctgggattaaaggcatgcgccaccacgcccggctccctgtccatatttttaaatgtgttatggaatatcttcagatagtgctggggttccgttggttggttggctttcttttcaatgcataacactgaacactaggaatatagcatagtagcagagcatggcatgtggtacacatggcatgtggtacatgcggtgagtggtacttcgcatgtgtctggtcatgaatccaatcccaatcccagtactaaaaaggaaaagggaaaagatgcctgtcgtaagtgctctggagagcattaagtctcacctttcatctcaatgcattgtgtgtcatgtcttgccctggagcagcagcctccagttaagacaaggtaagatgtgcccagagagctctgcttcttgagggctctttcacattagaacctctgtaggctgcctatcagagggcgcctgtcactcattgagactgcacttcctccagaagcagcaccctagcagaagagcacctctgcgtaggccagtagtctgtatctcataaccttagggtacgtgtgtaaagtgtggctggcaccctctcctgtatgacttctggaattatcctaaggctgcctgccacctgcatgccatgattagtcgtccatgttgccaaagtacccacaggttgtgttagatactacaggtagattttattttatatatatacatatacacatacatgtcctcaagaatcttaggagaaaataatcagggcatcataatgagaaatactgaaaagtatctgtaaggccaagtttatggatggtgttaacttgagagagattagatttttctaaaaaatctaaattttttagatacatttccatctaaaaaatagtcagctagctatagtagaagtagcatatgatgaaagtaagccagatatgctgcagtgtatgcctgttgtcccagctattcaaactgaggcaggagaattggaagtttatgaccttcaacaagatagcaggtttaaggccaccttggttagcttaacaactaactgtcctaaaatcagaaaataatttttaaaggggccagatatggtggcatataactttcagcactcaaaagttagatggattgctatgagttcttagtatgacttgctcttaaaaagtttaaagacaatttttttaaagaacaaagtaattccatctcatctgttgagagaactaaagttgatgtggtggtacatacatgtaatcctaatgctggattagctgagacaggaggatagagaatttgaggtctatgtttcatagcaaggacttgtctaaaaagtaattgtcatctcttggtggtggcatacactttaatcccagtacttggaaggcagaggcaagtagatctcttgaatttgagaccagcctggtctagagaatgagttctaggacagctagagctacacagagaaaccctgtctcaaaaaagaaaacaaaacaaaaaatacttgtcaccaagtaaaggtaggtagctgccaccaaggctgacaacctgagtttgatctctaggaaccacatgactggaggagagaagtgactcatgcccgttcacctctgacctccactcatgtgcgccatgacacacacactacacatacacacatatgtacacacgtgcacacaaacgcactatatgcacacacactcacacacacaaaacagaattcagatatccaggtcagaatgaagaaggtaagaattgttctgtgctctctatgtccaggacatatgtggtgcttacacactttcccttttttaaagatatattttgtgtgtatgagtttcatggggcatgtttttatgcatcacttgtgtgcctggagaaattgatcagaattagatcccctagaactggagttataaatagttgtgcgtgttagaaactgaatccaggttctctgtaagaacagcaagtgctctcaaccacagacttgtctctttagcatacatttgactctttttttttttttttttttttttggttttttgagacagggtttcctgctgtgtagccttggctgtcctggaactcactctgtagaccaggctggcctcgaactcagnnnnnnnnnnnnnnnnnnnncacataattctttattgttaccattatcaactatataaactatcactggacattttaagaagtaagtttacaccaagcagtggtggcgcatgcctttaatcccagcacttgggaggcagaggcagattaggtaactttacaggctggcaagatggctcagtgggtaatagcacggactgcttcttccaaaagtcctaagttcaaatcccagcaaccacatggtggttcacaaccacccataatgagattcttctggtacgtctgaagtcagcttcagtgtacttatgtataataataaataaacctttgggcctgaatgagtagagtgagcggagcccactggagtaagcagaggtcctaaaatttcaattccgaacaaccacatgaaggctcataaccatctgtacagctatagtgtacttacatacattaaataaataaataaataaataaataatttttttttaaaaattgagtttacttgacaccttaaaaaaatatcactgagagggctggagagatgactcagtggttaagagcagtgactgctcttccagaggtcctgagttcaattcccagcaaccgcatggtggttcacaaccatctgtaatgagatctgatgccctcttctggtgtgactgaagacagcgagagtatactcacatacataaaataagtaaataaataaatcttgaaaaaaaaatcactgaacatttaaatgctctgtgacacatcaatcttttactgtcagaccaacctattttacaattatttaatagatgagcataattatctaattattgatgatataaaaattctggccgggcgtggtggcgcacgcctttaatcccagcacttgggaggcagaggcaggcggatttcagagttcgaggccagcctggtctacatagcgagttccaggacaaccaggaccacacagagaaaccctgtctcaaaaaaccaaaaaaaaaaaaaaaattcttatttaagtcttatgaataaaaatgtatatttatagtctttttggcttatattctgccttccagagtgctttacatagcacagcaaggcatgtatttttctcttgatctgactactatgaatataaccacacacatacactaaaacagagactctgtggtctctgttgaatttcaggtagccttagcagtggttctcagcctgtgggtcacaactctaataggagtcacatcagatattaacattacatacagtttataacagcaaaattacagttaatacattaaaaaaaaacacataaaacaaaacaaaaaaaccagccacacagtggtggcatgtgccattaattccaccacgggggaagtagaggcaggtggatctttatgagttcaaggccagcctggctatgtagaaagaccctatctccaaaaacagaacaaaaaaattaaaaaataaaaagtattgtaagtaggaccagaaaagagaaagaagcattggcctgtaggcagtgaaggacagcacatacctattagttgtctgtaggacctctgctacaatgaaagtcttgtgaaatcaaagttgttgttcaccttgttctgtgtaaggaactcaggatgtctagcgtagctcctgtcatgagatctaagactttcaggaagatttataggtagcagcagggcaggatagatacagacctattggcttcttgtgaagaaagactttaaaatcaagcaggtacttcagagactgagccaggagaatcatgaacatgagaccaaattgtattacatagtaaaactatctcaaagtgaggagcggaaggaaggagtagggaaggaatgaaggaagttacttttaccaagcttaaaggaaaatgaaggaatgaagtgattgcataaaggcaaagtcattatagcctggagaatcaactgtaaaatttgccaagtcacagaggagcaaatggcggttgagggaggggtcattgcctggagcctggagtcaagggttaggaagtactagaagtacagcagtggtgatctgtgtggaagtcacgaatgcacagaagagggaagcagtgagaggttagaatttgttttatagctaagggaggtctctctcctagctttttcatgacccatcagcctgaaaggtataaagcatcagtgtattaggtcgctgtatctataaggcatatatcctcttttgaggaaagaggattaagaattctacctaccagaatgctataagtaattaaatctcttcttctacctagtataaatgtgactcttagccccactggaccagggacttttgatgcttggatatacagtagatacttaataaatatttgatgactaaatgttgcttgtattgtcaaatgctgcaaaggacactctctccccacacagaataaataaagctagtgacagttttggtttaggagcctgaacacaaacttaaagggcaagctcctatgcatggctatctggaaggaaaataagaatgtcactcagagcaactgtatcagtggttctcaaccttcctaatgctgtggccccttaatacggttccttgtgttatagtgacccctcaaccataaaattatttttgttgctatttcatagctatagttttgctactgttaagaatcataatgtaaatatctgatatgcagatggtcttaggtaacccctgtgaaagggtagtttgacccccccccccaagggggccacaatccacaggttgagaaccactctactagatcctgagatgctgtgattttagcccagaactcacagtcagtgtggaaacagattaagacagatgaagactttcatccccaggggctaagcttgcagcctcccctgctggttcagtaagtgagggcccagcgcctgtgttccaggtttcagaccaactgaagccagccagacctgaaaggcttgtgttggcagtgccagtttccgctgcaacccctgccaatgtgggtggttgctctggagtgctctgcaggggaaacaggattggactgtagcccaagctactgctgcctatagcctgccgtcgacagtgccctagctgatcagagtataccttgcctggaacagcggagctcagagctctgagaggagagaatagtttctttctctgaggaaacagttcatgaagagcaagctgtattctgccctgagaagatcaggctcctagctgaaaagatcaggaaattcaggtgggttgaaaattccataaagggtgttgctcatcattatttttctatcaggatacctggggcaagtgtcttactgagccttattcaaggcaaatctacactatgaagaggccaggattttgatttaaggcaggattttatttctgatagttggtattactagtggcatgcttgcaaaggtccttaggtccaccccagagtcttgtagaatgcatgtattctcctgattagcccaggtctctggtgaataggaagaaaggactgctaaagagagaccaggccttctctaccatctgatctgctcagtgacttgaggctagcacctaagttgtgggtgaatacctacagcagtgtcaatagccaggtgagcatgctggtctatgctccagccttgtctctgccttgcctgagcctagcttctaaacatctcagtggtgtaagacccctctgaaaagagtgaagcagagaggaagaaaagcaataacaagtactcatctattaaatatgtctgggccaggcaccttgaaatgtttgcactgcattataccttctacacctcagaaacaacttgagcaaacagagacttggagaaatgaacttgtccttggaggcacagctaagatgtagccgttaggatctcttttccagtgatcaggttcccataccttttagcatcatcagtaaccttattgctatgaagtactccaacccaactgttttccacttctcacctgtcagcctttaggagacattcctcctgcgtgcgtgtatgtgcgcatgtggtaagcatgggtgtggagaacaggcatctgtgcctgctgagtgctgacaattctgttgccatctctgaagaaacagggatgggagccaggtcatagaagcctgtgggttgaccagtgctcttagcactttgtcttgttacctatcgaccccttctttagcctacacaggtcagctgaaggatctagggagaaacagatctaggtattggaatcagaggtagccaaaaagtggcctatgcttggcatagtgcatagagacgaagctgttgttgtggcagtgatcaggaaagggaggctgcttcagttgatccctcggacactgtatgccccaagtcatcagagatgtcatccggtacaggactcatgctttttctccatctcatcttggtcactcagctcaagtgcagcttcttctctcacttcactgacccctgagcctctctccattttatacctgtttgttctgactcaggctgtgagtctgtatcttctcctaaactgtcttcagagtgattgtgtaccctgtggccagtttccctcctgcctctaagagcctgctccttgccaggaagcccctccccctaggaatgtgaatacaccatttcctctgtccatgtcctcccggctccagaggattccctgtgtgggattcgttatttcttctgtctgaattttcattggcagacccacccttggctgctacagaagtgtgctttccaccctttgtctctagtaagggtgagtttcacattgctccagtccctgctttttgaaaacacattaatgtgagttcattttcttgtagccaatcctgtagccttggctcattaaagatgataattaacccatcgctaattgacctcagaagccagccaagcagcctatattttaccagccttggtggtagatttggagtctattttaaggtttcttaataatctcagcaagacttcacttttcctgtctgcatcttatttgctctaaggacattttgtaaaattaacaagctataaagcttgattgaaggtttcaacaaatgtgagaataattggctccatttagagaaacaagaaaaacaacctgtaaacttgagtttgcagggggaaaacccatgtaatttttttctctctctctttttaaccagaggagcagtagcaagctggactttcaagactgggcacgtgggggtggaggggtgttggggctggtggtgcaagttctgattccccaaaacgaaacatttagtgtttagtgaaagaaatgttgcagagtaactagctgtggtgcgcactgaacctctctttcgaagtctgctctagaggcctgtcagcattccagccctttctcctgtttcctggctgtccgagggtttctcccttccccagggctgctatgaggtgtactcagcttacatcagtctatgatggctggtgcttgatcccctttctctcttgctgtccccactttccataaagtggcatcactttttctgttcttctgttggcctctgctcagttttcaccattcttgattgtctacctccccacctaagataacctagacagtagaccaatcctcctatgtcggtctaaaggtttcttctgcttttctcagaacctgcctcttagcccctgcccctacctcattacctgctcacgttctctctctctaaggaactgagctgggacggaacaggcacacatcacctctccacagcaagctttccgttttcctttctgcttggttctgtgtggacctgatgagctgatagctagctcaagccctgaagcttagggttttgttcctgctgctgatggggagctgcttcagatgaccttcacggagggagacagaaccaggctttcttagggtgcttttctttcagctcttcctgatcaagcctcacttttctgttagaagcaggaatgattcatgtgagacattttgttcattaaccctggagttcttggcagttggctacacagtatcctccagggcaaggactgcccctgcaaaggcacaccaagaaggttcaaagtctagcagcccttcacccattctcagccccagtccagcgctgttgtaataacccaaagggactgtatcatgcccagctttcgcctcagaaacaaggagagtttgccaataaggcagtgggcataccatttacatcctctgccttagaaattgatacaaaatggaaaaatatggtcgagaaggggttactgtgaagattacatcctaaatttcataggtactctctcctttccagagaatatatgacccctttaccctttaaccccagagactttactgctacgtggagatcgtcttggagtttgctttttaaaggagttggtttgaaagtctttctccatccttttttaaagattgattatatgtatgtatatgtatagatgtatgcgcgcacacacacatacatgaagagtacactgtagctgacatcagacacaccagaagagggcatctgattccattacagatgattgtgagctaccatgtggctgctgggaactgaactcaggacctttggaagaacagtcgatgctcttaatcgctgagccatctccagcctgtctttctctattttgatatatcccttaccatattaaactgttgttttgtccctctctgactcaactcctagagcccctttgtatgggagaatattcccaagagcctccggtagaaccccagagtcaagagagctgtgtttttctctccaccaggcttattcctctcacaccatggcagaatactctcacaaccagcccaacaaactggaaacaggattccatgtgtctttgagcaagccctatacattacgcctgtcatgttcccagtttactaaataccttgaattcatttctcactgccacgctgtagtttagaaacttaagaatactgcatccagccttagttggtctccctgctagttggactacaatgaagagaagacaaagtctgggtaaattgtctatgtaaacagagtcctttttggacctcttagatatcccagtgaagcagaactcttaccaatcacagtaagtgacattcctcttaaaggcaagaatgaatgaccatagcagacaaaactcagggaaactgggttcattctaaaaggtgtgcaaatgaaaactggagcagggtgggagttccttgtctttcttcatgatagttcccactgaacctctaaggatgtgctacaggcaggctcaggatgtctgcaccccaggctcctgctgtgccctggaaatccccacctccaggagtcccacgtccacacatgtggcctttctccctcttggccaggaatcacactgcttcctgagccatctactcacccagggcctgccttaatgacaacggtgtttcttcctacttgtccaaacatataaccatgagacactgtcttctcctgtgcaggtttctgctatagattgaactggggctcctgtagccctttcaccatccaggtgtgccaaggaccattgcaaaatcctctctcctctccttactccttttcctcctcccccaacccattcagtggcagcagtctcatgccaaaaaggaaagtcctggatccattacataattctctatagtgcgagcagtagctggggcataaggtcagaggtcatagtagggtcaggtggctgacacacactgtaacgacaaggtggttaaaattagaccacagagaggaaactggcagtcttgtggaaatgcagaagtttcctctgcaagtgagagactggggatgcagggaggccactgtgcgtgctgcctgccaggctattactcatttcagctctgttctttaatgccttttagcccctgcttctgtatttctaaccttcctcatcacatgcttgaatacacaggatggagccaaggctacctgtccttaccccttcagagatccaggagcagcccccttaagctctagaggctctaagcctcttcagggaagcctcttagacggtggtggtcagatacttagcctaatattttaccttccggtggcaatagccataggtaagtaccatctgggcagggtaaaagatggcagagaatgaaattgtggcacagatgtctggtatgtatgcactctccctggcagagtggtgactcgttgcaccttgtcttagaagacgtggctcatcctgtaccacctgttgctgtggtcctagtgagtttctctccacctaccagtcttttccatgagcctgtagtgtgtcacttgattcttacagcaccttgctagggaaatacaagatgtgatctttggcactagagggcttgccttctgcatggaggagttagctgtacaacagtggaatgatgagccctgacagtccagcgtccacatcagtccttcacctgcccttcgcagtcagaaatgaggctggaaagtggctctgagggtgattgggtagggctagagatatgacttaccaggtaagaacactagctgctcttccagaaaacccgggttccattcccagcatccacagctcacaaccatccgtaactccagttccaggggatctgatgatatgttctggattccttgtgtaccaggcatattgatggtacacaaacatacatgcaggcaaaacacccatgcacataaaataaaaatttacaatgagtcttggtcatttaacatgtcttggaatcactgatgattaaagggctgttctgtgtcatatctggccaatatggtgtagaaaatgtcctctgcttcttagatgcacatcaagcagggacctcctcgttgacaaccatccagtcaataggcatgatagggccccagaatccaacgaataagagaagggtacagatagcaaggaagaggacaatgcacacatgggcacaaatagaggtgacggcatgcatatgtggtcttgtggagaggattccagtctaggtgactgaggacacatcatctgagaccctgacagacttgacagctgatcaggataatacttcatataacagctaaatcagcactgtatatgtgctgctgtagcaacatgggagcaactagtgtgaactgtgggagggcagagctttggtgaactcacctgctctgccccatcctctcagcctgataatttcctgcccattctcaggtgaggcaggaaccatccagagaagttcagaatgacttagctaagatgaaacaggcaagaaagcttatctttcagtctgcagactgtcctggagggagtctgggaacagggtgccaggggtgctagaaagcagtactttgtggtagccaacctgctgccatgcattcctcgtcctcttacttatattccaaacttagaagaaattattttctgggttttgtttttcataataggactttaataaaagaaaagtacaagccctgagggcacctggcattggtcctgaggtgtctgctgccccagggatgacctaaagcaaggcctggcgacttccttccttcagaagaccttggtctttgctttcctccatacactcttgttgctcatactacctccctccccagtaactttgacacaattctcatgtgccctgcagctagcaatgtctctcgtcttcatcctccctctcagaaaatgctgtttttcttctctccctctcgccctgtaggttattgcagctgactgcaaaagggtcacagtgctgaagtattttctggaagccctttgtggacaagaagagcctctgctggcattcaagggtggaaaatatgtgtcagtggcacccgtcccagacaccatgggaaaggaaatgggaagccaagagggaaaacaactggaagatgaggtactattcgggaagagccgctatggcagagggaaagctccccttcccccgtgccctgctgcccaggctggagcttccccttgagatgatttataacctctcgcttagttcagtgtgtgttgaggtgacagcaacctctcaagagtgcactctgctggtgcccctcctgccagtccaccccagtgcctccatctacgagttccagatgcttctttttaatgttgcattggaggaaagagtttaataatattcagctctggaggcttaggaaagagagtagagtgaggggtgttagggttcaggctaaggatcaagtttatagatgtgcggagctcagcacagcacagacctgaactccagcctccagctcacgtacaggaagagctgacattgctggccccgtgtggaaaatcacccctcccccagcctgctctctctctcttactccctccctcctgcacatcctgatgtgattaaggaattctcctcttgtttgtttgcccttgattgttcctgtagcccttgcttcactccagtctttctctctccctccctccctccctccattgctcatgcctgtgtgtatgtgtgtgtgtgtgtgtgtgtgtgtgtgtgtgtgtgtgtgtgtgtgtgtgagagagagagagagagagagagagaccgagagagagagcgcgtatgtgtgcacgcccatgttcgcaagcatgtttgcctgtgtacacatccatgtatccctgctgacctccttagcagttcccctgttgtgcatctatgtctttctgggatgatctctgatgatcatctgtatgtgcccagtttgtcagttgaaatgaacattgctgtccacacccctgaggcgcctgtggactgagcgtcattgtgactgtgtggtagaaatggagcatatgtacatatggcagcctccttgctgcttttctgggtgtgggtaactatctgggagtatatacatgtctcacttttgcctgaaggttggctcttttcttctctttactccatagtattaaagatgagggtcctagatagaaagaaacataggatggagggaagggacggaagcaattctagccagaggccaggtcacccataggccaacacagtcatttggcccacagcagtctcaagcgcccagtggagcagggcggggtacaaggatgaaatcagcaacaggccaaggaagccagatgtcagctggaagctgtcgtttaggatctcaggcagtgatagagtggccacctttggaacagagtcttcagagaagcagtcttggcctggcttcgttaggatagctggagaactccaccccatgcctgatgacacaggactcagcttccaggacagaggtggttccagggccatagctaagcccatgattccagactctctagatgaaacctgggcagagaataaagggaaagaatgagctgtcagcatgggaggagagagtggagttaccagagccattggggtgtccaactttagcaagcagaacagtgctcctgcagctctagacggtgtgggaaacaggcccatgatgtctatacatctcctttatctctcccatactaaaagactaaaaaagtaggcagtggaggatgagcaaagccagctctccagcgtggttataagagatgcctctgaacatctaggactggcagcacaagcatagctaggcaaagaggttgtcctcccaccctagaaggggtgggctacctctggtgcctgatctggttgtactctccttctgaggcttactgaccaggcaaaggttcgtgacccacaccaggctgcccacttcttccttttcccacgagtctcctgggttcttttatgttagtggtccctgggaaatcctacttaccctgttctgtgtaatttcataaccctgcacttccttgtttgctatgagagctgaacaaacctcagacaagcttctctgaccctcctttgacctcagtcctgttcactccaaaccaatgctaactaactgtccatccctggtcagagcaggcaaggacactcttcctccgtgagccaacaagcatcttgttgcacttgctcttgtccaggctaaccctgtgagcaacaaaataaatgtgaatttttcttcctcctcatagccagatattgataagtaagtgatgcttgtggacagcaccctaaaccccctagaacctctcaggacagttacagttattttatccttacctgccatctcccaagactggtctatctaaataggtccaggcctgataaagctgagctaccaagggccgtgtctgggcttgctctctcaattcacaaccccagtcctgcagttttgttcgttgtgattggttagagcaggcacaggagtcagactcacttgattttgaatacctgctctgcttcctgccacctctgtgactgaacaggctattttattctaagccccttatttataaagtgcagatggtaatagctattgtgcaggcccttgtgagaattaaaagagttaatgtatgaaaaacacatagctgggtacacagcccataaaaagccctgagtagctagtagctgtcagtgtagtcatcattctgttagaattacaagaatcttccttctcctgttgaatcactcccctactagccccatcccctcaggcagctgtatgttctctcctgaccaaggccaaaagtgagagagtgaggagtggagctaggaccacccggggagcagtggctgctgagaactgagtctgcaagtgaggaagtgccatccctggggaaggctccatcagcctggcaagaaggctccataagctagccagccacctcctacttactctgcctaggcccttggagggcagctgagcaaggccatgttatgtgaattttttaatggggcccagaagtctccacactaccaggctgtggtcttaaaaggaaatcagggtaaagtctgtagagctacagcatctgctcttgatactgtctggggcaagggaacttccttgcctaactcccagatgttggccagagttgattcctatcagattattagcacgaattagatttaaattggagcagttcaagtttctctattgtttactctttgaatcatttgtaattttcaaaatgannnnnnnnnnnnnnnnnnnnnnnnnnnnnnnnnntgcatgtgaatatattgattataagtaacacagatatgagtatgtaagaaaagctctagcatgtaggtacagtttcggggggcgggggaaggtgggaagagtcactgctcctaccaacacactccaggctaaataccagacatggatcatgatctctttgttctcctttctgtgtctttatcccaaggaagaagatgtggtgattgaagactttgaggaagattcagaggctgaaggcagtgggggtgaggatgacatcagggaacttcgggccaagaagctggctctagcaaggaagatagctgagcagcagcgtcgccaggaaaagatccaggtaaagcctcactggagaagctgatccccactgaggaatgtggctgtgcatgagggtgtggctatgcagggcatagaatggtgtgagcagaagtggcaggggaccctgttgttacagtcagggtgtgagttctaaggcagtgcagggcagcacttttcctgtgaaactctgttaacaccacacatgcagccgttgatacaatttaagggactcatatctttcaccatatgtaggtattcatggaacacactccttcttgtgggattagaatgccatagccacaggctacttatctgggttgccaagatattgggagaactcactttgggcagagtactctccatatcttcccaggtagatcttcacagttacctcactgtcagtcctcttggacgcccaaaccttcatttccagcaagtttttctctttggctgtccaagatgtgtttccttatactaagtacttatttctccaagcaagttaagctccctttatagactctgtacatgaggagcattgagcctcactctgcctctctaagcatgtgtctttaggcctctctctaggcatgtgtatctttaggtctgtcttcatatgttcctctcatctccctcctacccctctctttcccatccattcctttttcataccactcaccccacccccaccccctaatacccccaataccaataccccaatacccaatattttgagacaaggtctgtgtagccttggctggcctggaacggaactcactatatataccaggatggccttaaattcatggagttcacttgcctctgcatccaaagtgcctccaaaggcaggtattaccattcctggaatgttgttctcctcttgaacatatggtttagtgcagaaagccaagcaaatttgatataattcaagttttgacacttatctagtcttaaagcactaagcaaattatttaactttaaagagcctatttcttcatctacaaagcgggttggtagtatttcccttttactatccccagaggcttacacgagacacttccacaaaagttcttagcctacaagtattccctttgtctgatattagtctcatcccagccccaggagagcaatgctaacggttggaattggtcttttagacatacccatgtcctactgctactaggatccagcatgcaatacctctacatgcctgtctgttgtaatgtggctgcctgcacacacctctcatgagtctgactgtaaacctctttgtggcccaaagaacagcatcatcttgatgtttttcttcctgcccttttctttctcgccatcagtcctcacaaaagtcccatctcaagtccttacctccacatcctgacattcagtccagctgttaaagaaagtgctaccaggggctggggtgggaggtggggaaatatatatgaaactactgccagaattacctaggacctgtttttaccaaacttggtcctgctgtgcatggtagtgtaaagcctgtaatcccagcactagggatgtggaggtaaaatttcaaagccatcctcaactacaaagcaagttcaaagctagcctgagctacatgaaaccactctaaaaaaacaaaaacaaaaaaaaaaaacaaacaaacaaaaaacccttgagtccccattatagttaacttctttatagctttggttttatgcctgtctcctccagactaccattcacacagtaagtacactgttgtcttctctgctactcagagctactttcccagacttctaccactatttttcaactcctccatccttccagttgtcttttagtctagcaagctgaattggtagttaacagaaatttttggttgactttttttgatgatagcaagtagaacatcattttaaattctaccatggccttttacaaaccctgctgtcgggctggggagatggctcagtggttaagagcactgactgttcttccagaggtcctgagttcaggtcccagcaaccacatggtggctcacaaccatctgtaatggaatctgatgccctcttctggtgtgtctgaagacagctatagtgtactcacacacattgaataaataaataaataaataaataaataaataaataaataaataaataaataaatatttcaaacaaacaaacaaaacccctgctgtctgatttcttatcctgtcctgtctgttccttcacccttcctctccttctagctatcactgcactccaccctagttcaggaacatgttgagccataacaactaggcttctgcattgtatagctccagagagcgccactgactttataatctgggaatggcccctcttgggcttacatagtacacaacctggccaccaggttcactcacaccatgaacccacaatcccatagagagccattcctctgctcagaaattatcaccgcctagcttgactagtaaattaaagcttaattccttctaataacaccttaggcttctgatctactccaagtatgcttttcctactttgtttcccattaacatactccctgtgagctattattagctaacaattggacactgggcaaagtggtcaacttctgtgagcctgtttctaagtctgtaaagtaaactcagcacagcacctgcctcatagttgctgtgcgtccttaggacgagtgtataaagtgtctgtccagccatcaagactcctgcccagacagtgacagtgacagtaaccttcctctctactcactgccttacgctctgccctttcctacttttagatctttgtccagtctgtctctcaatccaaaggactctttttttgctccacatttcctgttacctgttgaaattctattttccctgaattccccaatgaaactccatctccccagtgaagccttccctgatttctcccaggaggaatttgtctctgtgctctagggttcctgcagagttgatttatatctcatttgtaggactgctatcatgtctcacattacagttatttgtgggccttttcccccacagtaccatgaattcctaggaatctgggaccatgttctcagttcagtttagcaagatactgagcatcgactctcctaatggctgggttgtacaaaccttgggagtcaaaggacacggggaggtgacatttcacagcaggccatacagtatagaaactattcttttgtttgtttattcttttgcttgcttgcttgctttttttttttttttttttttttttttttttttttttttttttttgagacagggtttctctgtgtagccctggctgtcctggaactcactctgtaggccaagctggccttgaactcagagatgcttctgtctctacctgtctctactgagaacttgacttaaaggtatatgcctacagctgccctatgagaagctattattgaacaaatgatttggcatgttaatgaggtcttttaaaagatcaagtattaactgggtatagtgacaaatgcctttaattctagcactcaggaggcaaaagcaaacagatatctgtaagtctgagaccagcttagtctgcatagcaaattccaagacatacagagctacatagtgaaatcttgtctcaaaaaacaaaaaagatcaagtatagggctagcaagatggcttagcaggtaaaggcacttaccacccaccaagtttgataatctgagttcaaggacccatatgtaagaaggagagaactgactcctgaaagttgtcctatgatacatgctatgacacatgcacttactccctccaccacacatgatagatagatagatagatagatagatagatagatagatagatagatagatagataggtaggtaggtaggtaggtagatagatagatagatagatagatagatagatagatagatagatagatagaaaattgtttttaaaagatgagatacaaacaagcctgggtaataccatatatattgaagctcaagaggcttaggcaggaaggttataagttcaaggccagagctagactgtacaatgattttgaagtatgtaggttgggctacatagaccctcctgagatgggaaacgaatgctgtgagaacacatgccatagcagctccatcttctgccagagtacactgtccaggttggccatgcaagcaataagcagtcctgataactggaggcccaatataagacctaactgcagggccactgactatctgtgtccctcagatctgttcagaggaggatgctgtggcccctttaagaacaggccccacatgcactgctgttggcggccctgcctcctgtcagcctccttcctccagccccatagccacaggaggatttctcagcagaggaaaaattcccccttttacctcccccttctctttaatgcccggggcccttcacttccataattcttcattttccagccttgaacgtaagccagacacatctgtctggccatatgcgtgaaccctggagtctgtgccgaggtagctgtaaaacagggccggtgaaggcccttctgggagagcacacacatgtgtgtgccctcaggccattggctccctgcccagaaccacggggcctcggtgcttcaaacccgtgttaaccttctctatttttcctctttttgtttaatttaagggggaaaatcccaaggaaaaggtataaattgtcctgggagtaggggagaggctcctagctagaaagaccattattgttggcaggtacctgggtcacactaatacaataaggaagaaaggagcatccagtgaattaagattggagagatgggctgtaaattacactgctctgaactccatcagtctctagggtgttaaccgagaggtgtaaggcaggtccccagctcccagcgccttttacagatgcagcaaaacaggaaccacacatgtttggggaaggggatatgaagatggggttgaacaaaagcccccttgccccaggatggctataaagtccaagtgagatctggggctgtagccacacctccacttccctgctcctacatagacccttgggcctcaggctcatctgtggagatgggggaggtgaggcctggcctccttctgcagcctgtccctccctgcttccgggactgcacagaggctggtgagtggggccgactagaggtcagaaaaggggtgtggggagttctcagggcctgtgcagctggaactgcagagcccagctaggcccctagatatgaggggtgccaagtccacccacccagggctttgagaccacacgctctggcatagcccaggccttgccttgttgcctaagatggcacttcctactgtatctatcagtcctgtctacctcactgctttcttcctgtgtttttatttgtattgccattcatgggagaggtccagagtccatagcaagttacatgatttctctgggaagttgttcagaagggtttcatttctaaccaagcacccagacccaaacagtcactaaaaatcctcctccaggcactcaggaggcatggcctgttggtacctcatactgtcctggccctgtaaatctcctgtctcctcccctgactccatgaggctctccggtgatttgtgctgctgttgggcgaggtcaggtttcctgagcagttgcaaacatcccacctgaaacataacaggctcttcctctggccacagctattgtttccctctgcattatggccacagtcttgctctgtagccagcaatgacatgtgttctgaaaatagcttcactccactgtcccccttcccacccacccaccctcctgaagatgtagtcactcctttgtgggagccccaggagtttcactctaaatatagccacagtccattcacactgccacccagcctgggacggggttgggggggcattgtggaacaatggggtatacacagaacaaccccccccccgccatacacacacacacacacacacacctgtatggaaggaagctagcggaaggcagacactcaaccctggctcctagctgtcggagacattgtggggggccggtacgctaccactccaggggcacgttcacctttgatggaaagcacatcagtccacagagctgggcaccgcccaggctgccccagcctctctgtgtaccatggcgctagacctacctctaaatgactccaaccaccgctgcctcgttggctcccactgcatccacagggttctgtcttacccctggatcccagaatggtcaagcctttggactgaaacaccttttagattgatgcttgtagcaagctcagaagtgttatgcttagcccttcattcttcatgaaagagagtatgtactcctttctaagctttttcagatcaagagttactttttaactttcgggatctagagcaatagttcaacagttaagagaactggctgcttttctagaggacctgagttttattcctagcacccccatggcatctcataattgtttataactccagtcccagaggatttgacaccctgtgatagccttcatgggcactgcacaagcacgtggtacacaacccatacttgcaggcagacaatttatgcatagtacaaattttcatttaaaacttttttaactcatctgggttttccttaaagtattatctagtggatgagcctatgtgattgagttcattgagctcctgtaatagttaggccctagagccctatttaaaggcctgatgtgcctgtaatcccagctattctgaggctcaagtgggaaaataacttgaattcaagatttcacaaccagcctaagcaagagaggaactgtttgtttgtttgtttgtaaatggggtctcagtatgtagccttgtgtaggctagaacttgctgtatagtccaggctgaccttgggtttgcatagcctgtttctgcacttgagtgctggggttaaagatgtgggccactacatcttgcagagatcctgtcattggggagggtgcaagcaaaagtcattgtaatttttttaaagcaaatgtgcttctcttttctctttggtttcttgtgtttttgttttctgagacagactagcctcaagctcaagacagtcctcatatactctttcccgttccaagtgctggattgtgagcatgtaccacacctggcttagcatctgctcattactgtgatgcctttggacatccagaaaaggttctctcaagaccttctcaggggaagctctcagcagcccacgctctgtctgctcccttggttcctgcagtgaccatcttgctgctcttaccttttgtcttctcccttttctttcatttacaagtcaggtagttttgagaaataggtagtactgtcaggcacagttgtgtgcttataattcctactactcagggagctgaggtgagagatcatatggatgaggcaaacctgagcaatataatgaagccctatcaaaaaataaataaagattgttcagcaattaagagacctgcttaagggactggagagatgactcagcagttaatagcaccataggttcttccagaggtcctgagttcaattcccagcaaccacatggtggattacaatcatctgtaatgagttctgatgccctcttctggcatggaggtagaacattcatatatgtaaaataaataaattctttttttttttttaaagtattgctcaagccgtgtggtggtggtgactacaggcttttaatcccagcatttgggaggcagaagtagatgaatatcttgaatttcaggccagcctggtatatagagggagttccaggacacccaaggctacacaaaaaagtcctgtatcaaaaagaacaaaacaaaaaaattaaaaactaatgaaaatgagaaatatcatttttctcttaaaagacaaggttggttgggcctggggagctcctcactgggtacagcactcactcctcaagcatactgagtcagagttcccagcatccacataaaaagcagaacatgtctacagaatgcctgtaaccctagcctgaggggaagggcagatcaggtggaccctggaagtcctctagccagctagccttcctgaaacaccaggtttccactttagagagaccctgtatctgacaaagtggaaaaccatggagaaagatacctggatgtcttgctgtagcctttgtatatgaatgcttgggcacatgtatccctaaactcacatatctaacatgtgcaccaaaaatgagagttccaatctgctgtccagtctggcctcaaactcagatgaattcaagtgatcctcttgactgagtctcccaggtaagttaagattgcatagatctgtgcccagctactgttagtctcacaataaaaattaatactcctgggactaaagagatggctcagcagttaagatcatataactgtacttccagagtatccatgttcagttccagcaaccataggctcacaaccgccagcagccccaaaacctgtggcccccgtaggtacctacacacatgtgcacacacatgtatacacataaataataaataataaaaaaataagttcttaaaaagcagtaaatattcctgcccctccttcttcctatttctcgttcctgatgtctgtgatgcctacttagatgcacagaatgtaagagagagttgtacaagagagagtagaaattgtcattgtcattactaatttgtgtcaggcacaaagttaggtactctgtgacatgcaaggtgattgtgaaagtttgccatgttataaaacctctcatttgtggtaatgatattactgtctccagaataataaggaatacagaccctgggtgagtccatcccctttgaagggaggaagcaaccacactgtgtatgggtcttctaagcagaagaaagatttaaagcctctacttggtgtggtggccctgtttcatgatctgctgtgcaccatctgtgtcagccaattgcattgcatttttgtctgtgtaattttgtgtctctgttttcagtgggttggcattgtaaaatcatcccctttaacttgtaaaagaaccttcctagagacacaacccatcagctacctcagctactgcataccatgtctctttcccagttgtctgtcagtttgctcctgttgctcagagataactggacacttagcacttttcctaaactggagttatttctctcttgcacacttgatggtcctcattgctgcaagtctgatttggagtatctactctttttctttatttttaagtcttttttgtgcttgctcgtgtgtttgcttattttggggtttggttttgttttctttttttttttttattagttattttcctcgtttacattttcaatgctatcccaaaggttccccatacccacccccccaatcccctacccacccactccccctttttggccctggcgttcccctgtactggggcatataaagtttgcaactccaatgggcctctctttgcagtgatggccgactaggccatcttttgatacatatgcagctaaagacaagagctcccgggtactggttagttcatattgttgttccacctatagggttgcagttccctttagctccttgggtaatttctctagctcctccattaggggccgtgtgacccatccaatagctgactgtgagcatccacttctgtgtttgctaggccccgtggttttgttttcttgagacaaggtcttgccgaggatgatcatgagcccctggtgctcacctcacaccactctgccctaggactgtgtcccacctcccacctctctgccctaggagtgcctacactttcccagggtggcccaggctgagctacagtggagggctcctgtggaactctccttccgggtcagtacatttgagtccaggccagggctgatctgtctgaatcttagcattccagttccccccctcactcccaccagaggcttctgcagctttttactcgtacaaacaaaaataaatgacactaccggcctctgaactccacagcagcatgcttccccttctccctgagcgtcccatggctgtgagtggggacttggcactctccccatctacatcactttttcactccctgcgcatcctgtgtccttctctcaccgtgcgacccagagatcagaatgggacgtgacggccggcacaggcgccgtgcacagctgccaggaatctgacgggtaaaatctggaaaagttgggagggcaaatgctaaacacacacagcgccactcagaaagggccggaaacacagacacccatcacagaaagcctgactcctaagctcttcttgatctgtcattgtttttattggtactgaactaatcttgtgacccaggtattaatccccttacctgctaagcccactggcaccccaaaagaagagagagcaactttgtctaatctcctgagactccatgagggcatgtggggaacaggaagcagttgtgtggtgactcactgggcagagccaggttaggggaagttgtctgcaggcgtccctgagaccggatgagggcagcccagctctgaccaccacacgcagcttggccctgtcccattcccagggaaccatctgctacctctttgagaggctatggccagttcacctttctggccacagaccatagctctaggtacccaaggaaatcaagcttccccaaaccttactctaggttttacatctatcctgtcttcaaacgccatgctgctccccagcctgccttggctgtctgacttaccactagcatataaggtggcatgagcctggtcttaggaacccattgttcatccaaggtgaaaaacgacagttatcagcattcttaatggaagtctaaccaggactgcatgtcatttctccaagtaggaaaacagatgtaagagagagagaggtgatgcttccttaattaagactatggttcctgtcactataggtgctcatgtctcctgtcatccaccagtcatgtggcagaacttattatgtcctctctcccacaaaaacaacaacaacaacaacaacaacaaaaaacatatttgaacagggcttcagaaagagcattctggtcgatttgtatggaggacagaagcctgggggaggggagctacttcttggcataaagggcagcagagtatctgctggacctgagcaggacattttcctgttcttctcaatgcccccaccaagattagtagaatgtgtgttactgtccttttgccagtgctctgggaatgacagtgaccgaaagcccctgggaaggtggctgacactttccccttgtgaggtgagaacagttggagggtttcagcagacagggcctcttggccaaaacttctcatgctgccactgtcccgtggcctgtgtcttcaccaactgtggtggcagtggcagcaacaacttactcatagggaaaggtctctggtaggtcaccgagaagccacccccatcctttgaaggcatgccctttcagttttactgtcaccctagtgaagcctaagcaaccttcttgctaactgttggtggccaggcccagcaccgtgggccccatctcagttggcacgcacatacacttcctctgtactgtttctgggtctgtctccttgtggttgctatgtttcagaagaccataagagggagtgaggggactgagactgacccacctgcttttctggattccccttggtaccggctagctccctacatagtctgccagagcagataaatttcagccagtcaatttgctttctggctatgatcctcagaggaaatagcacaataataaatatactctgtagagacagatataccctaaacctgtcccatcaggtcactgctacccatgtaagattgccagaccagaagacactgggtgctgcaaatgttcacagaattccacagaaatggaaaagcctataacacagatagtccctggcttgtgggcttctggggctgacagaggttggtacacaggcctgctggtggtaattggggtaactgttgaataatatgaggtggagtgctttaaattttcattatggcacttcagtttgtactgggatacagcacaattatgaaatccttagtatcctagaggactttcctgaagagcctaagacaaaaagccctgatgccaaagggaaaatgaaggtaggacagtgttacttgttcagagttcttgtggtaaagagttaaaagtagagcaaaaaagctgggggtggtatgcctttaatctcagcagaaggtagtggcaggcaaatctctgtgagttcaaggccagcctatgtacatatcaagttccaggacagccataactacatttaggaaatgctgtgcaaagcaaggacaggtggtatagctatgatctgattgttgttctctgtgggctgggccataacttccttctttatggatttctgctgtagaaaatgataagtagcattctgctaatacccagtttttaaaaatgttttttacattgtatgtgtgcacatgtatatttgtaggagtcgaatcttgtcagttcttctttttttaaagacaggatctcactatgtagttctggctagtctggaactcacagaaatgagtgtttcctctttctgagtgttggaactttaattccaacactctaccatgtgtatatacttttaaaattcagattttatgttaatttcattaggattggagtaggtggatggttgaaatgcacaatgaagtgagttggaatcacaaattctagggttgtaggtagagtgctaacgtactgaagccctggatttgatactcagtactgcatagaaccaagtatgagtctgggccagcttatgagaccctgtctcattttagacagggataaggaggaaaggagggagggggagggaggactctgatctgagtattcaagtgttcggattgagaactaccctgtaagtgctgcctgtaatatgtgactctcctttcctggcctagttacttcctcccttcttacctttatgatcctctcagaaacatgtttttaatatcatcagtctcctttctcactgacagctagcatttagtgagacttcaggcctgggccatttggtctgtgtggattttgattatactgcttagctcagcctgaaggtctgtccctcaggcctaaggggtggctgtgcctctggagggggaagagatgtatgggggcaggatgcttacacactgttgagtcaggggcctggctcatccgcctgctcactctcttgctccctcatattctgtgtccctgtaggctgttttggaagaccagagtcagatgaggcagatggagctggagatcagacccttgttcctcgtaccagataccaacggcttcattgaccacctggccagtctgtctcggctgctggagagcaggaagtacatcctggtggtgcccctcatcggtgagctgggcgggaggacagagcaaccctagacatgcacagcagccccctctatacatgcccagagccaggcaggctgacctggctgtgcatgtgtaagacaggatttgcagagaatgcgtggggcaaggaaaattgtttaataatcagagtagttcaaattattatggctgatccatggcttaaactgcttgagcaaatggactcctgtgtcccagcaaccagcggctgcatgagcccagcccttgttttttccttataaagcttgcagtaaaacagcaaagctggttcccgttattggtaaacactcagccctggcagataacggcagtgctgctgggtggtctggcagggaggctgggaggattttgaagtggttagatgcctttggtctgattgtcttgtagcttttcatgatcattctgttggttcgaggtaacattcttctggccaatgtcaccctaaggccagactgacaggaaccctttagagcaagacctttggctcacgcctttcagttcctaccacttgggccattggtactggttagcatcttgaagtccagcaagcctgcttttcctagctgagtgctcatgggagattactgggtacccctagttcttaagctgaatggtaggtcagcctctggttgtgctttgatctctgagtacctgtcaaatacagctaatgtagctactgcagctgatggctgtcctatggggggaaggggtgtgtacgatgattgcaaagacaaggatctttagtatccctctgccagcagccatttgaagtaagttcgagaacactattctctgaaaaaggcactagactggcagtctgcctgacaggccacctctgacatccatgccaagatgttccattgggccttccctcccagtcccaagtgtcttagtgccagatgggggtggaaacaaagggcaggaaacatccgcccctgcagagcctgtagaaccctggggggttgtgggaaacacgttagcaccacctgagaatgttggcactgaagcagtcctcctccctccctgtcttccttccccctccccatgtggcctggacagaagctcttaaacccaggcccttagacctaagggaaggtttgctccacttcaaaagaagagcagcttctgtcataaggccgagcaccagagccacacagtgccctgagctttccactgcccttctgagtgaactgacttacaggccatagcactgcaccttcctcctaggaggtttttagttaggaaaaagaaagtcgattggtcacttttgttagctggtctgcacttggtataactgagaaagctcactggtgtctcaaggaggcacctgcgagtgggaacatccctcttctgccttcctatgctagcagtcaccggcgctgccctgctcctcgtgtgcgcttagtctcttcgttcctaataattacaggaaaaagtcagatctgtggcccttggccctaaagagcttaagtttgataaagaaatttagatttggtaggaaagggataaatgctagaggatatatttcagaacatagtgagcctaagggtactagcaaccgaccgatgcattgcagccacacagactagacactgaccctgtatcagctgggcagatccctatatttcaaggatgtaagcagagctcctgttcactcatactttccttggtggactcctgctttctggccagaacaacaaagggttaagtggaaagccttccctgcttgtgtcttgtgctctttaacctgctctgtgctctttaggtctgaccccagcattgagaagtcccgcctggtgcagaagcacaaacaagcgtcccctttgaagcctgtttagtttggaagcaggaaagcagatttggggatagaataccagtttttcctgtttgatgttctgtttgctgtaccataactgctacacattatctggacctttcagcttcatggtgctaaaagcatgggggtgtgtctgtgtgtgtgtgtgtgtgtgtgcacatgcgcacgtgtgtgtgtgtgtgtgtgtgtgtgtgtgtgtgtgtgtgtgtttcccatatgggccctttccagaaaatgtttctgaatacccagacaatgagtgccaggctcaccatggaacagcatgctcatgccgactccccaagccatgaatcattgcactaaggagaggcctcagaccccaaactctctctaagcccccaaggagtgcatatttcccacttgacctcaggcttttggctggaattttggaaagaatcttcaccagaaaatgaagccatgtcccagacacatagacaagcagacaggcgcgtgcacgctcgcgcgcgcgcgcgcacacacacacacacacacacacacacacacacgtagattcaaggaagtaatgtgtgccaaggttatggttttacgaaataccagggcccttgcaactcagtgtggctgtccttcttccttgtggcttccctgtactctgccagacagggcagtagaaccctgcctccttttagactgctacggctcagacccgagtagctgaagaagagcaccccactcaccttgtgctcctatgttttcattgatctatactataaggaatgccagctccagataatcctataaattccccctgggaggaagatggagctcagaggaagaggcagaaaggagctagagctcaccaaaagtcttagatccgggctggtgagatggctcagtgggtaagagcacccgactgctcttccgaaggtccgaagttcaaatcccagcaaccacatggtggctcacaaccacccgtaatgagatctgatgccctcttctggagtgtctgaagacagctacagtgtacttacatataataaataaataaatctttaaaaaaaaaaaaaaaaaaaaaaaaaaaaagtcttagatcccctcttatacccacaagtatctatcctaccagattcattggaaaacttgtatgggaaggtggcctctgttgcctgagaaaggaactgggcagagagcagaggacgcagacaggcataattgctcattataaactctgtcccgtcagtgatcaatgagctggacggcctcgccaaagggcaggagacagaccaccgggctgggggctatgcccgtgtggtgcaagaaaaggcccgaaaatccattgagttcctcgaacggagatttgagagtcgggactcctgcctgcgggccttgaccagccgtggcaatgaacttgaatctatcgccttccgaagtgaggacattactggacagctggtgagaccccccagagagaagtccattattagaaatgttcctgagctgggtagtgatggcacacacctttaatcccagaactcatgggaggcagaggcaggtggatctctgtgagctcaaggctagcctgatctacagagctagttctaggacagccagggctacacagagaaaccctgtcttgtggggtgggggagaaggtgttcccaaaaggaagaagtaaaagaagccctttgaacctgggcagctaaagggtagccaacatcaaggcccaggaggggagagttccttgctctttgacagactcagccaagcagagccaaagcatgtctgaataggactctaggacatagccctggaagtacctctgcctctgcatggcgccccctcctgcccagtggtgcttttcacactgtctttctccagggtaacaacgatgacctgatcctctcttgctgcctgcactactgcaaagacaaggctaaggattacatgcccaccagcaaaggtacagcttggcctctccttgagccatccatccctctgccctgatttctcctacccatccacagtccctaagaagagtctctgctgactttggcctgataagtctatataagcctatacaagcctgagagcatcttgttcaccttcccagaggttagaccgactatcaaagcttccctggccctagagaatgttatatgatctagagccaactaggaatgagcctctctagcccaggaaaccctgctctaggctgtaagctttcccactcagtctgcatctatttcctttcttgggtgagttcctttgacagcaagaatgtctttatgattcagtatagcttgttcaggccatggtctcctgcgtccagctttctgcagccctgagcagtgggcacactttttttcctttggccatgttctcctccctacccatatcagggtatttcttgaacgtcaacctgcatcagacctgcagtggaggttctcccaagtcaagaataggcctttcttcctgatctctattgcagcgagctgtagcatttcacaggctaactggaactggaggtgggagagttttaaagactgagcttgtgtctgagttttaaactgttttggtgagcacaatcccatttctgggtcaccctaaaactctcaagtgtctgaccacctcagccctgaatgcctgtacacaggaccacagggccagtgacatgtaggagctcctgattcccaagactctggcatttctttttgtggaaaggaatcctaccccttcctagctctaagtcatgtgctgatctagtaatatcaatgggtctctgtggacctatgtagcctcatgactttctttgtgtgaccctctgccaccctgtatccatgccctccgtcttggcttgctggcctctcccggtttcttccattgcttagcacagccctcgcgtgtgctggtatttctataccaggggcagtcaggagtgcagcacatatcctctccctgaggaccagacctagaatgttcaactgacaaattcgaatcctggctgatgcagacagaggagcttgtgccctatcctagagcacaagctctaaacacgttccttctaagagggaagcaaggttgcaaaggtcctgtggagacgtgtgcttccagtactcctcagccaccagagctctgttcttagcccagatgcatttgaacttgtcctaccaccccaggaattactcccaaacagaatcccactgccatcatggggaccgcccctatcaaaattacatcagcaacggctggtgtaatcaaaccccatttgtcagtgtgaattcttagcagattaacttgtcagattcacagagaaaccgtcaccaagtgtttatgtgtaaacgatgttgaattttaaaatcatgtggattatggcggatggggcctgacaagatgacagtctctggtttctaacaaagtgaagttaccagtgtcaaaacagaggatgtttattgttaaaaatgtctcaaagtatccacagaaacccctgcagacccctgccagcaatgctgggcctttgttggctgacctaaggcctaggactcttctggtgtgaagcccagagcaggaatggtggagttgcagacagactcagacaacagctgggaaccccatgtagcaccccacaccactaccccaccacacactcacattccaggcccaggcaacagaaggaaggctcttagacctcccttaatcacgaggcgtgttcttcaccctctacacacagccctgtctgtcgtcctcttctccctttcctcaccaccatcagccccctgagcctctccctcttcatccccagattcctccctaggctgaaagccaactctcagcctccctgcctggagctggcaaggccagcattactcaggtcagacatggatgtttgcaatcccccagcccgccaaccctagccgtccccaaacaccacaggacatttcctgtgcctttgctttctgccagacctccaccaggaaatgccagggcagggctgagagatagacctgccacccaagcagtcatgcccagggcctagagtgtcacttgagtgattcctgggccccattttaagttttctcctgtacattagtcagacacaggaaaaatctgctgtaagaattatctaaaaagatgaaggctatctgtactggtacagaaaaatgttgtaagtatataaaatatgagtaaagaaggggtggctaatgtgatctcagtgttaccggaggaagctagcctatgtacgtgagtgtatttacaaaagtgcgtaaggaactcaagaaggcacagagctacatggagcatgagacagctgcaggacagtcccctctgctgctcgttaccctgtgtactgatagatgctcacagatcactcttttaatagatcctttgaccatagccacaggcccctttagcaagcctctcctgagagcatcccagagctaaccccttcccccacattcgtaagatctgttcctactttctattcacctttgtattttttaacctttggatacataaaacattaacacacacatcccacctttagaaggagagactttgttagaatgagggtgagggcagttaataggaatctagggccaggggtatagttaggagtctgcttcctattagttctgagtctttggaagacaggtctgcagtttgagtactctcaggcaccaggcacaagagtcccgtgtgaggagttcatagccccagcacagctcctacctagcttgaccctctaaacatcaggggaatggtgctctgagcctggaaagaacttgcccctccacaaccacattctccccaagacaggagattgtatttgacacttctatcctcagctgagcccatctgatttctgtgccaacagaggagccaatccgcctgttacgggaggtggtgttgctgaccgatgatcggaaccttcgtgtaaaggcgctgacaaggaatgtgcctgtgagggacatcccagccttccttacgtgggcccaggtgggctgaggggaccacactggggcccacccccatggagccattcctgagaggccgccaggcgcccagtgtaacacggaagatgtccacgtgcctgagctaccaatccacccagacaataaaccatcctcttccaacctcacgccgtggccgtgctgtgggggagccgctcctcacagagccctcccaagggtcaggcggaaactgctgggaccctcctgggctgccaagatttagcagggaggtgactggctacagtgacaacaggtggacaagccgagtaggccaccaagctcccaccctttttccctctatctggtcccagggctggagggaggcctactcaccccgaggacccagccactctgtagtggtaaggggcagagattctaaagtttccattagatgcaaggaaactgatcaacccctcagtctgcacagtctctgtcctgaatgtctgagaggcttcagctgtcaggaagggtgcccaggtgtctccatctccctgaggcccagatgccctgtggacccacgctgacttctgtctgtaacagcaacagcagccctcgcccttcaacacacacgcacgcactcacacagcacatgtgcacatgtttctcttcctgtccacatcttgcactttgcccttgttttccttttgggcagtcatgggcctaagggaagggccatctggtcttgggcccgtgcgtcctgagtggccctccaccagcacatgctcccatccttggccttcctttcactgcagtaccctcttggggaaatttcctcagactcttctttgcctgccttccttttctagttggcccctttcatcaccccaaaccccctaaacttcctcccctcagttccttgtgggacttctcgttctgaatcttacccctaccacctgtgacaggaaccaaataaagccttcccagctgtccttccttcccaacccgtcacacctctgagaagtctcctagctgggagagctgaaccccaaggtagaggtgccagggtgttgagcccgtttctggctttgtcattgtacttctttacccagaagaggggacatggggccctttagcctttgagggttttggttcttttaggttttttgtttttgttttttgctgcctctgtttacaacctcacttggaggctcccgaccaggaatgaattccttcagtctagcaaagaggtagaggaggattgagaaggctgtctcaggctaagcaggggatcacacaacccacctcaggaggagcagtgcttcaccaagggtgctctgcccttctcaggcccaggacagtgcccaggactcagctcagaagctctcttgattgtaaggcgcaggcaggctacttcctttgaggtcccctcctctggctgtgagggtcattggctgggggttgggggattgggaatggaagaatacctttcttctttctgtcccacttggaaccctggttttgtttccttaataaatttttagttatgaaatataattgacctctgctggtctattttttgggactggggaggggcggctggtttgggcctgtacacctatgttggggccttgccacccaccgtggtgcaggggcagaagagagccacaggattatagggaccttggttactgctttattgctgtttggttgagtatagaaaatggaagcggctctggaagagcctgtgtacagagtagagaatatacaaagggacagaacgggaaccaaggaaggagacctctctccagcccagctaaagttgggctcaggataggggtcacctagggcgcatgcaataaatatatggtccggggaccccaggaagaggaggggacacctcggaagcagagacagatgggtcagggttgtcatccctggcgccagagctgcccaccctggtggtgaggaaaggaagggttggccctggggctagtgccacttgtgcaaaatgaggaacttcacattatcagtcccgggctgggcaggagcaggggacggggaggccctccggccggctcagtcccctcccctctctccaactgtgcccaatgctccgaccccagcagggagattcacagtgagaatgggtgtggtcgcaagggccggaggtagggctgggagcaaccgtccgaataatggcatccttcccccaagagcagcacggagccgggggagagggccaatgagccacagggagaggcagggttctcctttggtcaaagctgatatcaaaaatataaatctcccttcccctatcccacccccgacccggggttttcccccactgacttccccaggctaaggcactaaacagtgaggccaggtgaggtgtagaaaggtggggccaccactgcggcgctgccgctgctaccagttatccccgggctgtcaggcagcgccgggcgcacctaggagggacggcgctctaggtgggagagaaacggtcgatggttcggctgtccggtcctgcggccaagtgcgcaccctggctcagcacctctgccgccttgtctgggctgagtcctagctcagcagtgaatttagccagcgggtagaggctctccagcgccaccttggggtcgtgcaggaagtgcgtggtctgcgccagcagctcggcagcagctgccttgtcctgctgcttcagactcagctgttcagctgtgaggcgggccacagcaaagacaccctcagggaagtcgagcttgcccttgccgtcagggccagggacgccaggtagtccccccaggccagccagcgccccggccgcgccggccgcgccacctacagcgtgcatcttcatatggctgatgaggttgcgctgttgagcaaacttgccaccgcacacctggcactcgtagggcttctctccagagtggatgcgcatgtgctccgtgaggcgatactggcgggtgaagcgcatgccgcacgcgtcgcacgcaaagggcttcaggcccaagtggctgcgcatatggcgtgtcatggttccgcgttgcgtgaacttctttccgcagatggtacacggatagggccttgtcagccagtgtgtcttctcgtgctgcctcagcgtggccgggtccttgtagctcttgtcgcaggacgcgcagcggtatggccgcagcagctctcctagtccgcccggcgccccagtgaccttgtccccaccgccaccaaaggggggcccaaggccggcggccccagcagccacctcagcagcctctgccctgccatataacgcctcttcttcctctacgtgagcctccacgtgtgcattcagctgttccgagctggggaagcctttgccacatgggatgcacacgtacaggttgtcaccaaagctctcaggctcaccataagccaagtgcgggcatgggtagccctccaggtggccgccgggtgggctggggtcttcgctgctaccggtctcctcgctgctgctcttatagtcgtcgccgtctgctcctgtgcctggcccgtccaggctcccggggtagcgtggcgggggtaccaggcccagcggggggcccccgggtgaggcggcaggatccccaccgcgctcctccaggcgctcacccggggagcctcgatcccggaccagttcatcgccataactacccaggcctggctcgtgcttcatccagcggtagaggaggctggagccgtcggggcggccggggggctcgggtcccggactgccaccgcttcctcgaaacgggtctggagtcggtacggcctcctccagcttttggaagggcaaaggcggcagcgggggcagggcgagtgatggctccttgtagactgcgggccccgcaccgggagggctatccgggcgtggaggcagttcgcgctcactaagcggtcgctcggggaccgaggaacctggcgggctcttcttggacagatccaggccgcaaagcggggagcagcgacgctccggggcgcagagtgaggctgctgggcccgggcctgaagcatatagctcagcgcagtgggtgttgacggctgcatcggggcccgacggcggctcggcggcaggcggcggcggtggcccggccggggatgagtagcaagcctggatgacgggcgtggcagccctcaagccccggccgggccgcccgtaaggagcgtagccgccgccgccgctgcctcctccccgcaggtggcagtacttgccgtggcgtttgaggcgcttcttgcacagagccacgaggtcagggatctgcaggtagctggcagcagccagcacagcgcccaggctcggctccgcgcccggggccaccgctgctgctgctgcggcctcaacactgtcagtcaggcggccggtgtagatgaagtccagcaccaggcggaacacggccgggctcaccatgtcatggtccaggtttagcaggttgtcatgcaccaccagggacttgaggtaggcgctgctggccgccagcacgttcttgtgcgcgcggaagagggcattctgcaccacgatgatcacgtcgcacaagaagcccttggtgcgctgattgttgagctgcagcagtagctgcctcgaatggccaggcgcctccatcgtgtccagcatcatctgcccagcacactctcctgcgggagacacacaccagctgggtaagagctacgcagtgcggtgccctggcctcttgtacccaacccagtcggttcccctccgcttccccttcccctcagctgatcaggggcatggagcaccacggcctgaacagtagccgaggaggatcagcggcctccgggagtggaagcctaggcccgccggccccagacagaaggtgcaggaggagaaaggctgcggatggagagtaggccaggttagcctatctgttccagccccagatgctcctgggcactcaggctgggtcctgggaacttccagggagaaatctgtttagggcgaaatgaccctttcggagacaattacccgatttaagtaaaatgtccgcttcaggaaaagtcattcagggccgagaagtttgcccaagtggggagacaaggagccgagttagaagcgcctcccgcctcgaaagaagttgccccggttaggggaagtgataaggaagacgggagcaagatgcccatcgaggcaccgccctggcccggggctgtcaggccttcgttagggccggccggcccggcccggggagcggagacagtggctgcggtggcgggcagagcgcgaaggccgggccccggcgcggggagggcgttatatcggggcaggaggctgaggcaggaagcaggtgggggggaggggggagccacgcagctcccaggggagggagggggcagcgccccgggcgggcacggcgcacagccggctgcggccctgaccctggcctgcgccccacccgcgttctggacccagccggggcctcggctccacatctcttccccagctcccctccgccccgtctcccccgaaactctgccgcctcaaacttcggggaaaactttcccaacttcagacagggcgggaggagcgcgccggccccagcccccctccctggcccccagttcctcctctgggcccccaatttcagcagcctggtggcagtggggacccacaccaaatctaaagccgccctgccctccggcgagcacgcccgcccctgttccccgcctggcccgcagggcctcgccggcccgttacctgcggcggccgcccagcccggcttccctccctgaggcggtggcagctcctagcctgcgccccacccgccccgctgccaggcgccgagctgtgccagggcagcgcccctgccagccccgcccgccggctccccttgccttcccctctcctccccagcccatgtgcgggcagagccggccccgggccgctgaccccgccgtgaacccggcgccgagcagcggcccagccgtcccgagtcctctagggaagacacttagagccccaaacgcgacccgggcgcccacgcctgaggatgctcccgaggtagccggcgcacgaggaccagattgtcccgggtcccttgcccttccctgtcgccaactcgaggacccacctggggggcatgtcggaagccccgggcccggctgccggcggatccagggggggacgtggctgcagtgcgctgccctccgcccgccgggcccccggtcggtctgtcttgccggtccgtcctccccgcgtcctggtcgcgtctcagcccctccgcgctttccgcacactcttatctggagcggcccgaaccggcagacgctgccgcggccatggcgccacctcgcggccacgcggggactgtgtgcggctgggctgcgacctctggcgcacacctgggccaagaggcttgcagatgcggagctgagcagatcttgcaggttcgcgcgcttccagatgtgcccacctggagactcagatatcggacctgggagtcccataaacctgggggttttgtgctgagtgctcccgagtacatatttatatgttatatcgcgccaattcgggggggggggggaaggttctgtcttcaaatgaggaactcttaagccagggatggtggcgcattcttgtaatcatcctagcatagcacccaggagttggaagcaagaggaccaggagttcaaggtcagcctctactacctgagaccctatcttagaaaaggggttggggtggaacactacgaacagtattctgtgagagggcgagcttagaaatcctaagtgagatgaaggtacatacgttcggagcaggagcggggcggcttttattagacatttctgaacaccattattcacttggactcagtggagagagacacattccaactctccctcagacacatgttatcagtatgcacatcataaaccgtccacactcaaactctgtccaagcagtgacaagggcgcgccatgtttacacagaccgcccaccccctcccggagtcccaacttcttgggctactgcggaggctactacgtgaaacggggtagaggtcctaccaaagagccctccccgaacttgcgggtctccagaaggaccctagagccctccattggaaatagctggacagagcccccttgcgacgtgcccctcaagtccccaatcccccatctaagcagttttgagggatcttagtttgcccccccccaatacaccattcgagagatatcacgagaacgggcggcttgagaccccctcaaaaaaagatcctacacgccacacaagggagagctcattcatgttggtgactcctcttttaggagggaggggagcgtgcaccagctcttgggtgctcaccggaaatgtccctgcatagcggggcggaggcataagcaccgttgcaagcaccgcgcctccgtggcccacgctccgcctcttccccgcacctcctgacccccgcccacgctatagggggggtccccccaaaccgcccacagcttcttattggctgcgccatcctccgtggccaagccggagaggctggggctcagagttactatggtaaccaatgaggttcccgggatctcatctctcagaggccttggagagcttagcaaccgcgcggggcgcagggcgggtgggggctacgctcgccgcaccccacgctgtcttcgagcccccactcccccgcttgaggtagtggctgagtcactcgcccggggcagccggccgggcctctagctgtaccagtgagacaccaaggtcttgggcgcctcctagaggctgcgtttctttggcaggagacttctatgcctggcctaggcttctggtccaaagagtcttcaaggctcaccaggtttccgcgacagtgtgctccgcctccatctaatccacttactacttcgtatctccgtacagtgtccatacaagacaaacactgcagtcccacggtggactccacaatttctgagctctaggagaagtgaagaggtaccttggtatctctgtcgagggatacgccttggggctgaagcggaagtgtaacggagcgtttgaggataagaaggctccccagaagtgctcttagggatgagttttgacaactctgagttctcccacaagcaagggtgtctctgatgtctctgttttaaatgttttctccttttaatggggttagatcgtgcgagtctggagagaaagctctgtatgtgttttacacaatggagtttatccgctggttgacccataaggaggtcggctgggtcttcagttccttcttgttctatccctctccaccgactcaagcccttgttgtatcgctatggggccaaccacataaaccttgcccaagtttcactgtgtactcccctcccctcccctcccnnnnnnnnnnnnnnnnnnnnnnnnnnnnnnnnnnnnnnnnnnnnnnnnnnnnnnnnnnnnnnnnnnnnnnnnnnnnnnnnnnnnnnnnnnnnnnnnnnnnnnnnnnnnnnnnnnnnnnnnnnnnnnnnnnnnnnnnnnnnnnnnnnnnnnnnnnnnnnnnnnnnnnnnnnnnnnnnnctccccttctctcctctcctctcctccacgccccaccaccaccaccaccacagtttcaagtctacggctagcctcgaactcacaaaggcgtctacttcccacgtacaaggatgcgcaccaccatgcccctcctcttaactttgctttccccttcttcctgagctcctctggtcatcctggtgcagcttcctcctctccgtgaacgcatgacgaccccatttagagcccggagacagaatcgggctgttttggaggacctgttccatatcgtatttgcctttagtctattctgactcctttagaaaggagtcccagctacacacaccctctgccaagctattgagcccccttagtctcattttctctcttacaggctctgcctatgcctattccaccccactgaggtggccccctcgtgccccctggggcactgccaagttggctctccagtacttgtcaggctagcccttccttttgtggatactccgtacagggattttccaaactcttacagaagatcttctgctcatttctaaagtccagaccactctccttagactccctgatcttctctgcggtttccaccatctgaccggtacctttcctcctgtgacccagtcaagaagccttccaaaactcccaggcttctccacccctctttccccagctcctagatgtcaaagtccgaggtgcactctactcccctcctaaaccggtccagtttcttgcctcaccccccaccccccccacacacacacaccaggagagagcgaggataccacggtggccaaatgggagtgataccatcgcggggcatcttctggcgtcagaggactgtagggtctagggaatgagcagtgtggtttggggctgccaagggaggacccctgcggtccaggagaaaagaactgagatcctaggactcgcaaagccccggaaggggagagtgaataaacacagaacggggcctcaccctccctgcactattctcccccagcccgtcgcctgcagttccggaaagttaaccccttggaggccaagcctggggttacgtactcccctacccaaccctgcttccgcgtgcgcaccctcctcccgctccaactccctgtcgcttcgtcccgccctcccctacgccccccctccccgcttgccactataaatagcctcttttcccgtttcctaaattctctgctgacgtcggcagcgcgtcagtgtgtaggagccgcggccgcatgaatgagccgccgcacgagtactacgcgcgcctataaaagcggcggcgccggccgggctgcgggaggcaagccggcactggtgcgacgcggcccgacaggtaaggaccaccaacagtcggagatgggcagatgcgcggacgccatgggaaggcgaggaggggaccggaggggcggcgggttggagggggactccggagtgaggatggggggcagagtgggagggacgaaggttcctttcagcttggtggaccaggggccggcggctgacccaaccctatgcagcacctgccggcacccaaatgcagacgcagacactatggagaaacatcaagcggagagccgagcccccgaccccatttcccgaggctgagcagctcctgcgccatcctttcaagaaagtggggagaaggtgctggcgtctcaggagacgcgccccctcatttctcccctgtccgcagagcggtgactcagcctagatggccccgactgactgagccagggcgcccacgacagacagacgcacacctcggccctgcggctttcttgggacccccgtcctgcatgctccacacacgccccttccctgtcccgtcccttcccgtccggtcccgtcccgtcccatcggactgtcccactgagctcaggacttcccgcctctgcaagcggagctgtcctctcaggaccaggcgggggcggggcttcgatcaggccgccccgccctacccccaccgctccccaccgccggaaatgcctccccgctgggacatctttgacgtcacaggactctgacgtcacggtcgcgtgtctgtccgcgcgcgcttgggaggaggtgggggggcctgagaagcagcagcactctcaactgcgggcgacgggatatccccgcccgggcagcgcgccggcaccttggctctagactgcttactgcccgggccgccttcagtaacagtctccagtcacggccaccgacgcctggccccgccccaggaccgccgacccccggcccctccacgcctccctgcgccgctgtccgcggtgctgatgcagtgcaagcgcctccctcgggcacgcctgttcaaggtccctgtgggttgcggtgggcgcaggccccgcagacactcgcgccacccccgccgcccgcggtgctgacgtcagcctgcaagccccgcccccgcgtctccagggcaaccgtggctttcgattgttactgtgggaaccggaggtaacagtctacagccatggtcgccccgcagcacgcccacgctccccaccactcccgagttctgccagcctgggtttgggcagatacagagcaagaggaggcggggcggcgacgcaacattcgatgtgtctgcggaggtggcaagaggtgtgctcagaaaggcggcctttcaggctgctgtgcatctacctcggtgcagaagcaagatccgcggagtgtctgaacatcctcctcagagactctcctgtcttcctagtcgaggtatcgctgcctaaggtggcgagaaaatgggtggttctgcgataaggattcttatctcatgagtggtgaaccgatgggatcaggagtcctgtgagaaggaagaagtcacttttgccagcagaaagctgaagggggaggagaaggaagttttatcacacctttcttccagaaaaccctaggtgagcaggtagaggggaaagggcaaagaatccctttcctgatagagccataactctgtcccccaactttctcctgggccatcattaaaagggtccttaacacagcaag

SEQ ID NO: 552 - DNA, 6327 bp, Mus musculus
aatcaaacgatacacggagcaatttacttcttccactctctgagattccgtttaccagtaatggggataataataaaagatatttaaactccacaatccaggcctacggtaaggagacttcggcctaaaatgatcggaggaggccgggttgtaggatgtctccgtcaatccgagccccagatcaaaagcagtgtcctcggtggtcaccgcagcaatactggcatccctagacccgaatgcccacctgacatgggcgagtcacacctggctgcgcctcacctcgcctccagagcgctgcgcctccacctccgagcctcggcggaccgtcctagctttacacctctgcgcacgcgcacacgccgtctccgcggccgattcgcccgctccggcaaggccctagttgaacgtgctgaatgcttttgctcccagtgcggccaccgtcgtttggggagggcaggcaggaggggggcggggaaaagggtgggagtgggtgagcgcgcgccgcccgtccgtcgtggtttcctggctgcgcgcggcggtggccgagtcgccgcagctgtagcagccgccgcgaagatggcggaggggttggagcgtgtgcggatctccgcatcggaactgcgagggatcctggccactctggctccgcaggccgggagcagagaaaacatgaaggaactaaaggaacccagacagcgcaaagataataggcgtccagatttggaaatctataagcctggactttctcgactaaggaacagacctaaaactaaggaggcttctgggaatgaggaatttaaggatgagatagtaaatgacagagattcttctgctgttgggaatgatacacagcttattcaagtttgcaaggaattggacagccaacagcaaaatggccctatagatgcagaaaatagtcaggcacaggaaacttttccaaagactgttggactagaggaccgaagtctaaagatcatcaaaagaagcaagaaaccagacctgcagatctaccagcctggaaggcggttgcagaccattaccaaagagtcagcaggcagggcagatgaagaagagatcctcaaccaagtggagcagttgaggatagaggaggatgagtgtaagggagaagctataaaagaagaagttaataacaaaccggataaaaccgagatagaaaagcaccaaagtaatgaccgtgtaagaactgccaagggagaaaagggaaaaaagattgaaaagggggaggggtcaaagaaggtggctgatgactctgtcccaggaaagcctggctctgtaaagagatactcgagatcagacaagagaaggaatcgctaccgcacttgcagtaccagctcagctggtagcaacaacagtgctgagggagctggcctgaccgataatggatgtcgccggcggcgccaggatcgggccaaggagaggccacgactgaagaagcaggtatctttgtcctcaactgattccttagatgaggacagagttgatgagcctgatgtcctagggtccaggaggagctcagaaaggaagaagcatttagaaagaaattggtctggctgtggtgagggtgaacagaaaagcaatggtaaagaaaaccgaagtgcccttcgtgtcacttttgatgcagaaaccatgagtaaagactcccctgtggtgaggtcagtcaaagataatgtggatagaatgaagtctgacaaaggcccaagcagtgggggtaagggctctgagaagcaggagctcagacacccgagacaagaacttcgagatcgtggtcgtggtatcctgattctgcctgcccacactgccctatctgtcagttcatcaggttctccggagtctacacctttgggacctcgacttttatttggatctggtagtaagggatctcggagttggggccgtggaggcactacccgccgactatgggacccaaacaatcctgaccagaagcctgccctaaaaagccagacacctcagctacatttcttggacactgatgatgaaattagccctacatcttggggtgattcacgtcaggcccaagcatcttactataaatttcaaaactctgataacccctattattaccctcggacaccaggccctgcctctcagtatccctatgcaggctatagccctctgcagtacccagtaggccctacaaatggtatgtatccaggggcttactacccgggctatcctgccccctcaggacaatatgtgtgtagccctctccctgctagcaccatgagtcctgaggaaatagaacagcacgtgcggaacatgcagcaacaggagctccatcggcttctccgagtggctgacaaccaggaactgcagctcagcaacctgctttccagggaccgcatcagcactgagggcatggagaagatggctcagctcagaactgaactactgcagctgtacgagcgctgtattctattagatattgaattctccgacagtcagaatgtagatcagatcctgtggaagaacgctttctatcaggtgattgagaagttcaggcagcttctcaaggatccaaacagtgagaacccagagcagattcggaacagactcttggagctcttagatgagggcagtgacttctttgatagtttgcttcagaaactacaggttacttacaagttcaaactggaggactacatggatgggcttgccattcgaagcaagcctttacgaaaaacagtgaaatatgccttgatcagtgctcaacgaagtatgatttgccaaggagatatctctaggtatcgggagcaagccaacgatacagcaaactatgggaaggctcgcagttggtatctgaaggctcagcacattgctcccaagaatgggcgcccctataaccagttggctctactggcagtgtatacgaggaggaagcttgatgctgtatattactatatgcgcagtttagcagccagcaaccctatcctgactgccaaggagagtctcatgagtttatttgaagagactaaacgaaaggctgaacagatggaaaagaagcagcatgaggaatttgatatgagccctgataagtggcgaaaaggaaagaagtctactttccggcatgttggggatgacactactcgcctggagatttggattcatccatcacattctcggtctgcccagggcactgagtctgggaaggattctgagcaggagaatggtctgggcagcctgagtcccagtgatctgaacaaaaggttcatcctcagttttctccatgcccatgggaagctgtttacccggattgggatggagacattccctgcagtggctgagaaggtccttaaggagttccaagtattgctgcagcatagcccatctcctattggaagtacccgtatgctgcagcttatgaccatcaacatgtttgccgtgcataactcccagttgaaagactgcttctcagaggagtgtcgttctgtgatccaggaacaagctgcatccttgggcttggctatgttttctctactggtccagcgctgcacatgcctacttaaggactctgctaaagctcagctgtcctctcctgaggaccaagaggaccaagatgacatcaaggtatcttccttcgtcccggacctgaaggagctgctccccagtgtgaaagtctggtctgattggatgcttggctacccagacacctggaatcctccacccacatctttggatctgcccttgcaggttgctgtggatgtctggtcaacactagctgatttctgtaacatactgactgcagtcaatcagtctgaggtgccactgtacaaggacccagatgatgacctcaccctgcttatcctggaagaggatcggcttctctctggctttgtccccttgctggctgcccctcaggacccctgctacgtggagaaaacctcggataaggttattgcagctgactgcaaaagggtcacagtgctgaagtattttctggaagccctttgtggacaagaagagcctctgctggcattcaagggtggaaaatatgtgtcagtggcacccgtcccagacaccatgggaaaggaaatgggaagccaagagggaaaacaactggaagatgaggaagaagatgtggtgattgaagactttgaggaagattcagaggctgaaggcagtgggggtgaggatgacatcagggaacttcgggccaagaagctggctctagcaaggaagatagctgagcagcagcgtcgccaggaaaagatccaggctgttttggaagaccagagtcagatgaggcagatggagctggagatcagacccttgttcctcgtaccagataccaacggcttcattgaccacctggccagtctgtctcggctgctggagagcaggaagtacatcctggtggtgcccctcatcgtgatcaatgagctggacggcctcgccaaagggcaggagacagaccaccgggctgggggctatgcccgtgtggtgcaagaaaaggcccgaaaatccattgagttcctcgaacggagatttgagagtcgggactcctgcctgcgggccttgaccagccgtggcaatgaacttgaatctatcgccttccgaagtgaggacattactggacagctgggtaacaacgatgacctgatcctctcttgctgcctgcactactgcaaagacaaggctaaggattacatgcccaccagcaaagaggagccaatccgcctgttacgggaggtggtgttgctgaccgatgatcggaaccttcgtgtaaaggcgctgacaaggaatgtgcctgtgagggacatcccagccttccttacgtgggcccaggtgggctgaggggaccacactggggcccacccccatggagccattcctgagaggccgccaggcgcccagtgtaacacggaagatgtccacgtgcctgagctaccaatccacccagacaataaaccatcctcttccaacctcacgccgtggccgtgctgtgggggagccgctcctcacagagccctcccaagggtcaggcggaaactgctgggaccctcctgggctgccaagatttagcagggaggtgactggctacagtgacaacaggtggacaagccgagtaggccaccaagctcccaccctttttccctctatctggtcccagggctggagggaggcctactcaccccgaggacccagccactctgtagtggtaaggggcagagattctaaagtttccattagatgcaaggaaactgatcaacccctcagtctgcacagtctctgtcctgaatgtctgagaggcttcagctgtcaggaagggtgcccaggtgtctccatctccctgaggcccagatgccctgtggacccacgctgacttctgtctgtaacagcaacagcagccctcgcccttcaacacacacgcacgcactcacacagcacatgtgcacatgtttctcttcctgtccacatcttgcactttgcccttgttttccttttgggcagtcatgggcctaagggaagggccatctggtcttgggcccgtgcgtcctgagtggccctccaccagcacatgctcccatccttggccttcctttcactgcagtaccctcttggggaaatttcctcagactcttctttgcctgccttccttttctagttggcccctttcatcaccccaaaccccctaaacttcctcccctcagttccttgtgggacttctcgttctgaatcttacccctaccacctgtgacaggaaccaaataaagccttcccagctgtccttccttcccaacccgtcacacctctgagaagtctcctagctgggagagctgaaccccaaggtagaggtgccagggtgttgagcccgtttctggctttgtcattgtacttctttacccagaagaggggacatggggccctttagcctttgagggttttggttcttttaggttttttgtttttgttttttgctgcctctgtttacaacctcacttggaggctcccgaccaggaatgaattccttcagtctagcaaagaggtagaggaggattgagaaggctgtctcaggctaagcaggggatcacacaacccacctcaggaggagcagtgcttcaccaagggtgctctgcccttctcaggcccaggacagtgcccaggactcagctcagaagctctcttgattgtaaggcgcaggcaggctacttcctttgaggtcccctcctctggctgtgagggtcattggctgggggttgggggattgggaatggaagaatacctttcttctttctgtcccacttggaaccctggttttgtttccttaataaatttttagttatgaaa

SEQ ID NO: 553 - protein, 1555 aa, Mus musculus
MIGGGRVVGCLRQSEPQIKSSVLGGHRSNTGIPRPECPPDMGESHLAAPHLASRALRLHLRASADRPSFTPLRTRTRRLRGRFARSGKALVERAECFCSQCGHRRLGRAGRRGAGKRVGVGERAPPVRRGFLARGGRVAAAVAAAAKMAEGLERVRISASELRGILATLAPQAGSRENMKELKEPRQRKDNRRPDLEIYKPGLSRLRNRPKTKEASGNEEFKDEIVNDRDSSAVGNDTQLIQVCKELDSQQQNGPIDAENSQAQETFPKTVGLEDRSLKIIKRSKKPDLQIYQPGRRLQTITKESAGRADEEEILNQVEQLRIEEDECKGEAIKEEVNNKPDKTEIEKHQSNDRVRTAKGEKGKKIEKGEGSKKVADDSVPGKPGSVKRYSRSDKRRNRYRTCSTSSAGSNNSAEGAGLTDNGCRRRRQDRAKERPRLKKQVSLSSTDSLDEDRVDEPDVLGSRRSSKKHLERNWSGCGEGEQKSNGKENRSALRVTFDAETMSKDSPVVRSVKDNVDRMKSDKGPSSGGKGSEKQELRHPRQELRDRGRGILILPAHTALSVSSSGSPESTPLGPRLLFGSGSKGSRSWGRGGTTRRLWDPNNPDQKPALKSQTPQLHFLDTDDEISPTSWGDSRQAQASYYKFQNSDNPYYYPRTPGPASQYPYAGYSPLQYPVGPTNGMYPGAYYPGYPAPSGQYVCSPLPASTMSPEEIEQHVRNMQQQELHRLLRVADNQELQLSNLLSRDRISTEGMEKMAQLRTELLQLYERCILLDIEFSDSQNVDQILWKNAFYQVIEKFRQLLKDPNSENPEQIRNRLLELLDEGSDFFDSLLQKLQVTYKFKLEDYMDGLAIRSKPLRKTVKYALISAQRSMICQGDISRYREQANDTANYGKARSWYLKAQHIAPKNGRPYNQLALLAVYTRRKLDAVYYYMRSLANPILTAKESLMSLFEETKRKAEQMEKKQHEEFDMSPDKWRKGKKSTFRHVGDDTTRLEIWIHPSHSRSAQGTESGKDSEQENGLGSLSPSDLNKRFILSFLHAHGKLFTRIGMFPAVAEKVLKEFQVLLQHSPSPIGSTRMLQLMTINMFAVHNSQLKDCFSEECRSVIQEQAASLGLAMFSLLVQRCTCLLKDSAKAQLSSPEDQEDQDDIKVSSFVPDLKELLPSVKVWSDWMLGYPDTWNPPPTSLDLPLQVAVDVWSTLADFCNILTAVNQSEVPLYKDPDDDLTLLIEDRLLSGFVPLLAAPQDPCYVEKTSDKVIAADCKRVTVLKYFLEALCGQEEPLLAFKGGKYVSVAPVPDTMGKEMGSQEGKQLEDEEEDVVIEDFEEDSEAEGSGGEDDIRELRAKKLARKIAEQQRRQEKIQAVLEDQSQMRQMELEIRPLFLVPDTNGFIDHLASLSRLLESRKYILVVPLIVINELDGLAKGQETDHRAGGYARVVQEKARKSIEFLERRFESRDSCLRALTSRGNELESIAFRSEDITGQLGNNDDLILSCCLHYCKDKAKDYMPTSKEEPIRLLREVVLLTDDRNLRVKALTRNVPVRDIPAFLTWAQVG

SEQ ID NO: 554 - DNA, 297911 bp, Homo sapiens
ctcatctggaaaaaaaaaaaaagaaaaaacaaaagcaccttcccctccaggggagggggcgacaggagataccagcctatactttaattcaacagtaagtctttatattaaaatgaaaaaaaatccaaaaaccatatgatagagaaaaatgtaaacttgatgtgatgttttaagataaaaaggataaaaggatatatcaaagacctctccccaacagtggtagtttttggattttgtttaaaaaaaaaaaaaaaaaatgaggccgggtgtgatggttcacacctgtaatcccagcactttgggaggccaaggtgggcagatcacctgaggtcaggagttcgagaccagcctggccaacatggtgaaacccctgtctctactaaaaatacaaaaattagctaggtgtggtggcaggcacctgtaatcccagctactcaggaggctgaggcaggagaattgcttgaacctgagaggcggaggttgcagtgagctgagatagcaccacagaactccagcctgggcagcagagtgagactccgtctctaaataaataaataaataaacaaacaaacgagacagggtctctctctctctctgttgcccaagctggagggcagtggtgcaatcatagctcactgcagcctcaacctcccgggctcaagtgatcctcctacctcagcctctggagtagctgggactacaggcgtgcaccaccatgcccagcgagttatttatttttttgtagagactgcatcctgtaatattgcccaggctggtctcaagcttctggtctcaagggatcctcccgcctcagcctcccagagcactgggattgcaggtgtgagtcaccatgcctggccccatagtggtagttttgagtccattctcctagcgccaccctccactggcacggaggtggcagttacataggttctgatcctcgggcctgggaacagcacacagagaaccccacccacccccctgctgccgccagactggtttgccagcgaaaacttccacacaaggaaagtttctactcgcaggggcctactgcatatccagcttctggacagacaggtttaggaacaaccacagcaaacactcaacaaagcaattttctagccagtcctaggagtcttgcccctcccgttgggtaacaggaatggggatctggctgcaaactttcctgggtttgcccatggtcaggtcttgacacagtgattcttcaggaaggctctccaggaaggctctgtgttttctgtttaaatgtctgcattctaagaagctcagagaagcttgtattgcctaggcctggctctcctcagtcacccccaaccctcctctgccaagaaccatgggtcggtgtggagttgaggggcccagtacacaagggtcccttgaaactagggaccgtggtgtcgctaggctggtaatccagtctccacagacttcactctgctcttgacctctcagcacgttctctatactcccatttctcccacaacaaagctgaattcggacgtggctaggacagtagcaaggcacagtttaagtctggatcaacttcagactaaaaatgcatttcagagcatttttccagggactgagggagactggcacatcagaatctccaaaaaggcagagaggggtggtgtttttgatccataccttgctagtcttccctccccgtcccccgcaagagtctctcgtgattccaccatgcaatgcaaggaagctgctttgcaggcagaggaaaaaggttgataatcaatgctttcaacgagcctcagtttcagcccaaattgggatttagctcaccactgagcaccaattttgacaaagcataaggatttctctgtctgtaggccctgagataccctggcctgacttagcccgatactgttggaacctctcctgctcctgttctccgtgactgtaccgaacccaaaacagaggctgcacactggcagaggctggcagatgtcttttgtgtggcccacacaatttttttttaaatgggaattagctgtcagtatttaaaaagtaggaatttttttttttttttttttttgagacagagtctcgctctgtcacccaggctggagtgcagtggcgcgatcttggctcactgcaagctccgcctcccgggttcacgccattctcctgcctcagcctcctgagtagctgggactacaggcgcccgccaccacgcctggctaattttttgtatttttagtagagacggggtttcaccgtgttagccaggatggtctcgatctcctgacctcgtgatccgcccacctccacctcccaaagtgctgggattacaggcgcccgccaccacgccctgctaatttttgtatttttagtagagacggggtttcaccaagttggccaggctggtctcgaactcctgacctcaggtgatccacctgcctcacctcccaaagtgctgggattacaggcgtgagccactgtgcccggccgagaattctaatactcttcaaagttgcttatcataatactggcatgccttttttttttccagagcataggttctgctgagaaaaactgaggtcaggctgtgtcttgtaaacctaggaatcattattccaccatctcaaagaactggggaaaccttcccaaacggacatggtatgaactcaagtcctacaaacctaccttcagcctcaacagccaaaggaggagagacgaatattctttgagtgcttacaatgctacgaacgaatgaacatttacacacatcatctcaatccccacgaaagttccttgaggtgggaatcatcagtctgtttttagaggagcaaactgagggtgagagaagttaagaaacttgtccaagacgacttaaaaggcaggacgccaggattcaaaccccagtctgtcactcagactctgctcagaggctgcctctccgactgccctcccacatgttttttcttcctagctcttatcacatgccaagttattggatgacatatttacttgcgcatttgtttcctgtctgtctccccaacagaatgtaagctcctgcggcagagactctgtccatcttgtcactgccatttccttgcacggtgaacggtgtctggcacctggtgagcccttggtggggatctgctgctggatgaggggaagggcagctgtatctgctgtgccacactaccgtccaaagcatcccttcccttatctgttctttcattattttccctccacaaaccccaacaccaatctcagaggccaaggaatacaacacagagaaggtgaatggttccctgtcccttcagatggggggttgagaggaagctgaaattcctagaaatccaagaagagtctgtgcgtagggataggcttgctcctacaaagcaaaagtcttcaggctgaggaggcggaaatggtttataagcgactctctcctttctggggctggaaggcttggccacactgagaaggaggtgatgagagagtcccttctgaggctggaagccttagccacctctcctagcccacgctcaggctcctttgcatccagtcaagggcttggggttaggatcatggagcaacacgggtgggaaacaaagggaaagtggcacagagcatccgaaaagcacaaacccctccctgaagtcaaaatcaaaatcagtcagagcactggttcctgaactcaaatgacctagggcagcggctctcaaagtggggtccccagacctactagaatcagaaactccagggttgggacccagaaatctgtgttctaccaagcccttcaggtgactctgatacatgctaaaatgtgagaattactatcctggggaacaaaaaatacgcagattcttgacccctgaagaacctgatttagtaggtctgcaaatggggccaaagaggatttcaaaagcttccaggttgatttggacttgcagccagatttgagagctactgcacctgaggactcatcttttcctggccccaggccagtgtcctcggctctagaccgacctcccatcatccttcagtcactcactcaccacataaagcaatgatgtggctgctgtcttcatgcacaaacttcctggtgacagcctcctccatgatttgcttcacctgcggacacatggacagcatcactgcttttattattttcccttatcaaagacctctgggcaaataaatagtttggttccgcccttctggtctgaagggcactttcagacacttgcagagatgacagggatgaaaggtgtggggaagcaaagtttcttcagcacagtctgattccagtcttttggaggggaaaccagggaaagagatgccaaaaacccatcaaacaatcagtgcatgttccagcccaggtggaagtgccctgccttggagaacaggaataggatgctgtttgctcatctgttctcagctcacgaagggcttctgggcagatatactgtcctttagagacaaaccatctcggtacagcctgcagataaacaacctgcccctcctccttttctccctattctccaaggttaggggtaggtctcatacctcagggacaccctctacatgctcaaaagcccagccttctttccatctagggtctagaactctgatgtttggggttcccacctggatgtaaaagttcccaaataccttgtaaggtaaacagtcatttttttttgagatggagtctcgctctgttgcccaggctggagtacagtggcgtgatctcggctcactgcagcctctgcctcccgggttcaagcgattctcctgcctcagcctcccgagtagctgggacaacaggtgcatgccaccacgccctgctaatttttgtatttttagtaacgatggggtttcaccatattggtcaggctggtcttgaacgcctgacctcaggtgatccacccgcccggcctcccaaagtgctgggattacaggcgtgagccactgtgctcagtcatttctttaagaaagcacttaaaaagaaatctttttaactgatgtgcagtaaacatataaaagaacatatcacaattacacagcgtggtgaattttcacaaactgaacactcctgtgaaatcagcaactagagcaagaaacagaacatgtgaccaacaccctcgcctcatcaccttcccttctagtcactattccccctaagggtacccactctcctgattccaacacgacagttttgtgggtttttatactttttttgtttgtttgtttctgaaatggagtttcgctcttttgcccaggctggagtgaagtggcgcgttctcagctcactgcaacctccaactcccgggttcaagagattctcctgcctcagcctccacagtagccgggattacaggcatgcaccaccacacctggcttttttttttttttttgtatttttagtagagacggggtttctccatgttggccaggctggtcttgaactcctgacctcggtgatccacccgcgttggcctcccaaagtgctgggattacaggtgtgagccgccaccacacccggcctgggtttttatactttttataagtggaatcactcagcgtgtagtgttttgtgactagtttcttttgctcacctgtgtcattctgaaatttgttcatgttgtgtatagctgtagattgttcattctccgtgcgcgttgtgtacagttgtaggttgttcactctccgtggtgtgaacgtacaaacacccggcgtttgggtggtttccagtttggggctgttatggatactgctgctgtgaacattgaggactgtcttctggtgaacaaatgtttgggatttatgtttctaggcaaggaatgtctgatgcacacactttattagatattgccaaattgttctccaaagttggttataccactttacactcccatgtatgaggttctggtggttcccaacatttaacccaaactctgttgatgtcctgggagaacctgctagcaggcagtcctagtactggagattatagagattacctagtgcagaatgttacacataaagtgagccttgggtagagctagtcttccccattctttagacaggaatgtaatgttctgatgctgtccaggttcccaagacccttagtcaagactgtatagtttggagggtggtagaacctcaaaagcctggggaggcgggaagaaggacctggaggcccctccctgccggaaactgctaatggttagtgctcaggtaaaaggggatcagatcaattaatgcaaatgcactctaagctgttaaaagcttcctagacggctgggcatggtggctcacgcctgtaatcccagcactttgggaggatcaggctgaccaaaatggtgaaaccccatttctactaaaaatacaaaaattagccaagcatggtggtgggtgccagtaatcccagctactcaagaggctgaggcagaagaatcacttgaacccggaggcagaggttgcagtgagctgagatcgcactccagcctgggcaacaagagtgaaactctatctcaaaaaaacaaacaaacaaacaaaaaaaacttcctagattacctcccaaggatgttagcattcaacagaggataatgtcacagctaaagacctggaggcatctgaagcaggctgatggggaggatttttgggttgaaggatctgcagatacccctagaattataccagtggtcctttgtgaaaggccagcctggtctaccaatattcctgttgtttttccttgcagaagggacaggatgtttctgtagaaattaaacactgggccaggcgtggtggctcacgactataatcccagcactttgggaggccaaggtgggcggatcacgaggtcaggagatcgagaccatcctggctaacatggtgaaaccccgtctctactaaaaatacaaaaaattagccgggcgtggtggcaggcgcctgtagtcccagctactcagaaggctgaggcaggagaaaggcgtgaacccgggaggcggagcttgcagtgagctgagatggcgccacggcactccagcctgggcaacagagcgagactccatctcaaaaaaaaaaaaagaaatcaaacactgaaggaggaaaggagaaacatgagttcagagcaggtcaacttttgtcaggaatgatacgtagctgtggcatattctgacatttctcacattttcttaggaatcacttttggagcagtatagtccagtttctaagcactggtggaaaaagtcatcatcctcttaaaaaatatttcctggcggtcgcagtggctcatgcctgtaatcccagcaccttgggaggccaaggcgaggtcaggagatcgagactatcctggccaacatggtgaaaccccatctctactaaaatacaaaaaattagctgggtgtggtggcatgtgcctgtagtcccagctacttgggaggctgaggcagggaaatcgcttgaacccaggagctggaggttgcagtgagctgagatcgcaccactgcactccagcctggcgacagagcaagactccgtctccaaaaaaaaaaaaaagtatttcccattatctgtgactaacctccaaaattgagccatatctataatcccagcatatccacctcaagtgtagacacaagtacttttctattttgtttacactgttcaagtctctgtcactagactgcttccttttgcaggagaatcaagatttctcttttcattggggagagcagaattgggcttaaatgctgacttgatacacccctggcctaagaaatccttttttgggcctcttcacagcaaagacataatgaagcttctcccacaagcgggaaagctgatggcttcaactacatctttaccaaggggaggggtgggaacaaacattagggcctagtagccaggccatggctaacgcatgagaaccatctagagatttccgggactttttttttttttttttttgagatggagtgttgctctgtcgcccaggctggagtgcagtggcacgatctgggctcactgcaagctctgcctcccgggttcatgccattctcctgcctcccaagtagctgggactacattcgcccgccaccacgcccagctaattttttgtagagagaggtttcaccgtgttagccaggatggtctcgatctcctgacctcgtgatccgcccgtcccagcctcccaaagtgctaggattacagtcgtgagccaccatgcccagctttcttttttagacggagagttgctctgtcgcccaggctagactgcagtggttcgatcttggctcactgcaaccacacctcctgggttcaagcgattctcctgccacagcctcccgagtagctgggattacaggtgcccaccactgtgcctggctaatttttgtattttttgtttttttcagtagagatggggtttcaccatcttggccaggctggtctggaactcctgacctcgtgatctacccgcctcagcctcccaaagtgctgggattacaggcgtaagccaccgcgcctgtccactttccaggatgttatgagagcccagacgcttccccaaccctgaaactctaattacggctcagctaaggtaaacttttttttttttgagacggagtctcactctgtcgcccaggctggagtgcagtggcacaatatcggctcactgcaatctccacctcccaggttccagcgattctcctgcctcagtctcccgggtagctgggattacaggcacgcaccaccacccctggcttattttggtatttttagtagagacggggtttcactatattggccaggctgatctcgaactcctgagctcaggtgatccacccacctaggcctcccaacgtgctgggattacaggcgtgaggttatatatatatatattagggagacggcatagagactcaaggtcacacagaattaggtccagactattccaaaatgtatgctttccaaacaccaggcctcgaagtctccaaaatcagcacatttatttaccaaacagtcacggagtgcctacagtatgccaggcactggatacaaggcagtggacaaaacagagggtctcctgccctggtggagtttacttaccaggcagacaacagccacagaggcaggcaggggaaggaggcccaatgtattctaagctgcgctgtgggttggagctctccagctctcatatgggagtgagtcattcacatggtcactgccccccacccgaaatggaaatgggcttttgggcagggtcaaggtaaacggagttagtagagggaaggactacttctctttctgaagtaggggggcttccctcaaaagggaaaaacttccgagtgttaaaaaccattccaaacaagcccctggtccctggctaaggaggtgggcgtggagggagaaactgaggtgtgcggcgcacccctccggcagcgatcactccgtagctggaggcacagcggacgtcggacaagggggagctcagcccgcacgacacccacttaggacgtggggaagctcggcccgcacgacacccacctgcgccgcgggagctcgcgcggggccccgccccctcccctggcggcgcgggcactgaatgggcagctccggatccagccatccccgccatcgccgccacccctcccccggccttgggctcccagcgccgctgccgtcactgggcggggagctgcggggctgcgaagcaaacaagccgggagcgccggccgggtcccccgggcagaggggcgctgccctcccccatccgagaaaggggaaggaggcgcagcccgtccaggacccgccccgcccggcccaggttcggcccgggtgcccgcgccggggggtgggcgcggacctttctgccccctgggccgcgcgggccagggcgcgagccccccggggttcttgactcgactttacctccttcttcacgttccacagcagtttctctttgactgcgtcctctgcgctgcccatggtgtggcaggaggcggcgccgagcggtcctcagagcccccgcgccctcgccgcctccgcgcctctcggctcagcgccccacgcgcaaggcggagcccccgcccgccgcgctcccggcccgccgccgccgccgccgccgcagccactgcccggtgctcggctccgcagccatcttccgagccccgcacagacgtcaggcggcaggcccggccccttcccacagccggaggggggttgcgcacagcgacgggggatcggggcggggagaggccgtgcgcgcctaggggcggcagacccgggcgcgcgccacgggggtcgctgtcatggcaacgcacccgctcccgcatggagggcgcgaagccgcattgtgagcgctggccctggagcccgcggccccgcggctgagagcgagcctcggtcccgctgaagctcccctgacttctgcctgctccctctcccgacgggacggaaagggccggggctcgggcatggggtcccctgcggtccgagcctgcccacggcgaagccggtgcagcctggccccgtgacccctctgaatccccgtccggccgtcgccgtgcagttgtcaagtttctgggaagattagtgggagcgcagccgcccgagcccgacggccggagggtcgcggccagtcccccttgccgggtcgccacgtcccacaaggtccttcccggccgctccgtgggaggcggggcgcaggttggagtaacagggacgggcttgagctggtacggaaccgggcaaggtgagagaagtgtcttccacgcgattcccaagcctcgctagggaatcgagggagaagaaaggttgctcagagtgataaagaacatgccgttgcaaacggaagagcaacgtgcccgaatctaggtgacaggaagggcttaggccttttcggcacgaatggagccttccagtcaacatgcttctacgtgatgcagctttatagcgcaaaaaaatgacaatgcaaggggtacaaacagccctgctagaccaacagcccgagcctcgacagtctacatccggcgccttcaagcccccaaccacacactgcgaagtgggaaaagttcccagcgcggcttggcgaacccgctaacacggcgctctcacgagctgctggaaaagaccttcgcgagagggcgcagggagtcccgctccctggagggcccgcccccttggaggggaccggaagcgcttgtcctggcccggaagcagtgctgactccgtacacgcgcgctgcggcatggcggcccaccgccccggcccgctcaagcagcagaataaagctcataaaggcggacggcatcggggtcggggatctgcacagcgggacggcaagggtaaggagataacgtagaaggaataagggctatttggccgttattaactctttttcctcatgcccagactgagcttctgtctcccgtctgggctccacgcgaaaggccctttctaaggtgggcggagaggagtcccttttcttgaccttgtggggccgatcacaccagccccttctaatctgccattcaggccgtctggcactgaaaaccctaagcaagaaggtgagaaaagaactcagcagagtcgaccagaggcatcgcgccagccagctccgaaagcagaagaaggaggcggtgagaggagcgggatttgggagaatgcggcttctctggtgttctaggtggctaatgcctcgaagtggaaaatgagaccgggaggagggtccagggacagagcatagccctagagcacgtgtcgagcgtgcaggtctagcattctttgctttggtcagaattcctgccaccccgctggcatacctgtggtcttttactagagagatgctggttttgggtagggggagcatctgtgggagtggaaatgcaatgctggagtgaagtactgagacactgagatgttctcggatatctttctattttcaggttctggcagagaagagacagctgggtggcaaggatggccctcctcatcaggtactggtggtgcccctgcacagcagaatttccctgccagaggccatgcagctgcttcaagatagggacactggaacagtacacttgaatgaattgggaaacacccagaactttatgctgctgtgcccccgcttgaaacatcggtggtttttcacctcagcaaggccaggttagagtatacaccaatattttgtattatgtttgagtagtggtattttttttttttttttttagaataatgtgctggtgccaaccacctcttcttactgtgtcttctatctgcaggggatctgcacgttgtgttagacatggctaaagtagctgataccatcctgttcctccttgatccactagaaggctgggacagcaccggtgattactgtctttcctgcctctttgctcagggccttccgacctatagtaagtgagttagcatttattgtgcacctttaatttgtcaggcactatgcctggtatttgatacaggaatacaactgatggatcatattcagctggtggtgggatgtacacatatggattaaacttgatccattgtttacagattatcactcagggtgtctttttgtttttggctgtcctttgcccagagaaacaaggatatgaagtttgatttcactgtgaaattccttcagggtagttcagtgttgggcttcccagtgatctctgggcttgcaactgagctattaggttgtttgtgaactgcagagggatttttatgtaatgaagcagtaggtcatgaagcgttttctctttcgcttacagcactagctgtccaggggatttctggcctcccactgaagaaacaaatagataccaggaagaagctaagtaaagcagtggagaagcgctttccgcatgacaaactcctcttgttagacactcaacaggaggcagggatgctgcttaggcagttggctaaccagaagcaacagcatcttgcttttcgagatcggcgggcctacctatttgcccatgctgttgattttgttcctagtgaagagaataacttggtgggcaccttgaaaatttcaggctatgttcgagggcagactctgaatgtcaataggttgctgcatatcgttggatatggtgatttccagatgaaacagatagatgcccccggagaccctttccctttaaatcctagaggaattaaaccccaaaaggacccagacatggcaatggaggtaagactgatattcttaattcatgttcatatgaaagttggcacaggaaggaaacttaaattcagagaagatagtctgtacacttaggtgaatgaggagactgctagtctgaagtaaggcaatagtcagttataaataggttgataaatcacatatttatccagcactttctaggtagtctgcactgtgattggctctgagtttatagaacacactcaagatgtggttgctttcctcaagggacttaattgggctggaacaaaatggcatgtgtgaaataaagattgagatagcatatggttagagtgcggaccagcagtggaagttgagaaagtagactagcaagcttcacataagagatcagacttgagctaggtgttgagaaggataaatgtgatttatgagttgaagagggataaaagaatatcctagaagataagagacagaatgaacctaggcacagtggtggatcaaagggtttatgtgaaccttgaagaaatcagcttgatgggagtgaggtacgtaataaatggataggagtgggagcagattaagaaagacctcaagagccaagcagagacttaaaataccctggaaattagaaaacagccattggaaaagttttgacaagttttagcattctgtcgcactcatcttatacatgaggactgatatttctgggtctttctggttactgtgttagatttaggagatttttggttcatggttgactatcacctgcttttggttttcagatttgtgctacggatgctgtagatgatatggaagaaggtcttaaagtcctaatgaaggcagaccctggtagacaggaatccttgcaagcagaggttatcccagatccaatggagggagagcaaacctggcccactgaggaggagctgagcgaggcaaagggtcagtattggtaaacttgtctgtaattcatctgacctggaattgtggattttctgtagctgttccaagtgagggccctataggatagagtggggtgggggtatagttgaaagtctctcctcaccctcaaatgctgtatgttttcaataaacaaacattatacacagtcttgttccatttctcaaaattacttgtgttaatgttttatcatgaacagataaacaactttggattcattgcagggcttatttagctgtgtaagtattgctagttgtgaggcagctgaattaaatttggaagtagttctatttacagtgtctgccagaatttcccatgttggcagcagtatctggtgccttgcctaggtgagaataaccagagggatagggaaaagaagtctgtaatttacttaatttgtttgggcttttacagatttcttgaaggaaagttctaaggtggtaaagaaggtccccaaaggaacatccagttaccaagctgaatggattttggatggtggcagccaaagtggtggggaaggagatgaatatgaatatgatgatatggaacatgaggattttatggaggaggaatctcaggtaaggaaatgaggccttaggccaattctgtgtctagctccaaatgtaaggcaaagtgcaggtgtgatcttgatgggtgtgtgtggttagtttcttttttttattttttttattttttttttatgagacggagtcttgctctgttgctcaggctggagtgcagtggtgcgatctgggctcactgcaagctctccctcctgggttcacgccattctcctgcctcagcctcctgagtagctgggactacaggcgcccaccaccatgcctggctaatttttttgtatttttagtagagacggggtttcactgtgttagccaggatggtctcaatctcctgacctcatgatccgcctgccttggcctcccaaagtgctgggattacaggcgtgagccaccgcacccggccgtgtatggttagtttcttaggaatgactctgtagttgccaggaatgaggcttttgttttatactttagactgtattagaatttatgttggttgggaatagggatctagtacaattattttactcttagcttattggcctttggggtagagacaggtgtggatttcttctgaaaaaactgtaatcctattctacaggatgagagtagtgaagaagaggaagaatatgaaactatgactattggggagtctgtgcatgatgatctgtatgataagaaagtagatgaagaagctgaggcaaaaatgttggagaaatataaacaagaaagactggaagagatgtttccagatgaagtggacacgccccgtgatgtggctgctcgaattcggttagtcaacaagtctatcaacaaatctaaattcagtcaatacgtttttaaaaacttggctcagagctgtgtcactgtgatgcaaaagaagaaaaacacattttttctgctcctgaagagctaacatttaatatgggaaggcaggacatacatacgggaaatggtcatatgtaattaagttctagactgtggtgcagactcacgttacaggacttgaatgaaggggaaatactaaggttaattagcaaatacttcttcccaaaggagccagtactcaattgaagtatataatgtttggaaattttagggggtttgggtagaatagcagaagtagaagagtgaagaagtagatgattatatctgttctggaggtgagtgactaaagccagtgaattaattttggatattaggaggtaaggctatgtattaggccattctcgcatggctataaagaagtaccagagactgcataatttataaagaaaagagatttaattgggtcatggtcctgcagactgtacaggaagcatggtgttggcatctgctcagcttctgggggtgtcctcaagaaacttacaatcatggcagaaggtggagggggagcaagtcatgtcacacggccagcgcagtaacgagagcaaggcaggaggtgctacacactttaaacaactagatctcatgagaactcactcaacaaggagggtggtgctaacccactcatgagaaaacctctcccctaatgcagtcacctcccaccaggctccacctccaacactggggattgtatttcagtatgagattggggcagggagacacatctgaactgtatcaggccattaccaagcatcttttttgtcagtgagaagcttgggtttggttccgatagaacttgttataagctgttcggagtgtcgtcttggtttaagctgttgggttgtttggagagaggatgattggagttcttttcagctagctccttagccattttagcagtgacttgagtctatatagcaccatataaatctgacttaatgtctttaaaaatcttcaatattctagatttcagaaatacagaggccttaagagcttccggacatctccatgggatcctaaggaaaaccttcctcaagattatgctcgaatatttcagtttcagaactttactaacactaggaaaagcatctttaaagaggttgaagaaaaagaggttgaaggagctgaggtatctatcctccttgttcatcttgtatgttgctttcatttgtcaacatgctccctactttattccttctcttggcatgaaaatatgctgcatttggggattaggggagcccctgagtcattgattagaatgatactgggaacaaagaggtatcagctatgttaaatgaaaaagtgtgatctgggtaaatgaagcatcttgaaggatgagggttggctttaaaaattttatctgagagactcaacatatttggagaaagcttcctcgctattgggactttgaaaggtaactccatgattgctttctgctttcttgtggcaggttggctggtatgtcacacttcatgtctctgaagtccccgtctcagtggtcgagtgcttcaggcaaggaacacccttgattgcattttctttactacctcatgaacagaaggtaaattgctgtcttgtgggaaaatggggggttgtgaaactttccagctgcttctgacagtctaaaattctgtttatgtgtgactaaaattttgctcattgggatgcaaaaagtctgcctttatgattaggaattggagaataatagagaagtcaatgatggttttattcatatcgtctgaacctgtctgaagcatctcagtgatgcaatctctgtgtggttctgagacttctccaagtatgtttttcagaccagattttgaataagggttggcagccttaaaaataaaggtttggctgggcgcggcggctcacgcctgtaatcccagcactttttgggaggccaaggtgggtggatcacctgaggtcgggagttcgagaccagcctgaccaacatggaggaaccctgtctctaccaaaaatacaaaattagccaggcgtggtggcacatgcctgtaatcccagctacttgggaggctgaggcagaagaattgcttgaacccagtaggcggaggttgtggtgagccaagattgcaccattgcactccagcctgggcaacaagagcgaaactcttatgtcaaaaaaaaaaaaagtttatgccaaagtgcagatctcttttctcttggtggccagtagttgtgtatgttgtggggtatgtgatagttctttgatcggttttggtaagggctcaagaagaaggggcttgaatgagtgtggttttgagattgtggtgagtgaatgccttgaaggccactgatttttgtgtggcagatgttgagctcttttctgttaggtgcaggaaggtaggttagcattgaagggtgcatgaaagctctgatcagcctgtgtttggcttaaatgccagtcattggtggaggtaaaggatgaacccgtgtttcagcatctacactccaccattaattagcattgtcagttcttagaatgagtctgaatctgctagtttggtttgccttctttcagtttaggcaattgtattcctagactatgaagatttttgtttttcttacttggtccccagatgtcagtattgaatatggtggtgaggcgtgaccctggcaacactgaacctgtgaaagccaaggaagagctcatatttcactgtggattcaggcgcttccgagcctcacctttattctctcagcacactgcaggttagcaatggggaagctgggttcttgtccatcttgtcttttgggaaagtgacttgtggtggaggggtgccaaaatatatggtttcaaaatcttacatctctgggttagaggtattttcagtactctggcttaagagccaatgatgtttttattcaaaatgtctgaacctgtctgaagcatcccagtgatgcaacttctgtgtgatactgaggcttttttgccatgagtatttgttccatagcaggttttgaatagaagttggcagctttataaaaagggtattagggtgggtgcagtggtgcagtggttcacacctgtaatcccaacacttgtggcattagaacggggaattgaagaccaaaaaaggtaagatttaatcttgtttttgtttctgttttttttttttttttttttttttttttgagacggagtctcactctgtcgcccaggctggagtgcagtggcgcgatctaggctcactgcaagctccgcctctcaggtttacttacaccattttcctgcctcagcctcccaagtagctgggactacaggcgcccgccaccatgcccagctaattttttgtatttttagtagagacggggtttcaccgtgttagccaggatggtctctatctcctgacctcgtgagccgcccgcctcagcctcccaaagtgctgggattacaggtgtgagccaccgcgccccctcttgttttttttgtttttttttgtttgtttgtttgtttgtttttttggagacggagtcttactccgttgcccaggctggagtgcaatagcgtgatctcggctcactgcaacctccgcctcccgggttcaagcaattctcctgcctcagcctcccgagtagagtagttgggactacaggcatgcacgaccatgcccagctaatttttgtatttttagtagagatggggtttcaccatgttggggtttagtagagatggggtttcaccaagaccaggagttcaggctggttttgaactcctggtctcaggtgatccgcccacctcggtctcccaaagtgctgggattacagacatgagccaatgtgcctggcctcttttttttttttttttttttgagaccgagtctcactctgatgctcaactggagtgcaatggtgcaatccaggctcactgcaacctctgccttccaggttcaatcagttttcctgcctcagcttcccgagtagctgagattacaggcacccgccaccacgcctagctaatttttgtatttttagtagagacggggtttcaccatgctggccaggctggtctcgaccttaggcgatcctcctgccttggccttccaaagtgctgggattacaggcgtgagccactgcgcctggccagtcattcttttattgtttcaaaatggttttgatttttttttttaggatgaactattttcatattttatacagttgggaaaataaggaataatgtaaaagtaaaattaccttatattagagaaaattcatttttattttatacattttcatccagatctcattttttttctttacacaatttggattgtaattgtaaatatggtgttaaacattgcatttatcacttaattgattttgatcaattttccataagattaattagttaatgagacttttaatgctttattgtcatttggatatattccagtgtatgtgatgtactgatacttatttgagcttctacgggtgagcacttaggctatttctaatgttttgctctaaactagatctgtatgcataaaactttatttacttctttgcttattttgtaaaggcagatccttagaactggaactaaataaaagtctcagttgcagagactgaggcaggaggatcgcttgaggtcaggagtgtgagactccggtctctacaatttttttttttttttttttgatatagagtccaactctgtcaccaaggctggagtgcagtaacatgatctcagctcattgcagcctccccgtcccaggttcaagtgattctggcgcctcagcctcccaagtagctcggaccataggtgtctgccaccacgcccagctactttttgtatttttagtagagatggggtttcaccaagttggccagtctgttctcaaactcttgacctcaggtgatccacgtgccttggcctcccaaagtgctgggatttatagggatgagccaacatgcccggcctctacgaaaaaaaaatttttttttttgggagatggagtttcactcttgttgcccaggctggagtgcagtggcaggatcttggctcactgcaacctctgcctcctaggttcaagtgattctcctgcctcagcctcccaagcagctgggattacaggcgtgtaccaccatgcctagctaatttttctattattagtagagatagagtttcaccatcttggccaggctggtctcaaactcccgacctcaggtgatccacccgcattggcctcccaaagtgctgggattacaggcatgagccactgcgcccggccaaaaatttttctttttaattagccaggtgtggtggcatgtgctttgcagtcccagctacttgggaggctgaggcaagagggattgcctgagccagtgggcccaggagtttgaggctccagtgagctgtgttcacaccacagcccttaaaatattttattttcctataagtttagtatttttaaaaggggggtgagggctacattgaaggtagaacaccaaatacagtctagcctagatagcagagtgagacactgtctctcagaatttaaaagggtgtgataaagtgtggaaactttgatgtctagtgtgccaagggcagtgtgggtgaaggaatggaggctgggtatggctcatagttgggtaaagcagaggtaggggtcctgagatactgagagactactggacgggacttgcagcagaaatgattgtctcctacacagtaggagcaggaagatatgttgcccactaacttgggggcttctgaacatcgtcctagttcactcactctcagcagtggcaggaggaatatgaagaaagcagtattaatggtgttttggataatttttattctcaccaattgtgagaatcacaatctctaagtgagattaatttttctttgccttaaaatattttattttcctttaagtttagtattttaaaaaggaggtgagggctaccttgaaggtagaacatcaaatacagtctaggctccaagattctgactccagataaaaaagttactgatcaggcacctgcaattccagctattcgggagcctgaggcagaagaatcacttgaacctgggaggtggaggttgcagtgagcagagatggcaccattgtactccagcctgggcaacaagagcgagacaccatctcaaaataaataaataaataaaaagttactgatacagcctggcgcggtggctcacgcctgtaatcccagcactttgggagattgaggtgggtggatcacaaggtgaggagttcgagaccagcctggccaacatggtgaaacccggtctctactaaaaatacaaaaattagccgggcgtggtggcatgtgcctgtaatcccagctactcaggaggctgaggcaggagaactgcttgaacccgggaggcagaggttgcagtcagctgagatcacaccattgcattccagcctgggtgacaggaacgatactcaaactcaaaaaaaaagaaaaaaaaaaagttactgataggactagatcgtatcttttaggtgcattgaggcagcgaaaatttttgagaactggtggtttagagaagtagaagctgccataggtttaagagttgcactaatacagcttttcacaggcctctatcacctctggtttctcaaaatggttttgcttttcattttttaacccttatggcagcggacaaacataaattgcagagattcctgactgctgacatggccctggtggcgacagtctatgcgccaatcacttttcctcctgcatctgtgctgcttttcaagcaaaaaagcaatggtaagttgagccacagagatgaacagaccctgcaggtccttaatagatgaacaccgttttctcttgtttatttaaatttgggagccaaatggtatggagaaggtaatgatggttttcaaaatacagtaagtcttcatttaacattgttaatagaacaatgaaaactccaacttttacgtgaaacagtgtatagccagtcctcaaataactgccttttgttcaacatcctttccttgtaacaactgatgagaaaaagtatggttttgttatacatcatttctcttgaagtacaagttttcaagaacctattgacaaggttaagtgtgggcttacagtttaccaatcttagcctcagattgggctagggcagggatgacaaaccaggctcttgcatgggtctttaaatggactgggcaataaatgaagactttggcctgtaaattcctaaatagcttctttgcttttgtcctttaggaatgcacagcctcattgctacaggccatcttatgtcagtagatccagacagaatggtcatcaagagagttgttctgagtggtcatcctttcaaaatttttactaagatggcagtagtacgttacatgttcttcaacagaggtgggtatgaaggaggaggatgggatctgattgcctttgtggtataaaggttgggtttacattttgtgggtaaatgtttcatcttggtctttaatgtgtttgattctaagaggatgtgctgtggtttaaaccagtggaactgagaacgaagtggggccggagaggacatatcaaggaacctttaggtaaggaaacacgggatttgagaccatgtctgcatttctgcagtgttgctaaatgactgttgggttggaagtcattgctttaaaattttctacttttaatttgaccgacttgttctgatgtctttctaggtacccatggccacatgaaatgcagctttgatgggaagctaaaatctcaagacacagtactgatgaacctgtataaacgagtcttccccaaatggacttatgatccatatgtaccagaaccagtaccctggctgaaaagtgagatttcttcaacagtgcctcaagggggcatggagtaatggattcaaagagattctgtcttaccggtgccagtcagtactccagggatgggaggcacaagttgtgattgggcaaagtttattttctatgtcagcctgtcagtccactgccccattttgcaagacttttttttagccttgacaaaatgtctcagttaagtataaaagtttttccactacttagtccaaaaaaaactattaaatcttaatgaaatagccactctccattaagaatctgataactaagagttgacaatactaggaaacaaaatgtcttcagtatctaaagacactgaattcccaccatttccttttctgtaaattaaacagaaacagactgataagaagctggcctttcagcctgcttcacccaagttatggaggaggttaagtctacatttccaccactgagcacaatacaaatgttctttacttctggggaaacagtttgaaaatgttgagacagcacagcagccactccaacaccagctgtaggttcaatgagtagtttcatcctctcccacaccagctgggttgcacactgttgatatggaagggagtaggaattagtgaaaggggagtctagttggtttacctataaagttcagatgagaatacgtgtccagtttgaattttcttatcactgtgtacacacgcttcccaaagcttttctttaattctgactctgcttctgtcaagagggttgtcattaatacatctagggtaccctcccatgtcatgaagttacctagtcaggttcccgtgggtcacttgctactcctaagggaagtttcttctgcctaagaagttacaccatgctttgctatttcttttcttgctggagcctcaccttaatttcatcctctgtgacagtgaagatatcatccacaaggtccctgataataggccaggtgttcaagccaatgctggatttgacaccatctgctatggtttctggaggataaagattgggcatcagtttccccttcagcttggactggtagcagtcatctgcatttgagggttcagcagcatataccttcacactaggtttcagagcctgggaagaggaatattaagacatcttaacaacaaaccacaacattgcctgcatgtctaaaagaaaatatgggcctggtgtggtggctcacacctgtaatcccaacactttgggagcccgaggcgggtggatcagctgaggtcaggagttcaagaccagcctggccaacctggtgaaatgcagtgtcaactaaaaataggaaaatcagccaggcgtggtggcagacccctgtaatcccagctactcaagaggctgaggtaggagaatcacttgaacttgggaggggtaggttgcagtgagctgagatcacaccaaaatggggtggggcgcagtggctcacgcctgtaatcccagcactttgggaggccgaggtgggcggatcacgaggtagggagatcaagaccatcctggctaacacggtgaaaccccgtctctactaaaaatacaaaaaaaaaaacaaaaaaaaactagccaggcatggtggcaggcacctgtagtcccagctactcgggaggcagaggcaggagaatggcgtgaacctgggaggtggagcttgcagtgagccaagatcgtgccactgcactccagcctgggtgacagagtgagactccgtctcaaaaaaaaaaagaaaataggcacaataagtaatacatttctgcccaagtaagagccttcccttttgtggatgtaatgaaaatatcttcaagcactttataaataaattatatgtctgatactagccttccattgcctggatcacatctgattgtcctggtaatttgagaaaagggtagccccttggtatggatagtagcttgatgacatggaattcagggaaaagactatgatggtgtcacttgtaactgcttttgtgctgtaaaattgtcatggattaagaagagagttggctgggtgcggtggctcacacctgtaatcctagcactttgggaggccaaagtaaggactgcttgagcccaggagttccagaccaacctggccaacacagcaagaccccatctcttaaaaaaaataaaaatattagaaataataaataggccgggcgcagtggctcacgcctgtaatcccaacactttgggaggccaaggcgggtggatcgcaaggtcaggagttcaagaccagcctgaccaacatggtgaaaccctgtctctactaaaaaaaatacaaaaaaattagcggggtgtggtggctcatgcctgtaatcccagctactcaggaggctgagacaggagaatcgcttgaacccgggaggtggaggctgcagtgggccaggatcgtgccactgcactccagcctgggcaacagcgagaatctgtctcaaaaaataataataatagtaaatagagtagtgaggcagagatgggccttcatctcaagtcccaaaggaataaggggaaggaatggtaatgtgtgcagaatgttgagcacgtgtatacagaacatttaggatgtaaagtaaatcctctgcttgaagcagggaatcctccagaagctgctcaccttaactgtaattgctattccagcaagcattcctcctccacctacaggtaccaccagtgcatccaccaaaggaacctttagtgaaaatataaactgtaagcagttttatatttaatgtatacatataaaataattgaatatagcccaacagctttaccagtagctaaacaggaagaactcagctattttacctggttcagcacttccagggcaattgtcccttgtccagctatcactgcaggctcctggttgggatgtaccatgatgccttctgtttcttctgtaactctttttgcaacattttctctggactgaaagtacattaatttagcttaattgatttgtatttaatagagtccccaacaagttccatttggtcattcagcattttattgaccatctacttttttcacactttgttcaggtactagagatatatatgttaataaaatatccctgccctcaagcacgttatattgtatggtagagatggatgaagtaaatatatggtatgtctaagtgcaatggagtaaaatgaaggaatttatttcatatagggtagccaagaagagcctctagtaaagtgacattttaaaagatctgaacaagtgctgtggatgtctagaatattccagagagggggtaacagtgcaaagactacaaagtaggagtgcttggcctttctgaggaacagctaaaaaggttagtatggctggcacagagtgggcaagagaaataatagaagatgaggtcaaggctgggtgcagtggctgacacctataatcccagcactctgggaggccaaggtgggcagatcacttcaggtcaggagttcaagaccagccttgccaacacggcaaaaccccgtctctactaaaaatacaaaaattagccagatgtggtggcacgcgcctgtaatcccagctactctggtggctgaggcatgagaatctcttgaacccaggaagcggaggctgcagggagctgagaagaaactaccgcactccagcctgggttggacagagtgagaccctgtctcaaaataaataaaaagaagatgagggaccaggcacggtggctcacacttgtaatcccagcactttgggaggccaaggcgggcagatcacgaggtcaggagttcgagaccagcctggccaatatggtgaaaccctgtctgtactaaagaatcaaaaattagctgggcatggtggcacgcgcctgtagtcccagctactcgggaggctgaggcagaagaatcgcttgaacccaggaggcggaggttgcagtgagccgagattgtgccgctgcactccagcctgggagacggggagattctgtctaaaaaaaaaaaaaaaaaaaaaaaaagatgagagatgaggtcagaaagataggaatgtttgagtttatccagggattagatgattgcaagaactctcgtttccaccgtgtatgagatgggaaaccaacagaggatttagacttgaaaagagacaagttctggccaggcgtggtggctcacgcctgtaatcccagcactttgggaggccgaggtgggtggatcacgaggtcaggagatcgagaccatcctggctaacacagtgaaaccccgtctctactaaaaatagaaaaaattagctgggcatggtggcaggcgcctgtagtcccagctactcgggaggctgaggcaagagaatcgctggaacccaggaggcggggcttgcagtgagccaagatggcaccactgcactccagcttgggcgacagagcaagactccgcctcaaaaaaaaaaaaaaaagaagagacaagttctgactttattaaatggagacctctggttgctcaaaaaagcctgtagtgtggcaagggtggatgcagagagaccagtttggctactgaattgaatataggtgagaattgatgttggtttgaatcagagtgctaacggtagacacagaagcagttgggttatggaaatatgttgaaagcagactgagatttggatgtggggtatgagagggttatcagagaggattcctggctgtgtgcagtgggtcatgcctgtgatcccagcattttgggaggccaaggtgggaggactgcttgaatccaggagtttgagaccagcctgggcaacagtgagaccctgtctacaaaaaataaaggaattaggtgtggtggcatgcacctgtagtcctagctactcaacaggctgaggcagaaggatcccacaacatagaaagagtccatctttaacaacaacaacaaaaaattttcaaaaaaagatgactccaacttttttttgagtaactagaagaataaaaattgccatttactaagatgaggaagactggaagggaagcaatatagggaagtaagatcaggagtttggttttagctgtagtttgagatgccttttaagacatcaagtgggaaagttaggtagctgttatataaaagttggctgttaaagggagagaagttggagttggtgttgttagaccataggtaataatttaagaaatgagactaatgagatcttgtgagtgtagatagagaaaaggttgagcatgctaacagaaataaaggggaaaccacaaaggaggctgagaaggagcagccagtaaggtagaaagagccattggtcaaatgaaagctgttaaggtggtaccaagcactgctctccttacctcatcactaggttcacagtatacaattgacgctccgtaggcttgtattgcaagttttttacagtctggagctgtctggggcaccacaatataagcaggaattcctgggagaggaaaacgagaggaaaaagtcaggagaatttagaatagaaacttatgtggccaggcacggtgggtcacacctgtaatcccagcactttgggaggctgaggcaggcggatcacaaggtcaggaaattgagaccatcctggctaacacggtgaaaccctgtctttactaaaaatacaaaaaaaaaaaaaaaaaaaaaaaatagccaggcatggtggcaggctcctgtagtcccaggctgaggcaggacaatggtgtgaacccgggaggtggagcttgcagtgagccgagatcctgccactgcattccagcctgggcgacagtgcaagactccgtctcaaaaaaaaaaaaaaaaaagaaagaaacatgttcagccaggtgtggtggctcacgcctgtaatcctaggactttgggaggccaaggcgggtggattgcttgagcccaggagttcgagaccagcctgggcaacatggtgaaattagtattttgtatttgtaaaatagaaaaaattagccaggcgtggtggtgcgcacctgtagtcccagctactcaggaggctgaggcaggagaatcgcttgaacccggcaggtggaggttacagtgagccgagatcgcgtcaccgctctccagcctgggtgacagcaagattctgtcttcaaaaaaacaaaacaaacaaaaaaaaaacttatgttcatattgcttgcaatcagatagagatttctttggaaagttacttcccacagctatcatcactctcactgaaattaagggcacttttccactcctttctgaagatctacccagtaccttgagaaatcaagtaccttccaatttggcagcataggtgagagcctggccatggtttccactgctgtgagtaacaacagctttcggcttcctttctaaagcatcaggaaccaagcttctgacggcattgagagcaccacgaatctgaaaaagagggatggtgaattcacatatttgattaaaacattgttttggaaagcaaggagcttttctagattttctatccttaacatgcacatccaatctgtcaccaaatcttatcgatttacctcttaaatatctcatgtgcatctttattttttatttttttgagatggagtctccgttatcccggctggagtgcagtgccacgatctcggcttactgcaacgtccgcctccccacactgcgtctacccccagggccgggttcaagtgattttcctgcctcagcctcccaagtagctgggattataggcacctgccaccatgcccggctaaattttttttttttttttttttagacctagtctcgctctgttgtagcccgggctgcagtgcagtggcgcgatctcggctcactgcaagctccgcctcccgggttcacgccattctcctgcctcagcttctcgagtagccgggtctgcaggcgcccgccaccacgcccggctaatttttttgtatttttagtagcgacggggtttccccgtgttagccaggatggtctcgatcttttgacctcgttatccgcctgcctcagcctcccaaagtgctgggattacaggcgtgagccaccgcacccggccttttttttttttttttccccgagatggagtcttcctctatcacccatggtggagtgcaatggcgtgatctcaactcactgcaacctctgccttctgggttcaagcaattctcctgcctcagcctcccaagcagctgggattacaggtgcctggcaccaagtcccgctcattttgtatttttagtagaaagtgtttcaccaaggctgggtgcggtgactcatgccagtaatcccagcactttgggaggcagaggcgggcggatcacaaggtcagatcaagaacatcctggctaacacggtgaaaccctgtctctactaaaaattcaaaaaaaaaaaaaaaaaaattagctgggcgtggtggcaggcgcctgtagtcccaggtaatcgggtggctgaggcaggagaatggcgtgaacctgggaggtggagcttacagtgagccgagatcgtgccactgcactccagcctgggggacagagtgagactccgtctcaaaacaaaacaaaacaaaacaaaaaagcgtttcatcatgttggtcaggctggtgtcgaactcctgacctcaggtgatccacctgcctcagcctcccaaagtgctgggattacaagtgtgaaccactgcgcctgtcatatatttgtattttttgtagacagagttttgccgtgtggcccaggcttagatcttttatattgataatgtatccatgtgtagcaagttgatacagtgaatgcttaaacttgggtcatatacagagtgataacactttccaatttgcctgcaacagttcaggtgtctgtttagatatttcaggttgcttctttcagtcccaaacatgtcctagtttggataataaattatgtcttagtttggacagtaagtgatggtatatataataaagtcatgctttgcttaaggatggggatatgtttcgagaaatgcatgatttggcaatttcatcatcttgcatgcaccatagagtgtacttatacaaatccagctgttacagcctattactcctaggctgcaaaccctgtatagcatgttactgtactgaatactgtaggcagctataacacaatgagaagtatttctgtatctaaacacagaaatcgtacagtaaatgtgtggtataaccttatgggaccaaggaccaccatcatataggtggtctgtcattgactgaaacgttatgtggcatatgactgtattttatgtatatattatatatatgcacatacatatatataaaaattactcggataagttatatatattatcctaattataaggatttatgactgtgtaaaagttgcttatcaacactatgatgctaggtaaaacaaggacttgaaaggaaaatttctgtaaccttttttccagctgtataaaggcattaatttacttctgcctatctcattgggtggtcaggagaatcaaactgatatgtgaaagggtgtgaaaacatacatgatacactgagaaaaaggattgttaccttaaaagatcctgttttctggaagagttcacatttgaagaaaagattgcgccctgttagttgattcaaaatggagcttgttagcactggtgtgaggtggatagaatctcgaatgttgatatgagctttttcaacatcagcaaaggagatgcaatactgagcacacatggttctgaaacccaggaataagaaaggggtcaaagcaaagtctgagacagtatgtttattgaagagattttgaaaatacgtaacagaatagacctggggcctgtggtgtcatgtggaaattctccattattggagtgtcagaatttccctaaaagagagttgacttaaaagctgaacgaagtttttctggtgaagctttgagggaagtaactgatggtgattacagaaggctaaagcccactccccacccacaccacccatctcttggcactgttggcactgccactggtctccatcttcctttttttttttttttttttgagacggagtctcgctctgtagcccaggctggagtgcagtggcacaatctcggctcactgcaacctccgcctcccgggtcaagcaattctcctgcctcagcctcccgagtagctgggattacaggaatgtgccatcgtgcccagctaatttttatatttttagtagacacggggtttcaccatgttgtccaggctggtcttgaacttctgacctcgtgatccgcctgcctcggcctcccaaagtgctgggattacaggtgtaagccaccgtgcccagctccacctttcttttaatcatcgttgtgaagctacttgaatgaattggattcaatttttatattatttttaatttataaatttaaatttttaatttttaataaaaatttaacaaattatttgataaagaaaaaatagctagactattccatttaaataactatgttcattttctttatttccctctgcattttctttttttttgttttttgagatggtgtttcactcctgttgtcccggctggagtgcactggtgcagtcctggctcaccacaacctccacatcccaggttcaagcgattctcctgcttcagcctcccgagtagctgagattacaggcatgcaccaccatgcccagctaatttttttttttttttttttttgagacagagtctcgctctgtcacccaggctggagtgcagtggcgcgatctcggctcactgcaagctccgcctcccgggttcacgccattctcctgcctcagcctccctggtagctgggactacaggcacctgccaccatgcctggctaattttttgtatttttagtaaagacggggtttcaccgtgttagccaggatagtctcaatctcctgacctcgtgatccgcctgcctcggcctcccaaagtgctgggattacaggcgtgagccaccaaacccggccaattttgtatttttaatagagacggggtttctccatgttgtgcaggctggtctcgaactcccgacctcaggtgatccgcctgcctcagactcccaaagtgctgggattataggcgtgagtcactgcgcccggctccttctgcattctcaatatacattatgtaacagttaaagcaaacattttatttgctcctacatttgactcagtttctttacaattttcataattttcaataactacattaagcttccactttccactgtgtctattgtagcagttaaatatgaagtttctctatttttccttattacaaaagaatctatattcattagaaaactgagttaatctgaaaatacagagatacaaaaagaacatgaaaatagccacgaaaccttcctacctaaagacagttgctatccagtggtttacctttccaggcccaactacatatgcagacaaaactctttggtaggtttggtaacttctttttttgtcagacagtattatgaatatcaatgaatctcataggtgagtacatttatcaacattttttttttgttgtttttttgagatggagtttcactgtcacccagactgaagtgcagtggcatgactgtggctcactgcaacctctgcctcctgggttcaagcaattctcctgcctcaacctcctgagttgctggcattacaggcgcccaccaccacacccagctaatttttatatttttcgtagaggcggggtttcaccatgttggccaggctggtcttgaactcctgatcttaggtgatccgcccgcctcggcctcccaaagtgctggtattacaggcgtgagccaccacgcccggcccatttatccaactttttttttttttttgagagagtcttgctctgccgccaggctggagtgcggtggcgccatctcagctcactgcaacctctgcctcccaggttcaagcgattctcctgccctagcctccctagtagctgggattacaggcgcctgccaccacacccagctaatttttttatttttagtggagacagggtttcaccatgttggccaggctagtctcgaactcctgacttcaggcaatccacctggctcagcctcccaaagtgctgggattacaggcgtgagccactgcgcccggctttatccaacttttaaaatgacttaatagtacttcttttacaaaaatacaataatttagctgggggcagtgacacacactggtagtcccggctacttgggaggctaaggcgggaggcttgcttgagcccgggagtgtgttattatcacgtctatgaatagccactgtactgtggcctgggcaacgtaagcaggaccctatctcttgaaaaagaaaaaataataattttaagtttacatagctcaaatgaacatttggatttccttttgttgttgttggctgtaagaatgatgtaatgaatagccttgttgcaagatttttgtgtacctccgtcagtccttagggtagatttcaccaaatggtattttgtatcaaaaggcatacatatttctaagaaatctgatacccactgccaaactgatctccagaagggtcctatattacatcaatttgtactcccaacaacagttttgatggaatgatgcctcttttccttcatccgtcctatatcatttttatgtcaatttagttatgtctagtagttgttgtttctttgagacggagtcttgctctgttgcccaggctggagtgcagtggtgggatcttggctcactgcaacctccacctcccaggttcaagtgattctcctgcctcagcctcccgagtagctgggactaccggtgtgtgccaccacgccaggctaattttttgtatttttagtagagacagggtttcactgtgttagccaggatggtctcgatctcctgacttcgtgatccacctgcctcagactcccaaagtgctgagattacaggtgtgagccactgtgcctggcaatgtctagtagttttaatttacattaattactagtgattgaacatttttttgtgtatcttggccacttgttcttttctcagtcttttttttttttttttagataaggtctcactctgttgtccaggctggtgtacagtggctcaattatggctccctgcagcttcaaactcttgagctcaagtgatcttcccgcctcagcctcccaagtacctgggactatgactgtgcaccaccatacccagctaattttttaaatttttattttagtagagaggaagtcttgctgtgttgcccaggctggtctcaaacccctgagctcaagtgatccttccgccttggccttccaaagtgctgggattacaggcatgaggcaccacacccagccttcttaacacaccatttactgacagaatccttttcctctgaaatgctctatttatcaaaaattaaatttctatgaatggttggggctattgtattttgttccattggccagactgccaatgtcttttcctattatatactgtattaataaattctcccttgattgctctaaaattcattggcttttctcacatatcaattctttcaggtgaactagaattactttatcaaagttgccagaaattccattgtaaagatgtataaatgaattggaggcattatttatttactgagacggggtctcttgtcgtccaggctggagtgcattggcatgatctcagctcactgcaacctctgcctcccaggctcaggcaatcctctcacctcagcctcctgagtagctgggaccacaggtgcactgtgccaccacaaatacaaaaaacgtctgtattttttgtagagacaaggttttgccatgttgcccaggctggtcttgaccttctgagctcaagtgatccacccaccttggcctcccaaagtgctgggattacaggcgtgagccaccatgacgggcccgaaaactcaatattttttaatgtcaattatgccccctcggctgggcacagtggcaggaggattgcttaaacccaggagttcaaggctgcagtgagttattgtaccactgcaagagcaagaccctgtctcttaaaaacaaaaaaacaagagaacaaaaaatagttggctgggcgtggtggctcttgcctgtaatcccagcacttttggaggccaaagcaagtggatcacttgagatcaggagttcaggagtttgagaccagactgactaacatagtaaaatcccgtctccattaaaaaaacaaaaattggccgggcgtggtgggtcacgcctgtaatcccagcactttgggaggctgaggtgggaagatcacaaggtcaggagatcgagaccatcctggctaacatggtgaaaccctgtctctactaaaaatacaaaaaattagccgggcatggtggcgggcacctgtagtcccagctactcgggaggctgaggcaggagaatggcatgaacccgggaggcggagtttgcagtgagccaagatcatgccactgcactccagcctgggtgacagagcaagactctgtctcaaacaaacaaacaaaaaaattagccaggagtagtggcatttgcctgtagtcccagctactagggaggctgaggcagaaaaatcgcttgaacctggaaggcaaaggttgcagtaagccgagaatgttccactgcactccagcctgggcgacagagtgagactctgtctcaaaaaaaaaacaacaaccaaaaatcccaaaaaaccatgccaggcctgaagtctcaatatttttatgaataaatgtcaattatgcccccttggcaggatgcagtggctcatacctgtaatcccagcactttaggtgggcggactgcttgagctcaggaatttaagaccagcctgggcaacacgttgaaaccctatctctaccaaaaatacaaaaattagccgtgcaggtggcaggcgcctgtagtggtaattctacagtaaacagtatggtgcttcctcaaaaaattgaacatagaatcatcctatgatctaccgattccattcctacatgtagaccctgtctctcaacaacaaaacccagaatacaaaaaacccactatcaaaaataagatatattttggaggttgtaaacagttagtcctcttagttgcaagtgatagaacctcaatttgtactaccttagtaggcacaaggtgttgagatttactagctcatggaatccatgaagaaatgaacaaaccatggtaaggggaggaatatggagcttcaggaactactggaaccagagatttgacagcttcccagactcttagtctctcacctctgctgctttctgcacgtcggcttctttttcacacaggcgagttggttccatatggaaccaactgacacgtggctgctgacagctcgtatgttttacattttatggcttccacactgaaggggaattttctttctcagtttcagttaaaaaaattctgggtaaggactctggcccatcttggcccaggaccagtggccagggtatgaggtcactgaagataacagtgtgcaatagtcagaagtatttacataaacatgaaaaagaaacagaatgagatctgtaacacagtatcaattaggtacatttaaaacacatacatacataaaacattacatattattcaaagatacatgtatattcaaagacatatatcaaacacattagagtgaatacctaaggagggaggaaaggaacattagtgggaactggaatgaagagaaaagataaaatgagaaagggcttgttaatgacagtgtgaataaacgagtatgactggctcaattctctgcacctgaggggaaaatagcaaaataaaggagtgacacaggaaagaaaacaaagaaaagaaaaaagtacttttgagtgggagtaaggggcattttccaagtgaaaataaaggggagaatgctggggagatgattccatacatgttcattataggaacagaagagacatatcctgatagtggattgaatgggggagagaagtgtgaagaataaatcctgggccaggcctggtggctcacacctgtaatcccaacactttggaaggccaaggtgggaagattgccagaggcaaggagtttgagaccagcctgggcaacacagggaaaccctgcctctacaaattattattattattattattttgagatggagtttcgctcttgttgcccaggctggagtgcaatggggcaatctcagctcactgcaacctccgcctcccggattcaagcgattctcctgcctcagcctcccaagtagctgggattacaggcatgtagcaccacacctggctaatgttttgtatttagtagggacagggtttcaccatgttggtcaggctggtctcgaactcctgacctcagatgatccacctgcctcagcctcccaaagtgctgggattacaggtatgagccaccacacccggccaatatttttatttttttgagatggagtctcactctgtcaccaggctggagtgcagtggtgcgatcttggctcactgcaacctctgcctcttgggttcaagtgattctcctacctcagcctcccaagtagctgagattacaggagcgtgccaccatgcccagctaattggccaggatagtcttgatctcttgaccttgtgatccacccacctcggcctcccaaagtactgggattacaggtgtgagccaccgtgcccagccaaaaatttttctttaaaaagagtaactcctgggttttgacttaaatggtggtacaatttgttgagatttaaaacaggagaagaaataagtatttgacaggaaaatcagatttgattagctaagtttgaattgtttatgaaacatccaagaggatgtcccttttttaaaaattattttttgccagaaatgtgtgtatattagtatctgctttatttctgaagaatgagcttttcaatctatttaaagtacagctctttttcccttatttctgattgtttactctgccattttcctttaattgtcttctatatttgttgaatgcttagcttactaattttcactttaaaaagaaagcatataaggttacttatatgatttttcctctgagaagtgctttaatatcatggattccattatgcaatattttcattattataatttctaaataatccaatattttagtcttgttttcttttttgacccatgaattatttaaaattggtggtttttttgttgttttttttttttaaaaagacatttattcagtgtcacgatcagactattacatttagcaatcaacagcttgggtgcaaaaaaaaaaaatacattaaaaccctttgttggaatgctttacactttccacagaacagaaactaaaacaacctgttatacaactagtcacaaatacagtcttcgagttttttgcccatacacatgagtatttgtctaaaacatatcttctttgtagcagctaggccctgccaccactgtgcttggcttagttcacaaatctgttgtaacctgtagcttccctgtcacttcgctggctctcctctcatgctaagctttgttgcctaattaaaatcttccgccactgccatagctactgctgctactggaaccgccatagccaccttggtttcgtggtttggtaaagtattggcctgcaccaccataggggccagagcttctgcctccaaagtttcctcccttcatgggtccaaaaattgaagactaattgttgtaattgccaaaatcattgtagcttccacctccaaaattgcttccatcattaccaaatccattatagccatccccactgcacgatatccaccaccaccacagctgccaccaaagccaccatgaccactgaaatttccttcacaaccaaagttgtcattcctaccgaaaccacctccacgaccaccaccaaagtttccagaagtactttgacctctttggctggatgaagcactcaccatctcttgctttgacaggcctttcctaatttcacagttgtggccattcacagtatggtatttctgaatgacagtcttatccacggagtcatgatcatcaaaggttacaaaggcaaagccccttttcttgccactgccttggtcagtcatgatttcaatcacttcagtttttccatactgttcaaaataatcacttaggtgatattcttcagtgtcttcgttaatgccaccaacaaatatcttttccatagttaagtgggcatctggtctttgagaatcttctcttgagacagctctctttggttccacaactcttccatccaccttgtgtggccttgcattcgtggctgcatccacctcctcctcagtggcatatgtggcaaatccaaagcccctggagtgcttggtgtttggatctctcattaccacacagtccgcgagtgttccccattgctcagaatggctcctcaggctctcattggttgtttcaaagctcagccctccaatgaagagcttcttcagctgtacgagctctttaggagactctgacttagacttggcggtgtccatgggtggaaagtgtttgttttgttttatttttgagacagagtctctatctgtcacccaggctggagtgcagtggcgtgatctcggctcactgcagcctctacctccttggttcaagtgattctcctgcctcagtctcccaagtagctgggattataggcacccaccaccacacccggctagtttttgtatttttagtagagacggggtttcgccatgttggccaggctggtctcgaactcctgacctcaagtgatctgcccaccttggcctcccaaagtgctgggattacaggcatgagccacggggcctggcctaaaattgttgtttttaaaaaaattccaaatggttagaatgttttgcttcatttgtggctattcacttctagttttattactttgtgctaagtaaatatgacctgtacaatttttttttttgacggagtctcactctgtcgcccaggctggagtgcagtggagcaatctcggctcgctgcaacctctgcctcccaggttcaagcagttctcctgcctgagcgtcccaagtagctgggactacaggtgcccgccaccacacccagctaatttttttgtattttagtagagatggggtttcatcttgcccaagctggttgggaactcctgagctcaggcaatctgcccacctcggcctcccaaagtgctgggattacaggcgtgagccaccgcgcccggccaacttgtacaatttttacttttagaaactgaattcaaggctgggcgcggtggctcacgcctgtaatcccagcactttaggaggttgaggcgggtggatcacctgaggtcaggagttcgagaccagactggtcaacatggtgaaaccccatctctactaaaaatacaaaaaattagctgggcatggtggtgggcgcctgtaataccagctactcaggaggctgaggcaagagaattgcttgaaaccaggaggcaggttgcagtgagccaagattgtgccactgcactccagcctgggcaacaagagtgaaactccgtctcaaaaaaaacgaaaaacaaaaaatctcagcagctttcattgtgatactgacttaaatatggttgtctttcttgtcatttctttttacctggtatttcatgaattctttaaatctgataattcaaaaatttccaccaacgtagtaaattttcttctactatttgattattgctcttctgcagtcagctgtattatccccttctggaactcgtatttaattattaattttttgtaccccttctccatgtctcctatctttgtctctcagtttttatctattaccttttccttctgagttctggtaaattttcttgaactggtttaacttttggcatatctaatctgcagttcactgacactgttgcattaaatgggtggtgccatttgtcctaagaaagttttcttgttttccattatttttccagctgaaaaaagaaatcatgcaatggcctctcaaatttcaatatgaaacagattattttttaacgcttcttcctatttctctcaaatctggtggcaaaggctgtcttctgctctgaccactcaaatggttcctcttctgaactgttggatcttttcacccatcatctactgactttcttcttatgcttaaccttccggtgacaaagtgtcacgtaaaaggaactgaaggagttctgtcagaggttgtggcaatcccttcggctcagactaaggaataattggtaactattctgtgatgggtgtggggtaaaagcctatggggctgtggaggggcaacaggtggaggcaggaggccttggggaagggagcttcacctctgtacagttctccaaaaaaagattcaagtaccagccttctggtatagttcaattttaaagatgggaaattaaaaagtcaacctgagatccacagcagtaatttttttcaagaatccatagtgacacagaaattcccaaattgacttttttttttttttgaggcggagtctcgctctgttggagactcccgggctggagtgcagtggcgcgatctcggctcactgcagtctccgcctcccgggttcaagcgatccgcccgtctcagcgttccgagtcgccgggattacaggtcccaaatggacttatatgcctcctgatgtacttccttccacacgattccaactatatcgtatctagtttttaaaagtcagggggcggccgggcgcggtggctcacgcctgtaatcccagcactgtgggaggccgacgcgggtggatcacctgaggtcaggagttcgagaccagcctagtgaaaccccgtctctacaaaaaatacaaaaattagccgggcttggtggcgtgcacctgtaatcccagctactagggaagctgaggcaggagaatcgcttgaatccaggaggcagaggttgcagtgagccgagaccgcgccactgcactccagcctgggcgacagagcgagactccgtcttaagaaaaaaaaaaaaaaaaaaaaagagggtttggggatgtggcttgctgtaatgaaaaaggctttgataggttttcatccacggtgtcaccctgggcaatttacttccgttctctgggattcagtttcctaatcttagaaatgggaatagtagagaggctgaggcgggagaaaagcttgaacccgggaggcggagcttgcagtgagccgagatcgcgccactgcactccagcccgggagtctccaacagagcgagactccaactaaaaaaaaaagggaatagtaacaactactcttagcagatcttcaaggtcccaagtaatggcccgcggcgctaggccgggcctgtggcgggagagcctggcctaaggtgtccagaggagcccaggctgaggggtgtctctgtcaacccgagtcccagactagcagtgtccttggtgtccacgacaacagcaacggcagccaccgccgcaaacgcccgcctggcctggcacggcccggcctcgcctcacctcagctcaccggcgccgcgcctccagctccagcctccgcgcgcctccccggccgcacctctgcgcacgcgcagcccccgcccgccccacccaggctctcgctccggtcccgcccctctggaaccggcggcgggcgcttttcctcccagcgcggccaccgtcgttcggaaagggagggcggcagggggcggggaaaggccgggaggtgggcgagcgcgcgcgccgcccgtctgtggtggtttcctggctgcgcgcggcggtggcggagccgctacggctgtagcagcagccgcgaagatggcggaagggctggagcgtgtgcggatctccgcgtcggagctgcgcgggatcctggctactctggccccgcaggccgggagcagaggtgagtcgcgccgcccagctcctgggccgggcctgcccgccccgcctccctctcctcctcctctgcctcctccccgctcggccctcggctccggagcccccgccccttcccccagcagtaggcgctggggccgcggcggaccctcgctgccctacctctctcgcgggttagtgcggggtcgggctcggccagtcctggccagctccgggagagcctggcccgaattcctgcctccaccctctttctcgccgcgaaggtgactgttccttttgccccagccctctcagacccgccccggattcccaggcatcgggagacgcggaaaggagtggggtctggtggaggccccgggcgtatcgctctccaggccgccctccgcgggcctgccccggccaccgctttaacgtcggagagaaggaattggggagaaaggtttaagagcctgcgacttcgttgctgaacttttcccccccaagacaggcttccgaaagctgcgccactggagggatccgggacctcagactactcgggtttggccctggcatgtgtgggagcagtttttattagagagaatgctcaatttgcaagttaatttcaagtctccagccacgtcaggaaagtaagaaagattctaagtgtctcacctctcctgcgttaggcaatagagttgtgtagaatggtagctgtgataggtgccttctctaggtttgcggccagtctgtgaaattggtttttgttgattaacataattggattattaaggctattttctcccgctgctctagaaagtagtaggaatagctttccccatccccccgccccccaccaagttacagactgccgagggtgagctattcttgggttaaactgctttatctttgtggatacttcatgaacctaccttttaaacttatgaaaatagtgaagcactatccaaaacctcagtctcttttcttccccttttccttacacctacaaacagtaaatgtacttgctggagcatgtgattcctgttttgggcttgtttccatttatatttagagagcaatactaggattaaaaacttttttattgttgttattattattttttgagacggagtctagctctgtcgcccaggctggagtgcagtggcgcgatctctgctcactgcaacctccgcctcccgggttcacgccattctcctacctcagcctccccagtagctgggactgtaggcgtgtgccaccacgcctggctaattttttgtatttttgtagtgatggggtttctccgtgttggccaggatggtctggactcctgtcctcgtgatccgcccgccttggcctcccaaagtgctgggattacaggcgtgagccaccgtgcccggccaatttttttgaggcagggtctcactctgtcttccaggctggagtgcagtggagggatctcagctcactgtagcctccccctcctgtgctcaagtgatcctcccacctcagccttccgagtagctggaattacagacctgcaccaccacacctggctattttttgtatacgttatagagacagggtgttgccatgttgcccaggctgatctcgaactcctggcctcaagcagtcctcccgcctcagcctcccaaagtgctgggattataggcgtgagctactgcacctggcctatgctaggattttatatagcattccatttgtgtacttgataatattctcccgaattctgtcacttttccattgtaatgtttagtggttacttttgataacggtaacagatacttttttaaaaaaccagatacttaagtaagtatctgtccgctgggctggagtgcactggcgcgatctccgcgtactgcaagctccgcctcctgggttcacgctattctcctgcctcagcttcccgagtagctgggactacaggcgcccaccaccacgcccggctaattttttgtattttttgttgagacggggtttcaccgtgttagccaggatggtctcgatctcctgacctcgtgatccacccaccacggcctcccaaagtgctgggattacaggcgtgacccaccgcgcccggccgagagtggtttctaaagtcctgtattattcttaattcttgagttcccagttgttggcattttgagagtatgtcacaatctttccatcagcatccagggaaagttcccttatggaacttttttctaataattccatcatcacagtagcagttagtgtcagtattctagtatgatagtctgagcagtattttggtaactctgtgagctactgttagtgagttggtgaggatgggtgaagttgaagaatgggaaaagaactgcttgctgtttaattcaccagcaggtatgttatttggtaattggtatcttgaagaagagaatcatcctggtcaagtttaaagactaaagttgcattttttttctccagagatgtccaggactgataattgttataataccctccctcctttttctccttttttacttcttcctcctgctgttatgttaaaagaacttagccacccaggaaaaagttagaggcggaagaaaaggctgaggtggattcacaggctctatagatagagaacagtgtagtgctgaaaaggttagagaggtcttttgttctgacaataatgaggtagtttgggatcttggatttctgaatatgacttggatgacacataaggagatgggtttcccccatttcacttacccaagtgtaggtagccccaacacagttaggtccttagccttgtgaattgttgaacaagtgttgtaaacccagaatttctgcttctacagaaatgtccttctttgcctaccagtattagcatttggatatgtaattcttgctcgactttttttgttacttaaccagaatgacagtctttcccctatcttccttctttattcttatcttctacctttccctcccaaactctttccccgacataacagaaaacatgaaggaattaaaggaggccaggccgcgcaaagataacaggcgtccagatctggaaatctataagcctggcctttctcggctaaggaacaagcccaaaatcaaggaaccccctgggagtgaggaattcaaagatgaaattgttaatgaccgagattgctctgctgttgaaaatggtacacagcccgttaaagatgtctgcaaggaactgaacaaccaagagcagaatggtcctatagacccagaaaataatcggggacaagaatcctttcctaggactgctggacaagaggatcgtagtctaaaaattatcaaaagaacaaagaaacccgacctgcagatctatcagcctggacgacgtttgcagactgttagcaaagaatccgccagtcgggtggaggaggaagaagtcctcaaccaggtagaacaactgagagtagaggaagatgagtgtaggggaaatgttgcgaaggaggaagttgcgaataaaccagacagggccgagatagaaaagagcccaggtggtgggagagtaggggctgcaaaaggagaaaaaggaaagaggatgggaaaaggggagggggtgagggaaacccacgacgacccggcccgcgggaggccgggctccgcaaagcgctactcccgctcagacaaacgaaggaatcgctaccgcacgcgcagcaccagctcagctggcagcaacaacagcgctgagggagctggcctgacggataatggatgtcgccgccgccgacaggataggaccaaggagaggccacgactgaagaagcaagtgtctgtgtcctcaaccgattccttagacgaggacagaattgatgagcctgatggattaggacccaggagaagttcagaaaggaagagacatttagaaagaaactggtctggccgtggggagggtgagcagaaaaacagtgctaaagaatatcgaggcactcttcgtgtcactttcgatgcagaagccatgaacaaagagtctcccatggtgaggtcagccagggatgatatggatagaggaaagcctgacaaaggcttgagcagtgggggcaaaggctctgagaagcaggagtccaaaaacccgaaacaagaacttcggggtcgtggtcgtggcattctgattttgcctgcccataccaccctatctgtcaattcagcaggttctccagagtccgcgcctttgggacctcggcttttgtttggatctggtagtaagggatctcggagttggggccgtggaggcaccacacgccgattgtgggacccaaacaatcctgatcagaaacctgctctaaagactcagacgccccagctacatttcttggacactgatgatgaagtcagccctacatcttggggtgactcacgccaggctcaggcatcttactataagtttcaaaactctgacaacccctattattacccccggacaccaggccctgcctcccagtatccctatacgggctataaccctctacagtacccagtgggccctacgaatggtgtgtacccagggccttactacccaggctacccgactccgtcaggacagtatgtgtgtagccctctacctaccagcaccatgagtcccgaggaggtagagcagcacatgaggaacctgcagcaacaggagctgcacaggcttctccgggtggctgacaaccaggaactgcagctcagcaacctgctctccagggaccgcatcagtccggagggcctggagaagatggcgcaactcaggtatgatgtggtctattctggctggagggaaatggggatcagccggaggtgtatagattgctatggctgaggaaggtagaaactttttagctgagccactgggtattatttccttttcacgttgtaagggaagggcagttggaaacagaacagaagttttatttctagtcttttttttttttttttttaagacggagtctcgctctgtcgcccaggctggagtgcagtggcacgatcttggctcactacaaactccgcctcctgggttcataccattctcctgcctcagcctcccaagtagctgggactacaggcgcctgccaccacacccggctaattttttgtatttttagagagacggagtttcaccatgttagccaggatgatctcgatctcctgacctcgtgatccgcctgcctcggcctcccaaagtgctgggattacaggcatgagccaccgcgcccggccctatttctagtcttagaaataattatgcatcctactttttctttaagaaaaaattatctttaagggatcatggaatcttgaaatggaaaaagactttctagaatgccaagaaatgaacaacatgtaacttgcagtgaagatcttatttcagttgttaaatttaggtgaagacatatggggaaaaactattttcctagacacaactatctttagaatgacattctgctctgcagaatggaaaccagagtgagtagtatacctacctggtcacattttttatttcctgccaggggaggtggttaatttgcaggaatctcaaaacttgagtctagctttttctgtggtgtatttggagctggaagttgcatgtattttattccagagctgaactgctgcagctatatgagcgctgtattctattagatattgagttctctgataatcagaatgtggatcagatcctgtggaagaatgctttctatcaggtgattgagaagttcaggcaacttgtcaaggatccgaatgttgagaacccagaacagattcggaacagacttttggagctcttggatgaggtaaactgtcatctttttgtcctcaggataaaggcttcagcattctgtagttacgatggatttttactacctgaaatactatgttttagaacagaatatcgacaaaaaaactgcccttttcttgggttctgagccttccctacaccagttgcttccttgggaccataaattactggcaattggagttttgaggttgaaagctttctgaatgccttggcctaaaagagagagaatgagaatgtgtatgtatgtgtttgtgtttgtgtggagagagcgtgtgtgtgtatgtgtgtgtgtgttcatgtgttcatatctttaaaaccatggaggctttgactgtgaatttgccttgttctcaaattggtggccagtgaatattgtgcgtgcctcccttttcataggatgtctgaacatcagcagaactgtgaaagggttgtctgccccggtttttggtggataggttggattagaatagattgattcagtcatttctttttttctttttatagggtagtgacttctttgatagtttgcttcagaagctgcaggttacttacaagttcaaactggaagactacatggatggtcttgccattcgcagcaagccattacgcaagacagtaagctaccttctttatgtatcttaaattttcattcatttcgtaagcgtttatctagtgttaggtatgtgctagacactgtactgggtgttgaggataaaagaatgatacagttcagtgcagggacagatagattaaaccaacaattgtaatgtcatatgtactatggtagtggtatatagcagtgctccccagccttttttctttctttctttcttttttttttttttttcattttttgagaaggagtttcattcatgtcacccaggctggagtgcagtggtttgatcttggctcactgtaaccttcaacctctgcctcccaggtttaagggattctcctctgtcagtctcccgagtagctggcgttacaggtgcccaccaccaagcctggctaatttttctatgttttgtagagacgggggtttcatcatgttgcccaggctggtctcgaacttctgaccttcggtgagccacccgcctcagcctcccaaagtgctgggattgcaggcatgagccaccgggcctggccagtccctagcctttttggcaccggggactagtttcatggaagacagtttttccatggacggagatgttggggcattagattctcatgaggagtgcatagcctaggtccctcgcatgcttagttcacaatagggtttgcgcacctgtgagaactaataccactgctgatctgacaggagttagggttcaggtggtgatgcttgcctgcccaccgctcagaccagagactggtaccagtccgcggcctgggggttgggtacccctgatatagagtgttgaagggccatagggagaagtgaatctaacgtagcctggtggggccaaggaaggcttcttggagattgtcaagctgagttttgaaacatgactaggagtttgaaggtgggaggggcagtttagatagagggtccagcaaaagagaaccaggcattgttgggaaagtgcaagaacttcagtatgctggtgtttgtagtgtggagggggctattgtaggtggaaaagctaacaaagtgggaagcgactaggtcataaactctcatatgctatgccgaagagtttggacttcattctgaaagcactggggaaccattaattgattttttagtaaatggataaggtagatttgttcttagaaccagtcacttgggcaaattggtgagtttgaatgggagctgggcaagagtggagatagaggagtcaggttgtaggtctgaactaagatagaggtcgtggagatgggaaagagaagacagattggaaagaaagaaaggaaatagaatggaattgttgactgatttggtgtgagggatgagattggaggcatgaagagtctgaatcatctcccagctggtagtccaggggagtggctgcaaaggaaagagattggttcaggtttggatatgctgatgtggaggtgtgtgtgttacaggaacttgaaagtgaacaagtgaatattgtggtctctctggaggtcaggagaaagctgggctggtgatatagattcatgagtcatcatgatacaggtggtggttgaagcaaaagttggggtactgggaaggctggccagaaacgggggttacatttcaaggtgggggtaggtaaaattgtcaagtgcaatggagctgtcaaatgttaagattactaaaaagtgtccgttggattggatgaacttatcaagagttaatttagttggggaaactggaagccagattgtagtgaagagagataaagcagtagagattgccagagagtaatatagaccattcttttaagcatcttggctgcgaagacaaggagggaagacagctaaaagaacatagggttctaagagaaggttttttgttctttgtttttcgttttttttgtctgtaccacgcctggccagtttttgttttaagattggaaagttgagcatatttaggaagcagttagagatgcattagggagagcagcgtgatttatggagcagaggcttcctcttgcctttttgctccttctactacatacacactttcttactgatggacagatgtttttggctgggcgcagtggctcactctttaatcccagccctttgggaggccaaggcaggcagatcacctgaggtcaggagtttgagaccagcctggcccaacatggcgaaaccccctctctactaaaaatacaaaaattagctgggtgtggtggtgcatgcctgtaatcccagctactcaggaggctgagacaggagaatcgcttaaaaaccagaaggcagtggttgcagtgagctaagactgcgttattgcactctagcctgggcaacaaagtgagactctatctcaaaaaaaaaaaaagtgtttattgagttcctcttacatgcttggtggtattttaggcagaggcaattcagtgcagattgaaaaaaaaccgtgctcctgtttcttggagtttagtgtttgattgctggtgagtacagactttggatgagtaattgctgatggagtgacttttgccaaggatgttgggggtgtatactgtaaagggttaacctagttttaaagaatcctgtgagactgagaaaatcatagttaaactaacgctgaaggccgaaagcttcagccaggtgaaggtgtatgtgtagatgcaaggagaggaacattttaggggaagaggacaatatacttaaaggccctgaagtggagaacaccgtggtgtgttaggggaactttggagtctggtctgactgaggtacagaaagtgaccgggaatatggtgctgatgaggtaagcagaggctcaatcgtccaggacttcatgctgaggctgacggagagcctttgaaagaatttgttttgttttgttttgtttttgtctcttaccaacatgacaaagtggatgtagtatggaggcataatcagttctctttgtgctttatcagttaaatacagaggattcttaacacctttggggatgttcattcatagaatctgtggaacagttaggacttggggtatgtgatatgtagtcattataactttgctgaggtacaaatttgagttatgtgctaggtaggaggttaatgtgcagtagctatttcgcttagtgagtgtgccttcctgaggggtcagtatcttcttctcaatgaagctttgttctttattcagtgatatgttaatttcttttgtgtggagtggagtggaattatattgtgtgctgtgaggtggtgttccctagggagatattttggggggcacatgccttgggattggtttactctgttttctgagtgacagatgccaagccaatcagtgagaaaacacatagtcctgcacagtgtgtggcatgttgttaatgtgtgataaaggacgatccattgttttaggtgaaggtaatgtaatgccgtggtacaattcagtgatgttaacagtttgaagaaagactataatgatggcaaaaaaagtgggtgggcgtgatggctcacgcctgtaatcccagcactttgggatgctgaggcaggcacatggatcacttgaggccaggagtttgagaccagcctgggcaacatggcgaaaccctgtctctattaaaaataaaaaaattagccaggcatggtggcgcatgcccatcatcccagttactcaggaggctgaggcacgagaatcacttgagctcaggaggtggaggttgcagtgagctgagatcgcgccactacactccagcctgggcaacagagtgagacgctgtctcagaaattattagggggaaaaaaaagaatagagtaaacaattgttttcatatttgtttgtctctttatagtttataaaatatttttacatttatttcctccagttaccctatagagtagttatttttacattcaggtgaagaaactgagtcccagagcatctcaaagacttccttgagatccaacactattccgtagagtcagatctcctgactactaatatcaaaatattttctttcatttgcctgggactcaagaatcaccctctctctttctcactaaattttgtatcacactgctgactgtttttttggtagtcaggtttaggctgaaaactttatagtttgttgtgtttttttggtagtcaggtttaggctaaaaactttatactttgttgaggaccgctagtgccttacgagtgctacattgtcattttcaccccatccctgtcctttgagggttgaagttagtgtttcttggcttttctactaactggttgtttttcctgaaggtaaaatatgccttgatcagtgcccagcgatgcatgatatgccaaggagatattgctaggtaccgggagcaagccagtgatacagcgaattatgggaaagcacgcaggtacttttacctctacttcgttatttctcttccctatgtggctctaagctaagccttactaagagcagtaggccatatgggtgttgtacaggtgtccctattggtccctgtagtcatgccttacccctccagggttacatctaacactctaccttatgttttaagtattagggctatcaggatgaattgggaaaaagctaatctggaactagcattttcttactgttttttctgttctagttggtacctgaaggcccagcacattgctcccaagaatgggcgcccctataaccagttggctttgctggcagtgtatacggtaagaaatcctgtggacaggggaaaagtgctttgcaggaagtatcttacaatatggagtttgataatatcagttcctggagcttcatttcatctcatcactgtagcccaaagaatatcccctcaaactccttttgttacggttactctcagaattaagttgtcagggattcctcacttcacttaactctgtacttcatctctccacttaccactgcactcaaattcctgagggaatgctcatgctccagctaaacaccattctttgtttctgaccagagctgccactctgaattttgtcttgattctcttccctttctgttgaactaggcaactcattctagacgaaaaataaggcttacttctctcccttaaagttttcacctacctctaagtagtcagatctttgcttcctttccctagaccctgttacttcttttaactttttatctgaggtgcctccttagcagaagcacagtaagcagcaggttgtacctccctaggtctaatcactgtgctctaaatatgtctgtaatggagaagcgggccttgggagctgagacagctcctagggagaaagctcaattcaagggggaaagtggggaccagtggtaggtaccagaggttccatcgtaagaaacaaataagatgctcattagcaaggagaaaattgtctctctctttttttttttttttttttttagagaggcagggtctcgctctgtcacccaggctggagtgcagtgacgcaaactactggcttaggtgatcctcctgcctcagcctcccaagaaaattcttaataattatggattgaaatagttgattaagtaatgtgctttactgaaacacttctttcaaaattggttgatctctctccggtttttgcctctgtctcattctccgtgatgggtttatgggattttttttcccgccctctttgcagcactattttttcttccctttttctctatatccgtcttttcctgattccttctttgtaatcgttgaatgaactgttaattagaaagtacaattaaccatcacctttatctagtgtcagaacattttcctttttttttttttctgagacggagtctcgctctgtcgctcaggctggagtgcagtggcgcgatctcggctcacggcaagctccgcctcccgggttcacgccattctcctgcctcagcctcccgagtagctgggactacaggcgcccgccaccacgcctggctaattttttatatttttagtagagacggggtttcattgtgttagccaggatggtctcgacctcctgacctcgtgatccgcccgcctcggcctcccaaagtgctgggattacaggcgtgagccaccgcacctggccatgtgtcagaacattttcatcaccccaaaggagacctgatacttacgctttccatccctgcctcccctcagcccctgacaaccactagtctgatttctgtctctgtatctttacctgttctggatgtctcacataaatgggatcatataatgtatgactttttgcagttctctaatgacacacgatgttgagcgtcttttcatatgcttgccatctacatatcttattcagtgaggtgttcagatcttttggcccccccactacttttttgcccatttttaaaattgagttttttcccttatttaagagttctttatatattttggttacaagtcctttatcaggtgtgtgatttgcatctattttcttccagactgtggcttgtcttcacattcttcagcagtgtcttttgcagagcagaagttttaaattttagtgaaatccatcttaccagttatttctttcatgggttatgcttctggtgttttatttaagaagttgtcttcacacccacggctagcttaatgttgtgttattttctagcagttgtatagttttatgttttacatttaagtctgtaatacattttgagttaatttttgtgaaaagtgtaaggctcgtgtatagatttattgatgcaggtggatatacagttgttctagcaccatttgttgaaatgactgtccttttaccatcgaattgcctttgctcctttgtcaaagaccagctgactatatttgcataagtttatttctggcctctctgttcatctatttctctgttctttggtcagtaccacactgtcttggttcctgtaactttatttatgtcttgaagttcagtagtgtcagtcttccacctttgtttttcagtattgtattggctattctggatcttttgccttcccatgtaaactttagaatcactttgttggtatccacaaacctagtgagtattaagtgataactcattgtggttttttattggattctcctagcaactaatgatgtgcatcttttcatgtgctgatttgctattgggagaaatatctatttcattgctcattgagaaaaattttaattacatatatatatatatatatatatgtataaaataataattatttttttttgagatggagcctcgctttgttgcgcaggccggagtgcagcgctgcagtagtctcggcttactgtaacctccgcctcctgggttcaagctattctcctgcctcagcctccagggtagctgggattacaggtgcacaccaccagcccctgctaatttttttgtatttttagtagagatggggtttcaccatgttggccaggctggtcttgaacttgtgacctcaagtgatccacctacctcagcctcacactgggattatatgcgtgagccaccgcacctggcagttttaaaattttaattgtaaaatactcatagaatttatcctcttacccacatatatatgtgtgtatatatatttaagagataggatcgcactctgtcacctaggctggagtgcagtgacacaatcatagctcactgcagtctcgacctcctgggctcaagtgatcctcctgccttagcctcctgattagctgggactacaggcactcaccatcatacccaggtaatattttgattttttgtatagacaggatctcactccgttgcccaggcaggtcttggaactcctggcctcaagtgatcctcttgcgttggcctcccaaactgctgagattacaggcatgagtcactgctcccagtcacttaattttttttttctttttttgaggcagggtctcactttgtcacccaggctggaatacagtggcatgacctcagctcactgcagcctcaacctcccaggttcaagctattcttctgcctcagccccccaaatagatgcaactacaggtgcccgccaccacagctggctaattttttttttttttttttttttgagacagagtcttgctctgttgcccaggctggagtgcagtggcgcaatctcggctcactgcgagctccacctcccgggttcacgccattctcctgcctcagcctcccgagtagctgggactacaggcgccctccaccacacccggctaattttttgtatttttagtagagacggggtttcactgtgttagccaggatggtctcaatctcctgacctcgtgatccgcccacctcagcctcccaaagtgctgggattacaggcgtgagccaccgcgcctggctgctcacgcctggctaatttttgtattttttgtagagacgggatttcgccatgttatccaggctggtcttgaactcctgagctcctaagtgatctgcccacctcagcctctcaaagtgctaggatacaggtgtgagccaccagccctgcctatcttacccactttttttttttttttaattgagagaaggtctctgtcacccaggctggagtgcagtggcctaatcttggctcactgcaacctctgcctcccaggctcaagtgatcctcctaccccagcctcccaagtagctgggaccacaggcgcatgccaccccacttggctaaattttttgtatttttagtagagatttggtttcactatgttgctcaggctggtcttgaactcctgacttcaagctagccacctgcctcagcctcccaaagtgctgggattacaggcatgagccaccactcccgggctgtcttgctctttttcttttttttgtgatggagtctcgctctgtggcccaggctggagtgcagtggcacgatcttggctcactgtaacctccacctcccgggttcaagtgattctcctttctcagcttcctgagtagctgggaccacaggcttataccaccacgcctggctaatttttgtatttttaatgcagatggggtttcgccatgttggccaggctggtctcgaactccagacttcaggtgatccacccaccttggcctccgaaagtgctgggattacaggcgtgagccaccatgccctgcctgtcttacccatttttaagtgtagcttcagtagcattacgtacattcatattgtagtgtaacgaatctccagaatgcttttcattttacaaaactggaactccatatctattaaataacagctcccacttctctcttcccacaacctctgcaactaaccttctgctttctgtcactatgaatttggctactctaggtacctcatataagtggaattatacagtatttgtcctcttgtgactggcttatttcacttagcttaggtcctcaaggttcatccatgttgtagcatgtgtcagaatttcctccttttggagggtgaattatatttcattgtgtatatataccacattttatatgtacgttcacccattgatggatacttggattgcttccatctgttggctattgtgaataatgccacagtgaacatgggtgttcaaataaaatctcttcaagaccctgcttccaattcttctgggtacatacccagaaaacgaattactagatcatttggtaattctgattttaggtttttagaacaaccatattgttttccgtagcagctacaccattttacattccaaccaacagcatgcaaggcttctgatttctccacttccttgccaacacttgttattttctgcatttctgatagtagccatcgtagtggtggtgaggtgatatcacattatggttttaatttatgtttccctaatgatgagcattttttcatatgcacattggtcatttgcatatcatctttggagaaatgtctattcaagtcctttgtccatttaaaaattgttattttagccgggcccagtggctcacgcctgtaatcccagcactttgggaggccgaggcgggcggatcacgaggtcaagagattgagaccacgatgaaaccccgtctctactaaaaatacaaaaaattagccaggcgcagtggcaggcgcctgtagtcccagctactgggaaggctgaggcaggagaatggcgtgaacccgagaggcggagcttgcagtgagccaagatcacgccactgcactccagcctgagcgacagagcgagactctgtctcaaaaaaaaaaaaaaaaaaaaaaaaaattattttatgttttgtgttgtcaagatgtatgagttctttatatattctggatgctagacctttattagatacataatttgcaaacattttcttccattttgtggattgtcttttcattctgctgagaatatctttcgatgcacaagtgttttttaattttgctgaagtccagtttatctttttttcttttgttcctttcactttcgatgtcatagctatgaaaccattaccaaatccaaggtttggaaaatttacctctacgttttcttcttagagttttagacttttacctcttatatttaggcctttgattaattttaggtgaatttttatatatagtatgaggtaaaggtccaacttcattcttttacatgtggttattacattctctcagcaccatttgttgaagagactgctctttcttcattgaatggtcttggttcccttgtaaaaagtcactttatatgtgggttttttctgagctctcagttttcttccattgatttatatgtcagtcctcatgccagtaccacagctgtgttagttactgtaggtttgtggtaagaaaaattgggaaatgtgagtcccctaacttcgttttttttttttttttttggccatttgaggtcccttgtaattatgtatggattttagggtcagctttttcatttttgcaaaatcattggaattttgataaggttgcactgaatctgtagattgctttgggaagtattgccatcttcaaaatattaagccttctaattcatgaacacagggtgtcttttcatttacttcgttctttaatttcttttaaccctgtgtataataagttttgcacttccttggttaaatgtattcctaagtatgtcattctttttgatgcttttgcaaagggaattgttttcttttttttctctgtctttctctctatttttttagacagggtcttggccaggtggggtgtctgacccctgtaatcccagcactttgggaggctgaggcaggcggatcacttgaggtcatgagttccagaccagcctggctaacttggtgaaaccccatctctactaaaaatataaaaattagccaggtgtggcagcacacacctgtagtcccagctactcgggaggctgaggcgggagaattgctcaaatccgggaggtggagtttgcagtgagctgagatcatgccactgcactccagcctggatgacagagcgagacttcgtctcaaaaaagaaaaaaaaaaagaaaagagggtctcactgcgttgccaaggctggtcctgaactcctggcttcaagtgagcctcctccctctgcctcctaaagtgctgggattataagcctgagccattgggcctagccagaaattgttttcttaatttcttttttttcagattgctcattgctagtatatagaaatgtaactgaatttcgtgtgttgatcttgtatgttgcaactgtgctgaattccctcaatggctttttgtcatttgaattaaattttctttttcacagacctctgacctagattcgcactttcttcaagttcttttcctctatccctcttttttctgtctgtctcatcttagttgtctgttagcaacattttcccaacttttctgccaattccaatcagtcagtcattctgtctcttccaatcagtgaatctcaggtatttattgagaacacaacacgtgtacagtagtgcttttctaggtgccaggaatgataaaatattgacttgctttcttccctgaaaaaaaaaatgtgttgagaaaacaagtgagctgtatagacagtgatgcaaattagacttgataaatatgtaattgattgttagatgcaccattatcttctgttccactaagaaaaatgctgcaaattaaaataagacataacaatagataccgattgtaagttgtatctctgttttggaaattttttcatatgaaaaaatattttatagaattaatataatacagtctcaaatcaggtgagtagtgtagatagaaattagtatggattggaataataataaaaatagctaccaagtaactgtaatggtgtgccaaatattctgttaaactatatgcattatataattttaatctttttgggagccatatgttgtaaacatttccattttgcaaataaggaaacctctctaggttaacgtgctgtgtcatacctaataaatgcaagaccgaattcagactcaggcactgaccttagaacctgcacctctagccatgccaggtgaatataagataggagttttgaagaatgggtagacgctggggagagagagaagctagcattttaaatgtattttgaaacagttatggaaaacattgaaaatgtacatgaagttggagaaaaagtgagaaagccttttggatattctttctgcctttgtttcaatgttttcctttttccttctttctgacccacttcctttttctttacttcttcttttccctattaattgcttataaatagacttgctgaatttcttgaataatatccataaaatgttcaactcagctacttatttattttaaaaaattatcaataacaatggcaacatcattgattaagtacagttaagtgtgagacagtggacaacactttgtaaacctgaggatactcctccattgggtattattactcccattgtaatgttgaggatataggaactcaggaagattattacataataatgtaataatcttggagtcttttgtccaaagtttccaagtcaactcctggattagccagtatttggaccaaggtctgtctggcttgtaattttgtgatttcattatagcatactgactctctgataagaacaggaaatataaagtgaattgaacatcatgctttttctaagaacaagatgtaatttctgtttatattttaagagcctgtttattcctttctctccttatgagtacttggttcttggagcacctctgcatgtaagatataatactgtgcaagaagagatctgtgatgtaattgcaatggcttctcctgtggatagcatttctgattttgttgttgggattcctctcagtttgggagacaggctgggagagatagtagggtttcctgagtcagctgcctcttgctggagttaggacgagaattggttgactgaatgtctctggcctctttccacagaggaggaagcttgacgctgtctattactatatgcgcagtttagctgccagcaaccctatcctgactgccaaggagagtctcatgagcttgtttgaagagaccaagcggaaggtgagtggggatgtggcagaacccttccttcctcgaatagtgcatttccctgagtgttggtgtgccctagctctgcgcaccggcaggatcgtagccagtgaggtttatccaaggtgcagttattgctcagtgtctgtgtgtcctcggggaatgactcatagtgtccttaaatggtcccatcagactgtgctggtgggtagttggtcagcccctgtgcagaacaaaactgtgatcttcaggagagctttcaggggcccttggatgtacatgtacgtgctctacagccttcagtctacagaattaataactatatgaaacaaagcagatgacactctgctactttgggactgtggtacagtatttttattgtcaaataaataccggtgaggtgaggcttttctctttgtaagctgagtctcaggaaagtctgagctcatgtgtgttttttgtttttgagacagagcttcgctcttgttgcccagactggagtgcagtgatgcgatcttggctcactgcaacctctgcctcccggatttaagtgattctcatgcctcagcctcccgagtagctaggattacagatatgcgccaccacacccagctaattttgtatttttagtagagacagggtttcactatgttggtcaggctggtctcaaactcctgacctcaagtgatccgcctgcctccgcatctctaagtgctgggattacaggcgtgagccaccacaccaggccatgagctaatgtgtttgtatgttatataggcagaacagatggaaaagaagcaacatgaggaatttgacctgagccctgaccagtggcggaaaggaaagaagtctactttccggcatgttggagatgacaccactcgcctggagatctggattcatccatcccatccacggtcttcccagggcactgagtctgggaaggattctgagcaagagaatgggctgggcagcctgagtcccagtgatgtaagttcctgagaatgatgcaatgagccaaactagctcagtaagcctgggtgccctggttcatacagctgtgaggcacagatacttcccactgattgcaaggaagacaaaccacttgaggctccctgatggtcttttcccttctcatgtacgcttcctttatctttattatgtacttccctctctcaccactatgtgtcactgcagaatttagtaaaagtaggattagaatttttttttttttttttttttttttgctgctttttgttcagcgtcatcaacatgatgctttaggattctatgtgggattttgtacttatcttttcctcttggttgaccttatattccgagaatgaactaaagtagcatggataggttagttagtctgatttgtgatgggctttctatgggatatcctcttataactcttgggcggggactttttcctttaagccaggagaaatgacagtagaaaaatcacaggcttgtttagaagatttctcctcttcattgactcagtaagtaattatcgacagtgtgccagtcactaaagataacagtgaacaagatctcttgctgtctcagtgcattctagtggaggacgcaagagacttaacattgtaattacttctgtttttggggtgcacacccagtatatgagagcacatagccatgggaccaaagcagccattggtcaattgaagtataaagaacaagtaggagttagcttgagaaggaaagggaggtggtaaagtgattcccaggcaaaggaaatagcatatgcaaagggctgaggctggctgggggagagagagcacggtaggtggaaaactgcagtggctggttcgttgcgccttaagggtaaaattcacccagtgggtggtgtaagctggggctagatgttgaagggtcatatgataaattatttgacctttatcctgaaaatagtaggaagctattggatgctttaaataggggaataacatctgctcttcagaaataaaccctggccgctttgtaaaatgtttggagaagagtaagactagaaataggagacaaggagggtgctgcggtagttccaagtgagatatgaaaaagacttgaaccaagaaatggctttggaggtgggaagaagtgaacagacacaagtcatattattacagtagaatccaaaagacttggttgaacgtggggagctcagggagaagaaagagtcaaggtctggtgtggtggctcccatctgtaatcccagcactttgggaggccaaggcaggaggttcgctggagcctaggaattcagtaccagcctggtcaacaaaacgaggcttctgtctctgtaaaaaaattttcaaaattggctgggcatggtgatgcgggcctctagttctagctactcaggagtctgaggcaggaggattgcttgagtccaggagttcaaggatgtcatgagctatgatccagcgtaggtgccagagcaagaccctgtctcaaaaaagtcaagaatgagcccaagagcgtcaaggctgcaccactgcactgcagcctgagtgatgagtgagactctgccttccaaaaaataaatgaatacaatcaaaaacagggtcggtctctgttgctcaggccagagtgcagtgatgcgatcgaaatcctgagttccagtgattttcctgcctcagcctcctgagttgctaggactacaggcacatgccaccacacccagctaattttttgtagcgatggagacttgccctgttgcgcaggctggtctcaaactcctggcctcaagcagtcctcccgtggcctcccaaagatctgggattacaggcatgaggtgtatcatgtctgtcccattttatttctaattatacaaataatagatgaatatatttttggtaaaaactttaaattcttgtaggtagactacaacgtggtaatttgttttctaaactattgatgaaactatatatttttagtttgtacatcatccttgggtaactattacccttaattttctttaaatttaaatctttgagtttgagcttttcattttaggctaccagccctcgaagaaatctgcagtttctggcctgacgcggtggcttacgcctgtaatcccagcactttaggaggccgaggcgagcagatcacaaggtcaggagttcgagaccagcctggccaacatggtgaaaccctgtctctactaaaaatgcaaaaaaattagctgggcgtggcagcgcactcctgtaatcccagctactcgggaggctgaggcaggagagttgcttgaacccgggaggcggaggttgcagtgagccgagatcgtgccactgcactccagcctgggcaaagaagccagactttgtctcaaaaaaaaaagaaaaagaaatctgcagtttcataacttttcatttatctatccaggaaaccacactgccatttttacctgctttcttaggcccaagttagcttcctatattcttttttttctctcacagtaggtcccaagagcttagcttgctttctctgttccttggaacacacacattgataagaagtaagcattgaggatagagaaattaaaataaccaaaaatgatttttaacctcaaagagcacttggtcacgtgaggaagacataggtgtgtcattatagttccgtgtggtaagtactgtgataaaggcaagcatgagaggccgtgggagcatgcagttggaacacctaatccagtcatggttagggaaggctggggcgaggccgcattttgcagcttaaagatgtcgtaaaggcatttctacttggaggcatgaaaatgtggatgaggcatggaggcttcaggaactgcgagtagttcagtatggctggagtctagagtgtgagaagttctcctgtgagcgactggagtcgtgcttgacatgttcctttcctctgtccccacatccagtcagtaccacctggtattaggaggtggatactgttgagtccacctcctaatcgtaacttgaagccatccacttctctcctttctcattgctgccatcgtagttcaagctatcaccatttcagtaatccatatactatggaaagaagttcataatggtcttttcagatttattcctggtcctcttctggcctttcattttagacagtaacccaaatgaatgaacttccaaatatccatttctgatcatgccactgccttcttgaaagtgtttagttatttctgtgtgctcttacaatcaggtctaaaatcctcgacatagtccactaggctcctcatgatctggctcctgctacttcaaatcttacacttttcatacttttcttcctttgttactgtattccagccacactggcttcttccttgaaggatccaagctcttttctggctcctggctgttgttcatctctctgcccgcaccgctcttacctctcactggtatttctgcctttatcagtcactttctttcttacccttcaggtctcagcctaaatgtcacgttttcaaggaagcgtttcctgatccctgagactggccatttcgcctttgtaataaccacatttctggtttaagtgcttttaagtgtagttttgtgcagatctttcccttgctagattgaaggccctgtgagagtagagtcatatctagtgtgttcacttctttgtccccagtgtctgcatatggaagattctaaataaatcttagttgatacgcgaatgaggggaagggcagcgagggatgaggctagagaagatagcaggggccaggtccttcataaatattttgaagtttggctgtcaggtattgagggcttttaatttttttggagttgtgttggtcatgtttaaaaattgatatataataattgtacatatttatgggctacatgtgatatttttatacgtgcacagaatgtgtaatgatcaaatcggtatttagaatgtctgtcacgtcaaacattagtcatttaggtactaaggattttaagcagagggatgatataattggatttctataatgatcactcgttccaatacttccagtactggaacaaatttattttgttttaaaaggaacttttcaagttgcataactaataacaattcattgtctcaacattaaacagtaatgtatatatagtttaggctgggtacggtggctcacgcttgtaatgccagcactttgggaggccgaagcgggccaatcacctgaggtcaggagtttgagaccagcctggccaacatggtgaaaccccatctgtactaaaaatacaaaaaagttacctgggcatagtggtgtctgcctgtaatcccagctactcgggaggctgaggcaagagaatcgcttgaacccgggaggcggaggttgcagtgagccaagattgcaccattgcactccagcctgggcgacagagggagactttgtctcaaaaaaaaaaaaaaagtatatataaagtggcagtcacttgtattctttccttcggagacatcactattaactgattgatgtccttccagacctttttctaagcatttataagtgtatacgtgtatgcacatacctgtaaaaacatgaaatgcattataaaatttttttttgagagataggatctccctctgtttcccaggctggggtgcggtggcatggtcacggcccactggagcctctatttcctgggctcaagtgatcctcctgccttagtcttctgagtagctgggactgcaagcatgcgccaccatgcctggctaattttttaagaatgttttgtagagatgggatttccttatgttgcttaggctggtctcaaacttttaggctcaagtgatcctcccacctttgcctcacaaaatgtttggattataggtgtgagccaccaagcctggctgaaatacattttttaacaaaaaggaggatagtactatgtataacaatctgcaacttactttttaaaattattatttgaacataaattattcctgctataatgcaatatatacattcctaaaaattgctgtgctgtgcaaaatcatgcaataaaaaccacacagggcttatgcagaaaatggagttaggagcacaaacctcaaaaactttctcagtgacatagtgaaaaagataggagcctgatttaaaactgttgtacaattttatacatgtgaaatggttaagaaatacgtaaatatggccgggcgtggtgcttacgcctgtaatcccagctctttaggaggccaacgcgggcggatcacgaggtcaggagatcgagaccatcctggctaacacggtgaaaccttgtctctactaaaaatacaaaaagttagccgggcatggtggcaggcacctgtagtcccagctactcgggaggctgaggcaggagaatggcgtgaacccgggaggcggagcttgcagtgagccgagatcgcgccactgcactccagcctgggtgacagcgagactctgtctcaaaaaaaaaaaaaataaaaaataaataaataaataaataaataaataaataaatgtgtaaatactacattaaacatagcactttaccttgaaaaagacataaagtaggccgggcgcagtggctcatgcctgtaatcccaacactttgggaggctgaggcaggcggatcacttgaggttgggagttcgagaccaggctgactaacatggagaaaccccatctctactaaaaatacaaaattagccaggcgtggtggcgcatgcctgtaatcccagctactcaagaggctgaggcaggagaatcacttgaacccgggaggtggaggttgcggtgagccgagattgtgccattgcactccagcctggacaataagagggaaactccatctcaaaaaaacaaaaagacatacagttggcatgtggaagtggacttgggaagggttacggcttgtgagttactgtgaagtggtagaaggagggttacttaaaatttgatggacagaggccaggtgcagtggcttacgcctgtaatcccagcactttgggagaccgaggtgggtggatcacctgaggttggaagttcgagacaagcctgaccaacatagtgaaaccctgtctctactaaaaacacaaaaaataagctgggtgtgatgacgtatgcctgtaatcccagctactctggaggctgaggcgggagaatcacttgaacctggaaaatggaagttgtagtgagccaagatcgcaccattgcactccagcctgggcaacgagcaaaactcaaaaacaaaaaaaaaacgtttgctggacagttgtaacagcagatgtggataggcctggctcctaacatgatcctgtggtgaactggggtagctgtagatgtttggggtgtgtgcgtgtgtatgctttgtgtattcctgtgcagcttgattcaactggatgcagttctctgtgttacctggtgtttcttgtaaacaaaatcacacataaggaaaggcaaagtttgtgttatgcccaaattgttcgtttatgtatttatggcaatgaaacaaattctcattttcaaaatgaacattatagcagaactgggtgattagccttaattggaattgttcctttgacaactcctagagaatttctaatacagactgcttaaatttagatccatgagtaaacagaaagtttggcttcaggtggttgttagtaacagtggtaacatcccaactagtctgttctctgccaagcatttgctttggatctttctctctctgaatggttgcaggaggttagcttgtgggttgttggtttttagtcttgagatgtggtttgggttgaacatccagcctggggagggattgccagcctcaactgcaagtagcatcctattgagattcacatttcaactcttccacctgccagccaggaccctccaaatccacgttgccagggttctgggcatttgttatttagtggctatatcttctgctgttcttcgtctccctttagaaacggggtactgcttgtcaactgggttgttgctgacagtcagggagttaaggatattaaattacagcatcagaaatcattttcacactgaaaagcaagggtctctgatagaactgctgaggattttttagatctgattgttttgttatcagcatcttgaatagaatgtaatacatgtctgtctgctggggaagaaagcatataggattgggagtggttgatagatgatagactgatagacttattttaattttgttttgttttgtgacagagtctcgctctgtctcccaggctggagtgcagcggcgtgatctcagctcactgcagccgccacctcctgagttcaagtgatcttccagcctcagcctcctgagtgactgggattacaggcacgcaccaccatgcccagctgatttttgtattgttagtagagatggggtttcaccatgttggccaggctggtattgaactcctgacctcaagtgatccacccaccttggcctgccaaagtgctgggatgacaggcgtcagccaccatgcccggctcgtattctttatatatgtaggaaggagcacaacccttaaaacacttcctcagtgacataattaaaaagataggaacctacataattaggtttctaccttttttatgctcacgcctatttttttttttttttttgcccatgcttttttatgcttattccatccattatgctttgctaaatatgtggagataaggtcttgctatgttgcctgggatggtctcaaactcctaggctcaagcagtcctcccacctcagccttccaaagtgttaggaatacaggtctgagccactgcatgtggccaataggtgtttgtctctgaaacttgagtgagtcttcctgccgtggaatgatttggtttaccattgccagcattttctccaagccactgtgactattcctgcaacatgcttggtgctgattgtagcaaataatgtctttagacaagagaaatgccattgtatatttggccaagctcttgtcaaaccttccttctccttggcctctttgaatgttttgtggttcagtctggactgtaccatagaagctcctaatctctgttatccaaatagaatgtaatacgtgtctgtctgttttcctttttctctatcttcacccaacaaatgattttgtttaccttgttctctctccttttgctcttcttccttctgttacatatcattatctattttatttatttgcataatgtcttttttcaggacttgttcaggtctggagaatttaatgcagttgcccctgagtttttggagtagaagaccatgttctgggctcagtgcttaagtagactaaagtttacctgttctgttgtgccagttttgtgctaggattgtaaagatgaatacactattgttactttctctgattgtgtagtctagtgtataggtcagcaaactttttctatgaagggccagatagtaaattactttatagggcatatgttctttgttgccaccactcacctttactgttgtaccaccaaagtagccatggacaatatgtaaatgaatgagcatgactgtattccattaaaactttatttacaaagacagatggtggattgaatttggcctgtgggcctagtttgccaacttctgttccagtggaagaaatggttacataaatagaatacagtaaacagttgattcttgttatttgtggtggttatgttctatacattcaataaattcaccacaaacactgaattagtgaatagtggattgttgctcctaagggaaatacagaattacattccttcaagcctctgatcacaacattttaatcaactggtcaatatataaccttgctttttttgggtttttttttttgagacacagtctcactctgttgcccagggtggagtgcagtggcgcgatctctgctcactgcaacctctgcctcccaggctcaagcgattcttgtgccttagcctcctgagtggctgggattataggtgtgcgcctggctaatatttatttatttatttgtttttgagacaaagtctcacactgttgcccgggctggagtgcaatggcacaatctctgctcgctgcaacttccgcctccccggttcaaacgattctcctgcctcagcctcccgtgtagctgggactacaggcacccgccaccatgcctggctaatttgtgtattttggccaggctggcctcaatctcctgacctcgtgatccacccgcctcggcctcccaaagtgctgggattacaggcgtgagccactgtccccagccacgcctggctaatttttatattttgagtagagccagggtgtctctgtgttgtccaggcaggtcgtgaactcctgaccttaagtgatccgcccacctcagccttccaaattgctgggattacaggcatgagccaccacacctgaccagttatataaccttgttttatgtgggtttctgtttaaagacaccttatttaatatatattattaattcattaacagagagctcactgcctaacagcactataactcatagctgaatgaggcttatctaatacacattttccctgtaaaacacatcacagccttcttgcacttagggagtcacacacttcggcacactccccaagcacagtggtgtgggggccacgtgagacaacaaaatcaccaacaaaaatctcagaaatgtgatactaaatacaccatgaaaaggacactttttttttttttgagacagagtttctctctgtcccccatgctggagtgcagtggcgtgaactcagctcctccgcctcctgggttcacgccattctcctgcctcagcctcccgagtagctgggactacaggcgcccaccaccacacccggctaatttttagtatttttagtagagatggggtttcaccgtgttagccaagatggtctcgatttcttgacctcatgatccgcctgcctcggcctcccaaagttctgggattacaggcatgagccaccgtgcccggccaaggacacttctaagtatgacctgaaatacgaaggcagagagttgctttttctgaccttagttagctaggaacatgcacctcaggtgactcaaattttgtgctgctctgtgcatgtctaggaatgactgtgaaagcatcatgagtagtgatttgggggttacaagtaagttttagcaagtaagtgaattcacaatgcaaaatccatgaacaatgaaggttgattgtattgtggtgggtgccaggagggaggtatgtattgggtactgtggaagcacagagagaggctcttggtccagccctggcagaggcatggtttggggtgaggagagaggaaagtgaattcagaaggcttcctggaaaagttaactgggcagagtgggaagagagtgttccaaatagaagtaatagcatgagcaaagacagagaaggtgtgaaacagcagagggctcacagggcacctaaatctgtggtaatttggaggccaatgtgagaaagttggagggtagagaggaggctgagccttctgccagagccacattctagtttggtgccatggtgtgcacttgggaggtagtcagggggctgatctcccataagataccttaggattctggaaataataatttgtttctggaatttctcactgtttacttgtcatgtctgcattgttaattgagcaaaagcagcactattctatccattaaatttggtagggtggagattgactgaatcttttaccccacagtttgctgacttaaaaagttgaagggctattcttttagacaatgcacttaggcattttgaactcaaacatgctagtgtctctctgtgtcttggtagttggaggaaattgccagtggtttgggttaagtagggcaaagccttttttctttttaattaaaaaaaatttacagctttttatttttatttttattttttttgagacggagtcttgctctgtttcctaggctggagtgcaatggtatgatctcggctcactgcaatctctgcctcctgggattaagcgattctcccgcctcagcctcctgagtagctgggactacaggcgcccgccatcatgcccagctaatttttgtagtttttaggagagacggggtttcaccgtgttggccaggctggtctcgaactcctgacctcaggtgatccacccaccttggcctttcaaagtgctgggattacaggcatgagccaccatgcctggctgctttttaaaatgtataggctggtttcaaactcctggacttggctgggcatggtggctcacacctgtaatcccagcactttgggagtctgaggcaggcaggttatttgagatcaggagtccaagaccagcctggccaacatggcgaaaccccgtctctactaaaaatacaaaaattagccgggcatagtggtgcatgcctgtaattccagctactcgggatgctgggaggcagaggttgtagtgagccaagattgcaccactgcactccagcctgggttgtggagtgagactgtctcaaaaaaaaaaaaaaaaaaccagaaaaaaacagaagaacaatttcctggactcaagcaatcctcctgcttcaacctcccaaagtgctgggatacaggtgtgagctaccacgcctggccttatttttctgttttatcaaagtaacacaattaaagttacaactgtaggcctttcctcctgtgtgtagagagaaacttctcaagccacatgaatagagcatagagagttcaagaaatgttaggcatctgatagaccaattattgtttcgaaagattgagtctgaaaatgcccatttcgtaaggaagcatcttgaactagtgacaccttggggaatggggcattaatttgacgccccctgggcatggaaagttgatgaccttgtttcaaaggctggggtgtagttggaaaagtgcctaggctgtaatgccggagttggtttctaagttagtgggaatagaggttgaaagagatcacacagaggagtgattgccttttaaagtattttagttgaagaattttttttttccttgagacatggttcctctctgttgtgcaggctggagtgcagcagcatgatcatcgctcactgaagcctccatctcccaggctcaagtggtcttcctgcctcagcctcctgagtagctgggactacaggcatgtgccaccatgcctggccaatgttttttatttttcatagaggaagggtctcgctgtgttgctgagactggtctcaaactgagctcaagtgatcctcccacctcagcctcccaaagtgctaggattacaagcataaaccactacacctggactctaaagaactattttcagtaggtcatatattatgtaggtgtatatgtgattatttttcttctcttgcattattagtggcatattatacacactggtatattcacctttttttttccctattgctactggacttcggagatccttctctgagtaattgccctcaaatccattgtatctctctagagcctggctgatagccttcataattttgtctagtatttgtatgtcagagccaggatagtgcagagctttggaaagtcctgagttcaagtgctagtttttttgtttttttcgttttgagacagagtctcactctgtcgcccaggctggagcataggggcgccatcatagctcactgcagtctcaaactcctgggctcaagccatcctcttgccttgacctcccaaagcactaggattacaggcgtgagccaccatgcctggcctgaagtcctacttttatcagatattagctgcgagactttgggcatgttctgtaacctggctgagctttagttttctatctgtaagatgatgacagtgataaccttgtttccccagggctggagctcatagtttctgcttggaattttgcatgctgcctcttcccaaatctctcgtgattttcttagaggtgctattgaaagttgagaaggacagttttctttctgagttggaatacgtggctacacaaagttggatagtatattttctttttgcatttaatcagtagaccagcaaagtgaaagttggttagcaaaggagcatggcttccctgtggaaaacccaggccaggtggcctgtagcacagaacgttcaccacatgctcaacttgttgtatttgcttgagggctattttttttttttaaatgtatagttttttgttttgaaagtgtgttatgtaggtggcattttcttttctttcttttttttttgggacagagtctcatgctgtcaccctgggctggagtgcagcggcacgatctcggctcattgcaaccttcgcctcccaggttcaagtgattctcatgcctcagcctgccaagtagctgggattacaggcacctaccactgcacccggctaattttttttttttttttttttttgagatggagtctggctctgtcgcccaggctggagtgcagtgctgcgatctcggctcactgcaagctccgcctcccaggttcaaaccattctcctgccccagcctctcgggtagctgggactatgagtagctgggactacaggcgcctgccaacatgcccagctaattttttgtatttttagtagagacggggtttcaccatgttagccaggatggtctcgatctccttacctcgtgatctgcccgcctcggcctcccaaagtgctgggattacaggcgtgagccaccgtgcctgatcgttttttttttgagacgaagtctaactctgtcgcccaggctggagtgcactggcgtgatctcagctcactgccaggtctgtctcccgggttcatgccattctcctgcctcagcctcccaagtagctgggactacaggtgcccgccaccatgcccggctaatttttttgtatttttagtagagatggggtttcaccatattagccaggatggtctcgatctccttaccttgtgatccgcccacctcggcctcccgaagtgctgggattataagcgtgagccaccgctcccggcctaatttttgtatttttttaagtagcgatggggttttaccatgttgaccaggctggtttcaaactcctgacctctagtgatctgcccacttcggcctcccaaagtgttgggattacaggcatgagtcactgctccccacccaatattttctttagactcatcatttgtcttttcagtgccccttgcgtagtttgtgcacctgagctgctgctgctgtgaaagctgctgtgtatgagtggtacacatctaattcctccaccctccccgcaaaacaattatagatcagagcatggttttataaggtttccttagacaaggtgacttgctttctgttggaatgagttctaattcctagagttgtatcatgaggctttaggtttatagtttgagagccagtacccattatgaagcttagaaaaagcttttagactggacacagtagcacatgcctataatcccagcattttgggaggctgaggtgggaaattgcatgaacccaggagttggagaccagcctaggcaacataatgagatgccgtctctaataataataaaaatatttcacttaaaaaatacataaataaggctgggtgcagtggctcacgcctgtaatcccagcactttgggaggccaaggcaggcggatcccgaggtcaggagatcgagactaccctggctaacacggtgaaaccccgtctctactaaaaatacaaaaaattagccgggtgtggtggcaggcgcctgtagtcccatctactcgggaggttgaggcaggagaatggtttgaacctgtgaggtggagcttacagtgagccgagatcgcgccacggcactccagcctgggcaacagagcgagactctgtctcaaaaaaaaaaaaaataataataaaaataattaaaaatacataaataagtaaatacattaaaaaagaaagcttttggcctggttctctctggatagcacaagcactgatttaatctataatgataaagaatagttgagtctctgcactagtaggtaagtgctttatctgtgataacccagttatttcattgtctcataattatatcatcatgacagagaaagccagcttaattttttggcctcatggatataaagactccatatcttgctgggaacagtgactcaacgccggtataatcccggcacattgggaggctgaggcaggaggattgcttgaatccaggagttcattcatgactagccttgacaacgtagggataccctgtctctactaaaaaaaaaaaattagccaggtgtggtgggtggtcctagttactcgggagcctgaggtgggagaatactctggtctggaaggttgaggctgcagtgagtcttgactgctccacttcactccagcctgggttacagagtgagaccctgcctcaaaagaaaaagattccgtatctgtaaggtgggcatcagaaaattttttagggtttttgtgagttgacttcatgtctttaattagtcctatgcttttgtaaagtagtttgcaatatgtacctcaggctgtactcttcactctggaagctatttgaaaagtgtgtgaactgcagtttggcagcacgtgatgacagcagttcattagagcctctttctgtgggaagaagcagattggttttctttttcttaggccatgagaaacagcttagtgggatcctcaaagaaggtcagaaccagaaccgggtttttcagatgttgataatgtgaggtgggttgcaaggagcagcccctggtaggcaaggattggggctgctttgtccagatcactgctggactgtaaggctaatgtctttgtggttggtagtgagtgcaagtttctcaaagtacatcagccctacctataaacccttaatgccccaaatgacctcggtcaccaaaccacttcagggctttatttttatcctatccgttttgtttcaatatgtgaggttggtttctttcctctaacagagcagagttctctgggggaagaaacagagtgccagggtgctgctgaggctggttaaacaccaaaaccacactcttcatctttctggggttgagacgtgacataagccatgctgcaaacgccagcttccacactgaagaaacctctctcagtagtcactttgtttattttttgtgtattgtgtttttaggcaaataaaatatagaggagtaaatggtgtaccttcccattctgctgtagacagagatctaacaatgagcacttgcttaaaatctgccatttcccagcttaaggtttttcatcctccccgagagtgttgatgagaactctcaaaactcaccaggtctcaggaagccggattaccagcatatcctgttcgcgtgcgtgtgtatattctgtgttacccacaggccactttccaccccacgtgacctttagttaccatccggaaagtcaggacccagatacccgtcagaatttccaggccttggtttggtttagacattttagaagatgttaacagcaataattgtaaaagactttgagtggcacgcatggtgaacagaaagtactagatcctgaagaggggggaaaggcatttctgtgctcttcctggtaaagtgtttgaaaatgaacattcagaagaaaacctaaagcacctgaaatgcacaggggacgagaatgagaggtgattagaagcccaacacatgcaccagttcttaggtggtaaggctaagttctgaagttcatatttcattctttaagattgtcatatgcattattggtgttgtttatagcatactccatcacactttattttaaccagcatctctaaattaatataaacagactaatgattcaggtaataccctagaacagggatgggcaaaatattgccagtggcctatgagctaagaatggtttttacattcttatgtcaggagttgtttaaaaagagcaacacgagacagagatgtacgtggctcacgaagcctaaattattttctgtgaccttttacagaaaaaatttaccactgctgtaaaagctgggagaggtgaatgcagttaatgataaggttcttctgttaggaaattgattgttaatgagaatgttatcgccttttaagcagacagttttttttttttgagaggcagtcttgctctgttgtccaggctggagtgcagtggcgcaatctcagctcactgcaacctccgcctcccaggttcaagcgtttctcctgcctcagcctccccagtagctgggactacaggctcctgtcaccacccgctgctaatttttgtatttttagaagagatggtgtttcgccatgttggccagtctggtctcgaactcctgacctcaggtggtcagcctcccaaagtgctgggattacaggcttgagccactgtgcccggccgacagttcttcattatgcaggtctgaccttgcaggatgtttagcgttcctggctctgctcattagatgccagtaacggcccacacatacttccaaacagttcctgggatgggtggtcatattctggttgagaaccactacttttgaagcttgacaaggtcaaaaacattttgttaaggtttactccttcatttcctctcagagaacctgacttgggatttggatcttgatggcctagggattaacaatagtgagagaatttgagtagctagtggaatagggagagttttcagtagggtggaatacaagattttaaggaaattttttttttttttttgagatggggtttcgttctgtcacccaggctggaatgcagtggcgcgatctcagctcactgcaaccttcgcctcctgggctcaagcaatcctcccctcccagcctcctgagtagctgggactacaggcacacaccaccatgcccagctaatttttgtattttccgtagagacggggtttcaccatgtgggtcaggctggtctcaaactcctgggctcaagcgatccacccacctcagcctcccaaagtgctgagattatagctatgagtcactgtgtccagcctaggaagtaatttaatgttgcgtttgttgcttgacacctattttaagaattgagattgatttgtgatttatgaaaggtttgttttgatgttgctggtgttgtgaaaagcacattcctctctatgtgagagatggagtagccatctttggccttaatatccagatgattttgaggtctgtgggaatctgtatggtgtacttgagggacttgttcaaagccaatgtaaagatgtagttttggcatctcatgaataacctgatatcccgacttaagccagaactctggcattagagaattttccagcttgggagagttgactgagaaaagtcctcctttggctccttgccaagttagacaagggagcaatcagctgctgagttccagccaactggaatgtacgtgagggggtactataaatcgtcccttaggatccagcttgtggtctgtgaagagccttccaaataagaatgagacctgtacattggatccttgttcaatctgcagctgctataggaaggagtagtgaggtgatgttactctgggagcagctcactttatatagtaacacactgcctgttatgtggggtaagactgcactaccctttatgtttttcccgtgttgcgtttctcaccaacttcctatattggtttttgtttctgactgttctcttggggagctgtatccatagtttgatcattctgtaaaatccctctttgctcttaaaggtgccagaatttcatctctctaccctcttttcaacatcttagatctgatgtatttgagctaagatagagaatatgaaatcgttgttttcttggctcgtgatccttccccagtctgcgggctgtttgtttgactccagggggaaactccaggttcttcccctcttggaagcctttcactttactcataaatatttagtattgaagtgaactgtgctcttttttttctccctagtatgagtggatagactctctagaccagaaagaatttaaaatactatctgtaccctctgtctttctgatgttttggttcctataaaatgtattaaccacacatttttatttttaagagcttaagtggttttttgagttgtcttccatcttctgatccaaaatttgttgagcatttattatagaaatcactaggcacctctcctgctactgttttttccgtgtcgttcatgcttagaaccatcagagagctatgtaactaggtaacattggttactagtagtactgcttttactgatttgtacttgagtgtgtcatcagcctctatgaagatacataaaaaagagacctagagaaggattgctgtttgtgttgcgtggtgtctttgtggaagcctgtggaagaaatttctgctcttagtagaaaatgggtttcttcaacctcatgcacatttgtaagattgttataatagcaaatttgtgaatttttaacccagaatgattctctattttaattgttccagaggttgtagccaaacttcctttagtaagtgtaaagggcgtttatcttcggtcgtgaccttactgtttggtgacctctttatctttttctctttggcttctctttcttgtttttatctattttatcttacagtatagtatatacctttgtatgttgcctaaaataagtggcttcaaagttttatatagatattttttctcttttcacttgcccattttgctgtaaaacctcctctgaggccagctagtagtctctgaggaaatcaagtttttccctgtcccaattcaggtcatttccataaatattcatggagcacctttatatattgttattctaggtactgcacacagaaaagtaagtgatgttggtccttccctcaaaaacacagtctagtaagaaaaaaggatatgtaaataaatacttgcaataaagtgttataaatgtaataatagaaatatatacactggacagaggtaaaagagattaactcagggtgaacaggtagagcgacctagaaaggtaatctttgtccttaattttgcaagtcaaagaagtattttaggtagatgtggtcagctgacttttctggcagaaggaacaacatggataaaaacatagcatggttcgaaactgcaaggaatggttgcttctgagattcccagccaagattctgtcattataatgtcttgggccatggtacagatgtccacattggtgctgtctgatcactcagttggaactgaagattcatcacaatgtagatagatttgagcttttgatttggctcaagcttagaagtgaatccttcaaatagttctttctctgctttattttatgtattagcaaaggttgactcactctaaagtcatgccttccatcattctgggaagctttctgagccaagcccagcttggcttaggaataagttatgctttgtgttgtaatcattggcactaagtcctattcttgactttcacacacacagtaggactgcagctcctgatgcgtatgggaaagaggaattgtgataatactcgctatggatttacatttttctgggattttttttcttgataaagatgctaaaaccttattcttgctattgagattttgagtttacttgtgccacaaatctctgagatgctaggtcctaatttgtcaagcaaactatgttaacacatttgacattctcttctgaggaatgtctttggcaggttttcctttagacttctggacagatctataaaactctatggcttttgaaatacttgcaagtgacatatgtcaaaaggttgaataaggcactaatagtgcccttcgtgctcctaggaagctgtcacttgtggtcactgcagaccaggagtgagatcttatgggttgcattcctaaatttctttttgtttgcatgaacagattttttaatctctttccttgtctttacatccgtacactggggatatagcatacaccatcaacacatctgcacagctttgtccaccgaggggtagcagaaagttgtttattatagcaccagtcatccgcatgtctaccacctcagagttagaataatggtggggattaggacatatggggcaaagggtatttattggctgtgaaacaaaggctttttgtggactagtagaaaaagttgtggcaatttaaaaaattattgcagagttaaaagaaatcttccaaaaatatatatacacagaaaagtgcacataacagagccatacaggtgataaattgtgacaatgtaagcatacttgtataaccagcagtttatttacttgtatcgctgtcattcttctcttccctttttttttttttgagacggagtctcgctctgtcacccaggctagaatgcagtggtgcgatcttggctcactgcaagctccgcctcccgggttcaagtgattctcctgcctcagcctcctgagtagctgggactacaggtgctcgccaccacacctggctaattttttttttttttgtatttttagtagagaaagggtttcactgtgttagccaggatggtctcgatctcctgacctcgtgatctgccctcctgggcctcccaaagtgctgggattacaggcgtgagccaccgcgcccgacttttttttcttttttcttaaatatatttttgagatagagtcttgccctgttgcccaggctggagtggaatggcatgatctcgtctcactgcaacctccgcctcccgggttcaagtgattcttctgcctcagcctctcaagtagctgggattacaggcacccgccatcacacccagctaatttttgtattttcagtagagacagggttttgccatttttggccaggctggtctcaaactcctgacctcaggtgatccacccacctcggcctcccaaagtgctgggattacaggcatgagccactgcgcccggcctcttcccttttaactctaaactcaaatttttttctatacgtttaatgatagcagtgacagagcattttaaataaattaggaagaagttaatgcccatgttttccttgctttgtggatccttgttaagattgattttcattgttcagagacagaggacgaagagagaatttggaagataaagaattggatcaaagataaaagatttgaggtgtttgctttgacttttgaactacagagtttgggtctgggaaccagcacagaaaagatttgattgaccaaaaaaactagctggaagcaggccttgcctccagtcacagtgaaactgagtctctcaccaacagtgctgtggtttacagccttcatcttgaagcatctggctgtggggggggaaagtgacatcatggcctgccttctcctggacatgcttggttcagctcagatgtggaatcccagaagatctgcaatgcgtgtttctagccttgtttttagtgtcaaggcgaatgccaggctgtagcaggccatgttgttgtctttgtgtaatccatttgtattctaacagttttcttctttttctgctgctagctgccagggaggtagagttgcctctgttgataaagagcagatacagaagttcacatccaaacctgaatgaccatttttaacttgaaacacttttcctgggagttgatgcgccagaatccttcccttatttggtgccttgcttaaatctgaagctcgcacaaggtagccaaagctccctgtgtgctggttatttgctttatggcaaataaccacagcagagtggtttgtgaaaccgtctttgtgaccacatctatcttaaactgaagcttcgttctcctttgggttcttagattagttcgtgctcctccctttcctgagagattcaggggttttcctgtatggcgttaggtaggtagagaggttatattttcaaatatttttctggactgtgcacagtccctttattagtgtgcgaatgcacacatattccttgaactttttttttttttttttttttggagacagggtctcgttttgtcacccaggctggagtgcagtggcacgatctcggctcactgcagcctcaacctcctgggctcaggtgatcctcccacctcagcctcccaactgggactacaggcgtgtgccaccatagctggctaattttgtttattttttgtagagatgaggtctcactgtgttgcccaggctggtcaaactcctgggcccaagtgatcctcttacaggcatgagctactgtgcccgtccttgaaggactctttccttattcatcaggctcctgttgctttatcaccatgaataaacttgttcagttttacaattttatcttttatctcttcttactgatactatttgagggtgcatgttgttacatgcttctgccaacttgcatggtattgtctggactggaagtatttacttaccttaatctccaagacttctctgttggtttggcctggtggtctctcggtgaaagaaagctgaaaccattggtgggttttgtttggggcttttgcttttggtctttatagaaacattctccgtgtctgtctcggttctgctgaaaaagttgccttttgtttgtgtgtttttgagatagagtctcgctttgtcgcccaggctggagtgcagtggtgtgatctctgctcactgcaacttccgcttcctgggttgaagcaattctcctacctcagcctcccaactagctgggattacaggtacatgccaccacaccgtgctcatttttgtatttttagtagaaatggggtttcaccatgttggccaggctggtcttgaactcctgacctcggccccccaacatgctggaattgcaggtgtgagccatcgcgccagttccttttttttttttttgagctggcgtcttgctctgtcactgaggctgggagtgcagtggtgtgatcacagctcacttcacccttcacctcctgggctcaagcaatcctcccaactcagcccatagagtagctgggactacaggctgcaccaccacgcccagctaattattttttcgtagaaacaaggtctctctatgttgcccaggctggtcttgaattcctaggttcaaatgaggttgcctttttttttttttttttgagacagagtcttactctgtcgcctagcctggagtgcagtggtgcagtcttggctcactgcaacctccatttcccagttcaaatgattctcctgcctcagtctccccagtagctgggattacaggcatgtgccataacacccagctaatttttttgtgattttagtagagatggtccttcaccgtgttggccaggttggtctcgaactcctgacctccgttgatctgcctgcgtcagcctcccaaagtgctgggattacaggcgtgagtcactgcacccagccaaggtcgccttttttaaaaggcgagaaataaagagctcaggctctaggcaagtcaattaacctctttgctgttttctgtaaggaaataatagtagtacttatcctcacagaattgttgtaatgttaacagacgcaaagtgcttagagtagtgtgctacacatagaagatgctatagaagttttgaccatctatatatgtatatatatgtgtatatatatatgtgtgtgtgtgtgtatatatatatatatatatttttttttttttttttgcgacagagtctcgctttgtcgcccaggctggagtccagtggcatgatctcagctcactgcaccctccgccttctgggttcaagtgattctcctgcctcagcctcctgagtagctgggactacaggcatgtgccaccatcagctaatttttgtatttttttgtagagatggggtttcgccatttggtcaggctggtctcgagctcttgatctcgtgatccgcccagccccccaaagtgctgggattacaagcatgagccaccaggcccagccaggaaaatttcaatgtactgtaaagtttgggaaccactgggctggaagataaatacaaaggcccgagttgggagcatactcatcacatttaaggagcagaaggaggtagtggagtaagattatataggtcttttgtaggccattgtaaggactttggctttcattctgatgttaagtgtagtctctttttgcccactcacttaggctggaatgtagcagatggaattgctactactcaggatcagaatccttaaatcctgacagaaataccttttcctttaaatacctttgggggccaggcgtggtggctcgtgtctataatcccagctactcaggaggctgaggcacaggattcttttggccgggcgcagtggctcacgcctgtaatcccaacactttgggaggtgggcagatcacgagctcaagagatggagaccatcctggccaacgtggtgaaatcccgtctctgctgaaaatacaaaaattagctgggtgtggtggcacgtgcctgtagtcccagctactcgggaggctgaggcaggagaattgcttgaacctgggaggcggaggttgcagtgagccgagatcacgccactgcactacagcctgggcaacagagcgagactctgtctcaaaaaaaaaaaaaaaaggaagaatcccttgaacctgggaggtggaggttgcagtgagccaagatggcaccactgtactccagcctgggcaacagagtgagactccgtctcaaaataataaataaataaatacatacatacatacatacatacctttgtctgggttttgccacattactctccaaaaagaagtggatttaaattctcacagatagtgatgtgtatgctctttccctacaacattcatctctttttctcacgagttttcttgtatatattgcctggataacctatttaatccgtatcaaatctatctattttttttaaaaattaagtctcactgtgtctcccaggctggagtgcagtggcaccatcacggctcactgcaatctctgcctcccaggctccagcaattctcccacctaagcctcacaagtagctagaactacaggtgtgcgccaccatgcgtggctgatttattttattttatttttattttttgtaaagatggagttttgccatgttggcccaggctggtctcaaactcctgagctcaagcgatccacccgcctcagcctcttaaggtgctgggattacaggcgtgacccaccgtgcttggcctttagtctttttaaaatactcatgcttggttctgcaccaccgctagtctgtaaattaagttacttggaactagaaccactgagacttaaagacagggctcatgattgtccaagtgtggaatgacaatcttcacatcttccctccctctgtgtttccattgccagtggatgattgcaacaacaaccttttacctggtctcctcacctccacacacttgactccacccaacccctcacccctcaaaaaaaccctaagttttcttttttttttttcttcttatttatttatttatttattttattgatcattcttgggtgtttctcgcagagggggatttggcagggtcatgggacaacagtggagggaaggtcagcagacaaacaagtgaacagaggtctctggttttcctaggcagaggaccctgcggctctccgcagtgtttgtgtctctgggtatttgagattagggagtgatgatgactcttaatgagcatgctgccttcaagcatctgtttaacaaagcacatcttgcaccgcccttaatccattcaaccctgagtggacacagcacatgtttcagagagcacatggttgggggtaaggtcacagatcaacagcatcccaaggcagaagaacttttcttagtacagaacaaaatgaaaagtctcccatgtctacttccttccacacagacacagcaacaatctaatttctctattctttccccacctttcccccctttctattccacaaaaccgccatcgtcatcatggcccgtctcaatgagctgttgggtacacctcccagacggggtagtggccgggcagaggggctcctcacttcccagaaggggcggccgggcagaggtgccccccacctcccggacggggcggctggccgggcggaggcgcccgccacctccctcccggacggggcagctggccaaaaccctaagttttctaaacatccagaacaacctttacaaatacaggtttgctcatgtcacttccctgctgaaaacccttcagtggctttaatgaagatcacattcttttttttttttttttttttttttttgagacggagtctcgctctgtcgcccaggctggagtgcagtggcgcgatctcggctcactgcaagctccgcctcccgggttcacgccattctcctgcctcagcctcccgagtagctgggactacaggcgcccgccaccacgcccggctaattttttgtatttttagtagagacggggtttcaccgtgttagccaggatggtctcgatctcctgacctcgtgatccgcccgcctcggcctcccaaagtgctgggattacaggtgtgagccaccgcgcccggccgaagatcacattctttaacaaggacctgtccaacatgccctgcccacttctccagactttcttacagaatcaatcatctagccatgccagtctacaatgtaccacttttgagaacatcatatatgttgttccctttgcttaagacacaccaggacgtgactccctctcctctccaaaaccaactgtttcttcaaccctcacttttcaactcaaaggtcttttcctctgagaggatatctctggtgctgcttctgtatatttccacagcatcctagccttccccagtcatggcacttcataattgtctgtgttacccatagaggaaggattatctctgccttgttcacagcttgtgcactgtgctttgtacataaaatgtgcccagtaggtttttgttgaatgaataaatgtatgggtccatgtgtgaggaagtcttcaccatccctcttacgctgtgtcaacctgttgatttataagatgggtttgatggccgagcacggtatctcacgcctgtagtcccagcactttgggagcccgaggtgggcagatcacttgaggccagaagttcaagaccagcctggacaacatggcaaaaccccgtctctactaaaaatacaaaaattggccgggcttggtggcacgcgcttctagtcccagctacttgggaagctgaggcacgattgttgcttgaaccccagaggcggaggttgcagtgagctgggattgcaccagtgtactccagcttgggccacagagcaagactctgtctcaacaacaacaaaaaaaatgggtttgagcttatgtatgtgctcttggaaaactgttatctggttgtccatgggatcacgcagtgggagcttcagccatttcctcttctctctcacttcctggagtgcagacacagcgtgtcctagctcccctactatttgggtggatgggcatgagagttcccaggcatgagagagatgaggcagaaagaagagtcattcagaaagtaactcagtcagagcaacagtgttgccctttggctgaactttctttctctttttctgtgtacctggagatgctaagctggtggcacatttgagttggttgttacagattgtcacaccacagcatagggattcataaatcttaatctggcactttcctttgatagggatgttttgggaaacgtccaggagccctctggcctaagtgaagtctccgttgggcttgggtgtgttctgtttctaccctgcaggtggaaacctggagagtcccatttatatttctctgtagcctttggagtgtgtgactgtccgagagcaggagtctttggcatttggtgtcacttgtgctatcatagaatgggatggtgcttacacagaagctggcaagaaaagttatatttacttagaattatgcatttgtgggctcttagcattgggagaaatactgaaaattggtgcttctcctgtggtggtgagaagtgggtggatatcagaatattctggtggcggaggggggtcttttaaaccatactcttcatcactacccatcttcacctcttagctcatgagaatcgtgactgtttccagtacacgtgtgtggtagctctgaagtgcggtgcaggaagaaacatcttttgagacaccagcgttgtagattatttagcccaggtatcagcagacattttttttctgtaacgatctggatagtaaatattttaggctactttgggagaccgaggcgggcggatcaggaggtcaggagatcgagaccatcctggtcaacacggtgaaaccccatctctactaaaagaatacaaaaaattagccaggcgtagtggcaggcgcctgtagtcccagctgctcaggaggctgaggcaggagaatggcgtgaacccgggaagcggagcttagagtgagccgagatcgcgccactgcactccagcctgggtgacagagcgagactccatctcaaaataaataaataaataaataaataaataaataaataaataaaataaaatattttaggctttgtgggccatgtgccctctgctgcagctactcagctctgcctttgtagggggaaagcagccactgacaatatgtaaacaaatgagggtggctgtgtttcaacagaattttgtttatggaaactgaaatttatatttcatataattttcatgtcatcaaatattctcttattttttttttcagccattaaaaaaatgtaaaaaccattcttagctcatgggtcatacaaaaacaggtggcaggctacatttgacccatggccatagtttgccagtgtctgatatagcccagtggtttccaaatctggctatctttcacagtgacctggagacctttaaaaatgttgattcgaagtgcccctctctcgtccttgaggattctgattctgtaggagtgaggaatctgtattttttataaaagctgttcaggtgatagacatacactcaggattgtggaattagcagtactgatctcactcatttaactgttgaagaaacagccctagaagatttatgtgacttcctgataattaacagcaaataaatggcatgaccaaaattcgaacccaggttttcaactcttaagatcagcggtctctgttcataccattctgtcatattccttcccccagtaaacacatgagcagtaaatacaaaatactgaacatattcgtggctccttcttttcttttctttttttttttttgagttggagtcttgctctgtcaccaggctggaatgcagtggcgccatcttggctcactgcagtctccacctcccaggttcaagcaattctcctgcctcagcctcctgagtagctgggactataggcacacccagctaatttttgtatttttagtagagacggggtttcaccgttggccaggatgggctcgatctcttgacctcgtgatctgcccacctcagcctcccaaagtgctgggattacaggcgtgagccaccgtgcctggcctccttcttttcttttttttccttttttttctgagatggagtttcgctcttgtttcctaggctggagtgcagtggtgcgatcttggctcactgcaacctccgtctcctggttcaagcgattctcctgcctcagcctccagtgtagctgggattacaggcatgagccaccacgcccggctaattttgtatttttagtagagatggggtttctccatgttggtcaggctggtctcgaactcccgacctcaggtgatccgcccgcctcggcctcccaaagtgctgggattacaggcatgagccactgtgcctggccccttcttttctttatacctggtgccagtttcctttctgagagccagccaggtactctgagctcggctgtccctctgctggttggctgtgttttctggagctgcctactgatttagctcaatttccctcagtctgctggctttaactaggagggataacgaagtaacaaattgctttagtataagaggcagcactaaactgcagtgcaaagttgagaggcattgtttcaaggggtgcgttagttggaagaggtagttttaaaaggcacattttacacttaaattcacatgtctcagatctagccatcttaagtgggacatctgtacaggaacttatgtttaattgaagctaattgagctgtcatccagccctgaacagttctggagtggaggaagtaaagggtgaagagctgttgccatcccggttctacctcagcctcagcgtggctctttggtccaagtaaggggcctaagggttgatttgatttgctacatcttcctacgaggcatttgagtcacgctatttggttttcccgtgcttttttttttttttaatctgtatatcctggaaagaggaatgctgaaagtactaataatgaataactctgtctttactgaatgattattgcattactgatgggtttccacattttttgtaccaggccccccttccctcattttttttttttcttagattccatctcatctctgtgacaggaaaaatgacagtaagggaaacacagtgcctcctggaaccttcataggccttgtcttaggtgtgggagcataaatggccagtgggcaagttggtatgttatttatctttgttcttggactataagctccttggcatcagagaccctatcttgttggtttcctcttatgcccagcataggagcgcagggatgaggatgacgtgtgaacaacatcaccagtgcgcccacatcctcctccgccttgtgatctcattgcttgagagagactgataagtgggctttgattgaatgctgtgaaagtcctggctgttttactaacaggtactcatgaaatttggtctccacctatgttgtctcatatctaagaggatagatcccttttctaaaatgcaagaaagttttgtttttttaaaaatatatggggccaggaccagtgactcatgtctgtaatcccactactttaggagggtgaggcagaggatcgcttgagcccaggagtttgagactccttggcaatatagtgagaccccgtctctacaaaaaataaaaaactagccaggcatgattgtgtgtgcctgtaggcccagctacttagaaggctgaggcgggaggatcacttgagcctaggaggtctagacaacagtgagccttgattgtgccactgtactccagtctgggtgacagagtgagaccctgtctcaaaaaaaaaaaaagtgtatataaaaatagagacattccatacagataagagaataataatttatgctcctcaaaatcactttaaaatgcactttggaattcctttaatactgactacccttactgtccttaaaatgattcacttttcagaaattcggtttttcacacgactctgtagaagcaggaacgactctttcggaactgaaattgggcctgtttcagaatcccctcctcttgcgttgttgcctctgagcagcttctctctccttccttgctccacagtcaccaagcccttagacacaattttgagtgataactttcaaggcttgtgtaaaacatctactcctcagactactttaatttgtattatttcatttcatccttttagttctgaattaggtaatgtcagtggtagaaattccattttacagtccaggaacaatccaaaacattttacttataatcccacagttaatgacaggacggactttattgtgtgtccagagacctacccatccatctactgccattggtgtctctttgggttgagctcaggagtccacagtgaatttgttttggacttgagctaaggagccagaagacctttaataattctaacactacctctcagggatacacccaagaagcatttttgtttcagtgaacagtaggtaaatatgtaaggaagatctgaacgcaggtggcctcacaatttgagaagtaacatttattttccacctgaccgagaaccatctaggtgtattgttaaaaatgaaaaaagtctgccaggcaaggtggctcacgcctgtgatctgagcactttgggaagccaaaactggaggattgcttgaagccaggagtttgagaccagcctgggcaacaaagtgaggagaccagcctgggcaacaaagtgagaaccccatctctacaaaaaatgaaaataaattagccctgcacattggtatgcgcctataatcttagcactttgcgggctaaggtgagaggattgcttgagcccaggagtcagaggctgcagtgagccgtgatgttgccactgcactccaggctgggtaacagagtgagacactgtctctaagataaatgataaaaattgaaaagtggtagaaatggaagccagtccatgctgatgtgttaggaaggaagaaggaagctcggactaaggtttttgtgactatgggtttggggtcagttaagagttctcgcggtggctcacgcctgtaatcccagcactttgggaggccaaggcgggcggatcacaaggtcaggagattgagaccatcctggctaacacggtgaaaccccatctctactgaaaatacaaaaaaaaaaaaattaacggggcgtggtggcgggcgcctgtagtcccagctacttgggaggctgagacaggagaatggcgtgaacccgggaggcggagcttgcagtgagctgagatagcgccactgcactccagcctgggtgaaagagcaagactctgtctcaaaaaaaaaaaaagttctccaaagtatctgtctcagtgctagttgacttcatattgtctcttgtaaatgttgtttaggtccgatttgatcaatatgtaacaaatctgctccttcatgtcacataccttctagatgtatctacatttttagctcctttcctaattgaagtgttattgatgacaacaaagagaaagtatgtttaacagtgaccttcagactaaaaataaagcggtggttctcattaactaaggttagggagagtgtgtgtatagtttgaaaaggttatctgagattttcttcactcccactagttgaaaagtaatgcattgaaatcgactttttgcagttaaaatacggtagtggcaagtacagactcaggtaattaggtgggcttcatctcctaccctaagggaaggatgtttgtgaagtacacatagaagcacagatgttccaaacctcttggggctctcgttttagtccaggaggtgttgtggttcaaacagtatgagtttcctacctaatcaggaaggaaaacttaaaagcaaaacttgaacggcttcttagttgctcttattccctcgttagcccttggttgaatcagctcaccagttcttttccccgagataggtgtaggataagagaaagaaaactgtgtttggaatctgaagacctgggttcaagttctgactctgccatttactaaagtaaagttgcttaaatttctgagttggcttgggggatggtatttaggcttgaatgaagtgggttagtatctttttatttttattttttattttttgagatagagtctcactctgtctcccaggctggagtgcagtggtgtgatctcggctcactgcagcctccgcctcccaggttcaagcgattcttctgcctcagcctcccaagtagctgggactacaggtgcgtgccaccacgcctggctgtttcgtttgtttgtttgtttgtttgtttaacagatactgggtttcaccatattggccaggctggtcttgaactcctgacctcatgatctacccgcctcaacctccaaaagtgctgggactacaggcgtaagccaccatgcctggcctgtatcttttttcttttttctttttttctctgagacagtttcattctgtcccctaggctggggtgcaatggagcaatcatggctcactgcagtctccgcctcccaagttcaagtgattttcctgcctcagcctctctagtagctgggattacaggcacccaccacccggctaatttttgtatttttagtagagacagggtttcaacatgttggccaggctggtcttgaactcctgaccgcagatgatctacctgccttggcttcccaaagtcctaggattacaggcgtgaaccactgcacccggctgtacaagtaacctttatatataaccagtttatgaaagacttaggatataaatagaaccagtttataagggattccttctgattatgaatgaattaaccaatttatgattgacatctataggaagagggataaccaagttaaaataggaagagagagagaatgtgtattcttaactttttatttgaaataacatcctatctgtggaaaagttgtaagaataacacaaaaaactcccacatattcttctcccagattctccagttgcttcatttcaccacttgcttcatcatttgttaggagagaatgttaacaattgagtgtttacaggtcaagcgagcatttagatccgttgcctaagatcccaccgcaggtaaatggcagaggtctttcatgggaaggtccctgtttctcaccatcttcctctactaggaaatctagagatctgcattctggccaggtttcgccactaatgttggtgtagccatgggcaatttattttgcagctgttcctcactcttgtattctagtgtttttgtgttttgttttgttttattttttgagacagagtttcgctctttgttgtccaggctggagtgcaatggtatgatcttggctcactgcaacctctgcctcccgggttcaagcgattctcctgcctcagcctcccaagtagctggcattacaggcacctgccaccacacccagctaatttttgtatttttagtagagacggggtttcaccgtgttggccaggctggtcttgaactcctgacctcaattgatccacctgccatggcctcccaaagtgctgggattccaggcatgagccactgcacccggcctcttccattctgttgatggaacccagtgtccctggccctgactcaccttgctgtatagacaggttatcttcaatgaaatattctgagctttttatctataaattaaatgagtgtaactcatttaaagcaaaaatagagtgaacattctatgcagagtttgatgttgatcattggttaagtgagaatgtacctcttttcccacacttggcttccatatgaaatagatggaactgccatagcttgattgatgttctgttttgtcagaggattaaacagggactttctccttgtggggcagactgcccagcgatactggactccttgccctgaccactgggatcctggggtcaagattcttcacttctcttcctggctggctacagagccctgaatatactgcttctaggagaccagggaagatgacaaggaggtttagtttttagattgtttctacttgctttggatttgaattgaaatttttttccctcccttgttttgctgagaaatagtttggtttcaatggaagtagattttctagaaccttgaaccacgattgtaaattggtggctcatgggccagatgtagctggcaaatgtgttttttggcttctttaatgcttaaattattttcattagtagccaacatgtaaaagccagagtatttcacataaaaatccagattcagccaggtgcagtgactctcacctctgtgatcccagcactttgagaggctgaggcaggaggattgcttgagcccaggattttgagaccagtctgggcaacgtattgagaactcctctctacaaaaaattaaaaattagctaggtgtggtgacacatacctgtagtcccagctactcaggaggctgaggcaggaggatcacttgagcccaggaggttgaggttgcagtgagctgtgatcacaccactgtgctccagtctgggcgacagagtgagaccctgtctcaaaacaacaaaacatgctgggtgcagtggctcatgcctgtaatcccagcactttgggaggccaaagcaggtggatcacttgaggccaggagttggagaccagcctggccgacatggcaaaaccccgtctcttctaaaaatacaaaaattagccgattatgggggtgcatgcctgtaatcccagctacttgagtggctgagacacgagaattgcttgaactgggaggtggaggttgcagtgagctgaaatcataccactgcactccagcctgggtgacagagcaagattctgtctcaaaaaacaaaaacaaaaaaacccagattgcagtttccagcttgggcctacatagaggatttggccaaaactggagtggaatagtcatagcttgctactgtctccatcagcatacttcacgcctagccctttagacacttgaattttcaactccagacctagaacatgaactctagtttttaaagctggtgaagtacaatttgatgagctagttagtggtgggttaccttgctcttggttgtcaaagagtcctgctttcctagctaggtaggtagaaaaataacccaaatagaaccagggccttcactattatccttgctcctgttagagtttcatttccatgattatggagccggagtggctcctagatcctcagagagctgtgggcacctttctttatatcctgcttattaggattcaccgcctcatcccctgcacacaggtgccactgccggcagagggtgctgtctgctcactgagcctgttgtcatcttggctcagctgagcggcagctgttgggcatgtgccctgggtctgtgagagtttgggcatgtccatttggttcccatccctagtgcccaccccttagaccctggccaggttattgtgtcactggggactctgttcagtaacaggaaactggggaaagtttaattgttttctcctctccctttttcccatgcagctgaacaaaaggttcatcctcagttttctccatgcccatgggaagctgtttacccggattgggtaagtgtgcaggatgtttattttattttcctacattacaagtcattttggaatttaatattgttagcaactggactgtgtttgtaactgagggcacagggtgtgaattcttagaggcctccaccttctcttctcttcccttcatcttctgtcctactgtgctcatgaaatttggtaaatattactctctatctctcttgtttcttctttctctacctttactaaaacactcctttaaatacaatcttgtcccagcccccaccccagtccctctgggtttctctttcctctgccttccggcttaggtccctagtgagtgcctcagggcagttgtgctaaatccctgggtgcagctgtcagggggtcctccttgggaagaatactgtccactacttttccatcaaaaataagagtaacattttctttctatatccttttgacccatatcctttcctcctatgctcagattcctttgccatattgctgatctcattagataccaagcctcttacggtttcatcatccaccatggatttccatagacatctcagggaaggtagtgtgtgcaaaactaacacttgactgcttaaattcctggaaacagatcgagttttgagtattcctttattccttggatggatccgagttcttcctctctgcataaaactagtgatcctaagcccaacgtaatgcctacacgccagagcagatggatgcctggtgcctctttagtataggatctccctgagtataggagagtgaagaaagtagtaggtggcagtgcccccagaccagtcttccactagaccagttttctactggattctaatattttctgagttggaagttgtattgtgagctaccctttggggtgatttgttttgaattatgaataccccagttattgtcaatgtttccctttcacttcccgtcataacttcgtaagtttatctgtaattctctagaaggcttttttttgagacagagccttgctctcttgcccaggctggagtgcagcggcatgactcgactctctgcaacctctgccctctgagttcaagtgattcttctgcctcagccccccaagtagctgggattacaggcacatgccaccgcgtctggctaatttttgcatttttagcagagatggggtttcaccatattggccaggctggtcttgaactcctgacctcatgtgatccacctgcctcgccctcccaaagtgctgggattacagccgtgaaccaccacgcccggcctagaaggctctcttagtggaggtaggggctatgtcagtttccacataccgttgtagttaacttttttgagaagcggaaaggcttggttccactggaagaaactctgctccacgggcggtggactagaaagtgtgcttattacatattcatttggtatcaacctgggtaagaatgatagtgatggtcattgcaagcatagtttggatttcaaaatgacttgggaaaattggacaaggtaccagtagatgaatctctatctgtagacataacaggtggagacattcacttaggcaaagtaaactagatgcatcactggtcccatctcctgcctcccacctcccccgtcctgccactgccactgccaccagtttaagttccactctggcagtttttgcctcactgttgtgttcctagagcctggcatgtagtatttgttgtacaaatgaatgaattataaaaagacggatggattgctaagcactgcagagaaatatgtagtattctagtaggttactgtagacccaagacaatcactagtgagtaatgtaaggctgtagttacaaggttgaaggtggataagatgatatcggtatcatcttaaaaataacacatccgagtaggaaataccattgtgctacacttaaagtgacagttgatggtactcctgcttctttcttattctttttttttttttttttttttttttttaaagagatggagcctgtctgtgttacccaggctgaagtgcagtggctattcacaggtgtgatcataccgcactatagccttgaactcgtggctcagcctcccgtgtcactgggactgcatgctcacaccaccacagatggcttatttatcttttttttttgagacgaagtctcgctctgtcgcccaggctggagtgcagtggcgcgatctccgctcactgcaagctccgcctcccgggttcatgccattcttctgcctcagcctcccgagtagctgggactacaggtgcctgccaccatgcccgactaatttttttttttttttttttttttgtatcttcagtagagatggggttttactacgttagccaggatggtctcgatctcctgacctcgtggtccacccgcctcagcctcccaaagtgctgggattacaggtgtgagccaccgcgcccggcctatttatcttttattctcgttttttcacctttctctcctttactacttttcactcagtgttttctctccttttttcctttgcctatgtttgttctttaaattttcccgtaccatgttgccctaagtcaggatttcccaacccttggtgctgtcgacattttgagccagatgactctgctgtgaggggctgtcctgtgcgttgtaggatacttggcagcatccctgccttcttcccactgtgcaccaaatgtgctgactcagaatgtctccagacattgccacgtgttccctgggagacaaagttgcccctcactgaaaaccactactctagatatttcttgccctgttagagacttttgggaataaaaaagttataaatcttggtgcagaatgtaggaacatttaggatatatttttatcaggttatgcagtagctaaacaccctgatttcccctccacttctaaaattcttatattttgacacatattttggaataagtttgggaaaggaccacagtaatgatgaaaaagcgagataatgaccgggtgcggtggctcacgcctataatcctagcattttgagaggccaaggtgggagaatcgcctgagcccaggagttcaagaccagcctgggcaacataggcagaagaccccatctctctttttaatgagtataatagataatttttttaaaagccagaaaatgagatctgaaaggaaaaattaattttgaaaaacattaaggtaaaaaaatacttatttagagacagctgtagggtgcctaacatgtttaaatataaaagggtcctaataggatagtcttgatttttatgggatgacagtaagagaaattggcttctgttgtagctggagagatttgggttaggtgtaagaaaatttcacagaagggaggatgtttgagagttttcttttttggaggcctttaaaaatgaatagatatctcatttgtctgaggtggtttactgtgttccaggttatttttcaggatctcttttattcctgcatataacatattctgttgtcaaaaaggtaaagccagcccaatttcaccttcctaagaaatgacttatggtagttttcattgaggaaaatgtatgtggattctaggcactacactccctctatgggtatcctcttattctgtcctggaggtaaaataaaattgagcgccatatttattctggaaggcagaaacagaaataacatttctgttgcagggaaaaaggtatagaagtctgtaagactaggaaagcaatgagcccaagccacacacaacatcgtagactgttgcctaattacgaagaagatgtgaaatgtgggcggtgttgaaaacgaattaagagtgaggagattgtaatggggagcagctgaaggcacatcactctcccgcctgccctttcggaaaagctcggacgctgcgcttccaggcatggtctgctctgtgcctggtgctccacactgcgtcagcagagactcgaatgcctactatgtgcaagataagtctcttaactcccagcactagctgacgagaggttcagagctttagaggaaatattcagtgccaaaaagagtttgtttttcaccacttactagttacaagatcttgagagtaaacaagtcagagctgctgcgggcttcaactaacctgatcagtggtttaaagatatggtctctgaggtccattccagtccttatgttctgtagtactatgatttgtttttttttttctcatttccaccctgtcacatggcttagttttttggttttggtcttttgctcctgggttattcgtatcttgctcgttttttaaaaataagaggttgagaaaaactaacctggattgttttctgcagagaatgttgtctagcccagctgtgttcctcagcatctgagggctgagtcctgctcggttagtcaccgtctgagtcagtcctgggcctaggtcccggtgttgtctgaaagattggtttcttgaaactgccattcaaatgaaacaaggtgtctctagagatcacatcacaaggcagccactttagtcagtgacacacacagcccgaaaacgatggtatcttctgaggttttaaaggatagggacagagtcatctcggattcgggagaagtactcagtcggggtgccatatggctcctgacagaccctttcctggtgagaggcagatcacacctgcacttggactccactgagagaggttaggaagctggcagcctataggctctgaatttgtgacaaatagtatgcttttgcttcctcttattgccttgatcacagttaccactttagcttttacttgcttgcctagtcatgctatttgcatagcttcgaagtctcttggaattcaaagactgatatatttattttgtacttttaatttttaaaaatataatgtttgtgtctgatttgctttttaaattaacagatgttcttaaatacaaaagtaagatgtattcattatgggagaaatcttttctttctttacagtgctctttgtaaagtatttagaaaactcagcaaagaagaacaaataaaaaattacccatattcctaccacctagagataactccaccgttaaaatttggtaaaattttttcaatttttttcctacatatcacatacacactttttttctattgctttacaactattttcatttaatatgtttggaagtttctctcacatgattaaaaaatgtaatacaacttaaaaaaactagtattcaattgtgtgcatgttccatcttaatcatctattgttgggcactttagattgcttccaatttttggcgattataaatgaccactttttgtatgttttctctgttgcttctcttcctgctttattgctgagactgctgtttcttcttggctataattttataattattacataagtattatccagaaatccttataaaagtataacattaaaactaagagtaaaatttcttttaactctgtgccctccaaaaagatagtagtagacatcagggcgtgtattcttccagacctttcactcatctacctacatacttacgtacgtgtccatcagtaatgcggggtgaagcaaagattatttctcagagagaaagacataaaactacttacaggtagtttgaggccagaattagatagcattttggttacaaaactggaaaccagaaaccacctactgagccctgaggagggttcctctctttatctgtgcctcccgtggttactgctgaacaaggctggttttgcatgaatagatccaccttctctcacatctcacatttgaagttactctaacttatatccttctgctttcagttttttcttttgttttaatcatgttgaattagttggaaggcaaagggagaattttttttaaaaaactttttataaaaaggaaatgtggacatttgacctggtgctcgttcaagacttcagtctgacccagagagtgttaatggatctgtttccaattcctactccagggaagaggcttcctcagacacagcttcgaagcaaaactgtcccacgtgacacttctgtcctgtcgttctgtgctggctctctactgcctttcaacacggagacacatggctctgaaacttgcccagcgtggctgcttttcaagcagagtgaacgctgctattctcgtaacgagaagtgctagccccctccccacctctgaccagaaagagtgctgcacagtgtcagggtttaaaatgaaacctttgttagagcccgtggggaaaaacggatctagtccagccccaaacatgtcactctctgccattccacatcttccaagagttttaacggctctgaaattttttagagaaaaaaaaaagagttttgttttgttttggaggggtgggtacttgaaatggcatgtggagaaaaaaagcaaatgcatggcatcttttgtgccaatgaaaatgaggacagctcagcagaggagggaactggaatgtaaactgtaattgacccataactgtggcacgacttctgggcaccagggggtcagtaataagagttgccatccaagtgcaaggagtgaagattgccaagattctagaaaacctggagttttctaatccagggaggacacttcccagtcgggaagggccgagatgggtgaagctagaagcaccttcctctagaacttgaaactgctttctatcttttgagaaggattaccttccttgtggcttttcagaagctatttgttaatccaacctggagctgtttccccaaccccacaagtatgtcacaagcagtttgtttatttgggggctgggggacatggtaaaaaatactttggtgaccacgaattgtttggcataaccctaaggcccatgtgcctggctactctctctagcaccaagcttgaacttgctttttatttctgaagacttcagctgtggtttgtttctgttgccaaagaagctccaggcatgcaccactgtttgggatccagtggccacatttggcaaggagtgatttgaatgacctctccttaggagccctaggtcactggctagatttctgcctccctgcgttacagcctcttcctgtattgggagtggcacttggccagggcattctatttccactggcctgaaaacatacagaccccgatgagcagagccttgtgagagggaggaggacggcaacacacgaagaactgagacagatgactgggggcttctaggtctaggcattcttcaaggggaaatttgggatcgttaggcggaacagtcagtgtgatagtacctcagaagacaatagcagaactatgtctggttacctaaagtaaacgcttgggtaaaatgtctttaggccgagtgcagtggctcatgcctgtaatcccagcactttgggaggccgaggcaggtggatcacttgaggtcaggagtttgacaccagcctggccaacatggtgaaatcccgtctctactaaaaatacaaacattagccgggcatggtggcacatgcctgtagtcccagctactcaggaggctgaggcaggagaattgcttgaacctgggaggcagaggttgcagtgagccgagattgggcgaaaaaagcgaaactttgtctcaaaaaaaaaaaaaaatttttttttttttgtttagattcacattacttttttaattgaattaagtttcataccagagagtttagggactgtgaaggtttcaggaaatttgttgagtatttagaaaagccgatggtttcagagagaaactttgatattagcttgaacacagttattgccaggggtgaggaaatagcataccaaagcataataactcatagtgatttatccaaaacttgagttgtttgcatctctggaccctgaaaactcctttatcttgaatttgttcaaaattgcaggataccgggaaggtttgtgaaagtagcaaagaaatgtcctaggcagtagttgtctggtgtgtgtgtgtgtgtgtgtgtgtgtgtgtgtgtgtgtgtgtgtgagacagagtgagagagagactgaaagagagaggtgcctcattgatgggttttctgaatctgcaggatggagacattccctgcagtggctgagaaggtcctcaaggagttccaggtgttactgcagcacagcccctctcccattggaagtacccgcatgctgcagcttatgaccatcaatatgtttgcagtacacaactcccagctgaaaggtaaggcatgtttagtttcttcatctagaatatagacagatagagattaatgtagcttctttcttgtgttaccatacctaccatacctacctccccccaccccacccccgaacacacacaccctaccctacgcttcctaccattgtctcagatatttagtttactttgaaatctgtatgactctctagtgcttgggtgggatggaaggagggaatcatgggtatagagcttaatttgcaaatgcagagatgcagttgcacatctggccacgcgaaaggcagcagcaaggcctcttgaaggctgcagacccagagcctctcccaagggagaggcattgctgagatgtttcattgcagagaccatacgcttggcagggattgggaatagctgtttctggactcatgtaccctgtttgttcaatatggaaaagtctagttccctatgggatatccctagtgggagcctgccagggagtaagaaccgagaattgatgagctttggtgactcaaatctggaagcacaaaaaccaccagtcccagaatttagctattataccagtgtgcattctaaaatgtttttctgaacattttggggttttttcatagggggtcgggtgggtgtggaagtagaggggagaaggacagattggcagggttttaaatgttctgatgaccaggtcagggtcaaaggatgttaccaggattccttcccttcccttccgttcccttcatttcacttaggtaaggatgatatggtatgacttgatggaattatgtagtacagggatgacattattttctgtgtctgttcgcaagggtaatttggtccatgctgcctaggagtcatttcagaacactgacagagagtgtttggtctcagggcaagaaatgccaggaagtgggaattggcccatagagaccctgctgtaaaacagatctggtgtttcttgacagagtggcgctgggtctcttgttgccccttttcatagcactttctctcaccatgaagttgattgatttatctccccgtttgtacttaagggttatgcttcacttggttgtggtgggggagtgaatatgccacactttgccttgaaatggaaatgcggatctttctgggactaggcaaggtcctctcagagtgtgtctgggttctcagttacttctgaatcctagaggatttcctcctctcatgctgcctgctacagcgtttagaattcccagcagaaagtgagatccaggggcttagatgcctttttgaacttggctaatttttcctgagatggctatttgggtaaatggccctgaggaagcatcgattcttaagtggcagcactggtttccagggagaagagaacaaagtttgtaaaatgctgtgctggtgaggcccaaaggggagggacagtctgctaccaagtaggaagcccacctgactctggaaatgggccctcctgaggtgccctcctgttcattcccatctcccactaaaaacaacccacagagttcagtgagctacctgtcacagagctgcagcctcagccaagacattgttccagcaccaaatgacctgtggcttctttaggtgtgaatgtaaaggacctgcctttaaataccaaaaattagctgtgcttggtggtgggcacctgtaatcccagcttctcaggaggctgaggcaggagaattgcttgaacctgggaggtggaggttgcagtgagccgagattgcaaactatactgcagcctgggcagcagagtgagactccatctcaaataataataataataattaagaattaaaagcccttgcccatgaagcatctgttttcagcagcttctattccatggaaaggaataccttggccttttaataggccaccagtgagtctttttcttgtagctgttgttaagtaaaggttaagaaaataatggtaggccgggtgcggtggctcacgcctgtaatcccagcgctttgggaggccaaggcaggcagatcacctgaggtcaggagattgagaccagcctggccaacatggcgaaaccctgtctatactaaaaataccaaaaattagctgcgcttggtggtgggcacctgtaatcccagcttcacaggaggctgaggcaggagaattgcttgaacctgggaggtggaggttgcagtgagccgagattgcaaactatactgcagcctgggcagcagagtgagactccatctcaaaaaataataataataattaagaattaaaagtaaaaaaaaaagaaaatacaggtaaaaggaaggtaagatggtgagtacagagaaagaaatcggttgttccctgatgtgaggccaaggcactttttctaggactcttccatggtgggtcataacgagtaccctctagccaggagagacatggaaaaataaagcccgtacttgagaccctacttttcatgactggtctgctcctgactctcacctcattgtcacctcgatgaggtcactggggccaagaagagtatgggttgaggtgttcagaggctccaagggtgtttcaaggaaaaacggcccaggccacaggatataacactcagtgaggacagagagctctgtggacgtgctgccaagtacccagtgtgcagctgaggtggccatccagaccccgctgtgtgggctgccattgggacaggggcgagcagagtgctcggcagggctggctggtgggaagatgcacttttccatttcccagcacatgagtcatcatctttggtcccctgtgctgtgctgtgcttgcctggacagtggcaataagggggtgttgtggctgagtagcagcatctgtgccgggggtggagaaggaggggggttggggagagggtaaagattgaaatccttcactaatcagcagcagttcgaatcacatttttatgagtaaggaagtgataaatcagcgctgtgtgttcaacccccaagtcccgtcagccagtgcccttctaaaggtttctcccctggccagtctgcattctgtcagagttgccacccaccatcagggccctggctgcctgaaaccaggaagcaagagcctgatgctgccttgccctcccaggtactggggtctgtggtgaattggcagtcactgcaagctacagaacatctgggccatcatttttctttccattccttcttggacatgtccttctgggtgggtggctgcatatgtcagtttccggactctgtggagaaggagcattccagccggaagcagaagtgatcttgtggcccaccaggccattgagatcctcacagtctctacctgggtcttccctgtagatgtggtgcctaaggagtgtgatttggagagccacaggggagcagattcctttctctaaaagtgtgtcctttgctggtgcctctaatgctaccgtgaatcatttgtttcttgtgtgttcagtgccacccttgtataactatcttctttctgcaatatcagtaatccaggatggaaatcatattgttgctaacgttttactgtgattacttttcaagtgtgtagaaaagctttggacactgcagaaggcaaaatgaaaggaaaagtttagatggtggtgagagaatggcatctttgcctttccctaggttatggttttcctaggagcccactctgctcttggaggcagaggatgtgaggccagatttgccccccttcctacagggcgaaataagttgagtaatgccacattatttaaccaactaaactttccagtttcagcagtggtcttaaaactcacgggttcacgggtgttggtggagagaccttgatctcctctcggttgggccctatgcagagtcctacgtcagtggatacagaattctagaatcctcatactgcacactcaggtagttggggatagataaatttgaggggtgggacaagggacgtttgagggccttggcatagggcctggtatgtattaggcattcagtaagcatttgctgagtgcatgggtgaagaaggcaacagttctgggaaagccagctctcaccgagcagtgtttcttacgtggaccaggtccaaagctggtggtgagataggtggttcccagagtgatgtcataactgataatctctctaaggcattcctgagcctgaagcgaggaagggctttctccacgtgcctccgtatttaacacttcggtagtcatctcattggttgacgtggtgccggagggtgacctattgatctaaaccacaagtactccaagaattttaatttttaaaaattttgtaatttaaggaaataaaactctagtttcttgaagggaagaattgaagcagcattgtggtaggggagcactgaaaccccattgcatcccccatctgtgcccaatttgttccaatctggcccttttttttttcttccttcattttctctccccctcttgttctctctttttcaaaaatgttttataattcctggaatcaaaaccacttcaggcacacactgttttattttactgtattattggattataccgcctataaatcactggatgttactcattggccaccactggaataacttcccttttctgtgccctggctccctctgttttcctctaccagtttcatagcacatacatccatttagctttgcagagaagccccggtggcagcaagagggcacccaagagacacttcttgcacgtgctattggtattgcctgcttttagggaatatttgggagctgggattaaggtagagcctgactggcattcctttcattatcatttatgcttgctttttttgggtggggggagggagggacagaatcttgctctgtcgcccaggctggagtgcagtggtgcgatctcggctcactgcaacctctgcctcccgggttcaagcagttctcctgcctcagcctcctgagtagctggggtcacaggcgcccaccaccacgcctggctaagttttgtatttttagtagagacgggggtttcaccatgttggccaggctggtctcgaactcctgacttcgtgatccgtccgcctcggcctcccaaattactgggattacaggcatgagccactgcacccagccttatgcttgctttgaatggtgttagtaatcctgaattacagaaggtagagggagtgtcacatgtgggtctccagagggagagagagctagctagctagctacagctgtctgtataggactgatagctttaacttgtaggtgtgggatgtttcatgccattgttgtgatgggaggtgactctagttgagtttggttcgcaaccgaagtgtccttgtcttccagcatacaacaatctcagagacgttcagaaaagcagtatgctcctctgtggtgattcacttctgtcgtgagtctcttacccaagcagaatgtatgaagtgcctaatcctccgcttgtcagaacagttgtacaggaaatccacctttcataaggggttaggcttgagttagctgtgtaaactggccccctcattcctcctcctacatctctggtggtagaaacccttgggctttttctctacaaggatctctgtgggtagatttctgtagggaatcgttgccacctgactttcattttcaggatgcctcagtttagagaaaatgaacagagccagcctgagcaaggaattttgtgagaagtagattcaaagtagaagtagattcaaaggtcagaataggttaggctttggaaggcaggccagagaaggatgcatgcttcagctctgccctctttccctgtgggggagatagaactcttgacaggccgcttagtgcagactgctctcggcactctctgcctgtggatctgcctgtagttccctgaagagaagtgagtatgtcaagggacccacctgtctttccacttctgggttccagggtccttgttttcagaatgtatttaggctggggaaggagaaataggaaaagccaaagaaatgagaaaattgtcatctcagtaaaattaagccttttatcatatcagttgaagaaatggtctttgttttgccccaagatagccatgtggtttggtgtccatggctgctttggtgtggagtgagagatgcaatatcccatgttgcccagatttcgtttcttttgccgttttatagcttgtcaatttgattgtttgtggttttcctttttttttttttttttttttttttgccccgacatggacttattctgaaggagaaacattatttggaggaattttggcagcaggacacttttcttttcctttcttttccttttttttttttttttttttttttttttggagacggagtcttgctctgtggcccaggctggagtgcagtggcacgatctcagctcactgcaacctctgcctcctgggttcaagcgattcccatgcctcagcctcccgagtagctgggattacaggcacaggccaccacacccggctaatttttatatttttagtagagacagggtttcaccacattggccaggctggtctcaaactcctgacctcaagtgatccgcccacctcagcctcccaaagtgctgggattacaggcatgagccactgcgcttggcctggcagcaggactttcagctaccttttcagagctctaagttttgtaaatgtatagcttgggtgtgggtgtggggctcaggccagattcatactgtatgctgaattcacagagaaagtaggtatgttctagggggctggtgaggggtgggaagtgttgaactttggaccctaaccaagtaaatgcctatatgaggaagaattgtagttttcagagggcgtgaccagtaatgacaaccacagcaatgactccatgctctaatacatgatgacactttatagttactgcatatgtgttttcctttgattctcttgtcagccctgtgagacaggctggacagatattttgtgtcctgtttcatagatgaggaaaatcatatcagaaaggttaagcagggctgcacagctagtaaattatacacaggtgtcaagtgtccatcctttgatatcagaaaaaagaaaaagcttctctgggcagctagacagtgcaaggaatgtccccccaaatctgagcactgttgttctctgatgaagaaagtgacctgtgaatctgatctgagataggaagaggaacaggagtaaaggtaagagagttggggtaagtcagaattctctgagtggcgtgacactcaggtggggctacaacaaataagctagcagaaggttgttgtttgggcaactcagggctgtctggagttcatgttcattattgtcatgggtagaggaaacctccctctcacatggaaagcgcagtccatgactagttggtagaagtgtttactctttctcttggcttaggatacatagtgtctcttaaaaagggggtgggcggatttttttaaggagcattgtttcatattttcaccatcatgtctagtatccctcttcttttagaaaagaggcctctcacatgcttttcttaggagagactgtgctactttttgtggcctggggggaaggtagatatgtcattgatacagaaaggagtgtgagagtataaaacatctgaaagaaggataaagtaaacacacatgtaactaccacccaggttaagaaatagaatattgtcagtccctcagatgttcctatgtacttcctctctgtatagctgtagttacctcaccaacaggtaactatcatcctgacctgcgaattcatttccttgcttttctttgtagtgttatcacctagtatgtatatatgtatgtgtgtgtatatgtatatatatgtaaaatataatttggggccaggcacggtggcttgcgcctgtaatcccagcactttgggaggccgaggcgggcagatcacttgaggccaggagttcaagaccagcctggtcaacgtggggaaaccttgcctccattaaaaatgcaaaaattaggccgggcgcgatggctcacgcctgtagtcccagcactttgggaggctgaggcgggtggatcatgaggtcaggagttctagaccagcctggccaagatggtgaaaccccatctctactaaaaatacaaaaattagccctgcacggtggcaggcgcctgtaatcccagctactgaggaggctgaggcaggagaatcgcttgaacctggggagtggaggttgcagtgagccaagattgtgccactgtactccagcctgggcaacaaacagagtgaggctccgtctcaaaaaaaaaaagttagctgggcgcagtggcatatgcctgtaatcccagctactcaagaggctgaggcacaagaattgcttgaacccaggaggtggaggttatagtgagccaagatcacaccactgcactccagcctgggtgacagagcgagagtttgtctcaaaaaaagtcaaaataaaacaaaacacataattttgctttgcttgcatagagatggtatcgtgctaatcatactatttatattcttttctccctggtttattttattccatatgtttgcgagttctgtccatgttcatatgtgtagctgtagttgatttattttcattgcagtaatcttacattttagtcacattagtttatccatttttccattgatgggcatttcggttgttttctctttgggactattataagcattgagtctattgatggttactgcagttattggtaccttgagagttatatgcatcatcctatattttaaaatgaattttgttgaagtaaagtttacatacaataaaacacacccattttaagcatgcacttcagtcagtttgacaaatttacatgcccaagttactaaccatcacaatcaagatagagagcgtttccatcatccccagaagttctctttgtgcccatcccagttgatctccatcccaccccttgccctaggcgactgcttatctgctttctgtcaccgtatgttagatttgtcttttctagagtttcatgtaaatggaatcctaagagtgtgcactctttgtgtctgactaatgtctgacttctttagctcagcatagtaatttttagatttattcatgttgttacatgtatcagtatttcatttccttgcattactgaggagtctggatattgtgtagttttgtttatccagttacctgttgataaacatttgggttgtttctagtttttcactagtatgaataaagctgccatgaacatttatatgcaagtattttgtggacgtgttttcatttctcttacgtaagtacctaggaatggacttgccggatcatatggcatgtgtatctttaactctgtaagaaactgctaaactgttttctgtggtggttggaccattttatattccctccagcagtgagaattccactttctttatatccttgtcagcatttggtattgtcatttctttttattttagctattctagtaaatgtgtggtgctatttcattttggtttgtgtttctctaataactaaggatgagagacttttcatgtgtttatttgccacttgtatatcttctttggtaagtgtttacatctcttgcccacttgctttttttcctttttgaggtggagtctcactctgccgtcacagggctggagtgcattggcgtgatctcggctcactgcactgcaccctccgcctcctggatttaaacaattctcgtgcctcagcctcccgagagtagctgggactataggtactcaccaccacgcctggctaatttttgtatttttagtagatacggggtttcaccatgttggcaaggctggtctcaaactcctgacctcaggtgatccacccgccttggcctcccaaagtgctgggattacaggtgtgagcccagccccacttgtttgttttttttttgtttgtttgtttgtttgttttaagacagagtctcgtactgtcgcctgggctggagtgcaatggcgtgatcttggctcactgcaacctccacctcccgggttcatgcaattctcctgcctcagtctcccaagtagctgggattacaggcacacaccaccacacccggctaattttttgtatatttagtaagacggggtttcactgtgttggccagactggtctcaaacttctgacctcgtgatccacccactttggcctcccagagtcctgggattacaggagccactacgcccggctcttttttttcttttttcttttttttttgagacggagtttcactcttgtttcctaggctggagtgcaatggcatgatcttggctcactgcaacctctgtctctctagttcaagcaattcttctgcctcagcctccctagtagctgggattacaggcatgcgccaccacacccagctaattttgtatttttagtagaaacagggtttctccatgttggtcaggctggtcttgaactcccgacctcaggcgatccgcctgcctcagcctcccaaagtgcccacttgtttttttatcaagttgtttgtctttattattacgtcttaagagttctctctataacctggacataagcccttatccgatttatattttgcagaaattttctccgggtgctttctcattctcctgtctcttctgtttctctttttcttctgtcttcttttggatggattattgtttccattccaccgttgtcgtcgtgcccctactccttacccccagcactagtcttcttttcttttagggttaccctaggaattaaagcatgcatacttcaccttgccaaaatcaaaagttaatcagatttccattctcctcttaaacaatataagaaccacagaaaaacttaaaattttatttattaaatttattttcccaatttgcatgccatcgttgtcatgtatattcttttttccttttaaaccctataaaacaagttatcgttatttttggtttgatttatttggttttttaattattattttgacagtaaatatttgttcaaacgcacctatattttttgaggcagaggctcactctgtcacccaggctggagtgcagtggtgcagtgttggctcattgcaacctctgcctcacaggttcaagcagtttttgtacctcagcctcctgagtagctgggattacaagggcatgaccacacccagctttttctttttttttttttctttttttcttttttttgtatttttagtagagatggagttcaccttgttggccaggttggtctcgaactcctgacctcaagtgatctccccacctcagcctcccaaagtgctgggattacaggtgtgagccactgcgcctggccttaactcacctgtatatttactgttaaattcacttttgcatttcagaccctctatctgggatcattttctttctgcctgaagtatactatttatatttagaatgtatttagtgaagttcttttgaaggcaaatattcttcatttttttatttgtctgaaaatgctttattttacccttattccagtaatagaattctagcctaacagttacttttgctcagcccattgaagataggttactacatctttgggctttcactgttgttgattaaagtcagctatctgttttgtttctcttttgaaagcagcctgtcttttctctctaggtgctttccaggtctttttaaaatctttgatgttccacagttttggtgattggtctaggtttggatttttaaaaattattcctgcgaagtatttgtcgggcttcatgtaacctatgaggttggttggttggttggttggttggttggttggttttcctatcagttttggaaaactcttagtgttcttttttcaaagactgcatctccccatgctttctcttctccttctgtgaccctgataagacatacatcaggcttagtttttgatgtctcttaaacctttctttgatttttctgactcccttctttttgtgctacattccagataatttccttaactatctttcagttcattgaacctttccatagctatatctaaccttctattaaatatgccccattgacaatgtttttaattttaataaattttttatttccatatattttttaaatcaaatctgctttgactttctttatggtttcttatttcccaaatatacttgtgagcttgtcttttatttctctaaaatatattcaacatggcattttagagactccataatctgaaatggtgtatttggggtgtagccttgtgggaccctagctttatgataaggatcttggctgtgtccatgcagccttggaaagcaaagctcgagttcatcaggtagcaaatgttcttagggtaaaggctgtttgtaatgccacacttacctatctggtttcccatctttattcaatctctgaccaaaggattttcttttattttactagctcacgaatgcttttcaaaaagatgtttaacatactctttttttcagaataatgagctgtttgattgggagaatggatctaggtgtctagtctgccgtactaccagaggaagctgggatttccttgttccatcagacttactcagactttctttcttttcttttctttttttttgctctgcctgtgatgcccatgagcagtgtgactgggcacctacatccagggtggcaagggcatgtagtttgctcttccaaagattagtttcttttccagctcctgcccatttacagctcagtcttatggcaaatggtgtcattgggctcacattttttcatttttccaagaggtgtccagtgtatagaatatcacttagagggctaattgggtggggaagaaagatcaaaggagtggagaggaaaggctgcagctgaagtgataggagccatttattgacaaaaagatgtgagttagagatttggaaaagagtactctgttgtttcagctacatcacattatatatctggtgaaccttgctggcccatgaaatcctttccattagtcagggttctctgtgcttttgttcttgactactgctgttcttagtgctattcggtttgcttgtatgtctcagtttccttttcagaaggcagattgtcgtctatttaggaatgcatttactgtaattggagtgttctggcttgtttagtcccctcttcaaatataagactcatatcttgaagcttatgttcagaaaatatgcgcgtgtgatccctttgccccaagtgccaacagcagatgtagcagttgacacgctgcagggaatttccaactgctgggcaggtttctgaaatccggacacgtgctgttcacactttggcttctgaggcaaggatcagtggttgaaagaggggaggagctggcaggggactgcagggagaaagatcttataatgcctgcccagggctttaggctgtgtcagctttctgcatctcttctccagctggagctggcagggtcgaataaatcactgcagagtagttatgagcccagctcaccagggacttctttgaggcacacctgtgacgtcatcctgttatcactgtctgttccacataacctcttttcacctctcccctgagagagggtgatgcccagaactcatgtcagggcaatgagcagaggaaaatgtttcgtaagtattatttttcagatgcctgctagggatacagttgtaggccattgacacattcttcaatattcctcattggaagagaaaacctgtgtttgcaaacatggcctgaataccccttgtggataaaacttctttttaaacttggaaagaaagtcttgaaactcctaagtggtctctttttgtaccccttacctctctcgttccttcccaaacatgcacacacagacacattacatacagagtctgctgtgttcaaaatccttcactgacttcccatttcactcagtgtaaaagccacattatttacaaggccttcatatatggacctcttctcctgccccccccccccccccgcccccgcattgcctctctctgagctcattcacgactgttctccccatggcttggttactctgcttcagccacactacccttcttgcaagttctctgctaagctggggactctcccacctttggcccttcgcattagctgttttctctgtttggaatgttctgcatccagccatctgtctggtgaatacctcgcctcctataagtctttgcttaatgttacttctgtgagacctgccccaaccatcctatttaacactgctgcattctactccaaacctgcactctttatcttccaattctattgatttattttctaaatactagataattaatgtgtatatgtttattatttattttcctctactattctgcaagaatgtaagctccctgcttataggggtctctggtctgttttatccactgatacattgtgaacatctaaaacagtccctgacctgttgtaacttctcagtaaacatgcgttatatcaagttcaagtcaaagaataatttgaggccaggtgccgtggccgacgtctgtaatcccagctctttgggaggccagtgcaggtggatcacttgagctcaggaattcaagaccagcctggccaacatggcgaaaccctgtctttactaaaaaatacaaaaattagccaggcatggtagtaatcccagctacttgggaggctgaggcaggagactggcgttaacccgggaggtggagcttgcagtgagccgagatcaccccattgcactccagcctgggcaacattgcaagactccgtctcaaaaaaaagaataatctgtcagcaggtcagcctggacaatgaagattgaatggcaagggcaggggcatctgttaactaggttactgctcataatcttactgtctttccttgttttttgttaaggtgactttcttgaaagcataatttccaaatgcatattttacatctggcattaaagtaaaatccattaaatgtgctttggtatctactgttgtattaatcctttctcatactgccataaagacatacctgaggctgggtaatttataaagaaaagaagtttaattggctcatagttccacaggctgtacaggaaacatggctagggaggcctcaggagaatcacaatcatggtggaaggcaaagaggaaggaggcacgtcttccatggctggagcaggaggaagagagtgaagggggaggggctacagactttaaaacaaccagatgtcccgagagctccatcaggagatagcaccaggaggatggtgctaaaccatcagaaaccaccccaggatgcagtcacctcctaccaggccccacctccagcactggaaattacaattcatcatgagatttgagtggagacacaatccaaaccatatcagctcttaaccctggagtaaatatcattggggctctggaaagtaaatttctatagaacagcgtaagttcagtcctttctggtctcttgaatctttcatcttttactctctgtcctttcttcctaactagaaatacttttttatttccctactcatatatcatatttttacattcacctaactggagcaattctgtcctatttatgaaaactaaatgattttttttaaaggatttaacattttgggtttcattgaaagtactaaaaaaggtaaagtagaaaccaacttctggcagtgacattctttcctatacgatgtataaatattcaaggagtttttacacagttgaaaagatactgactatacaatgtttgattctactatttttacttacaagtatacaaagctataaaattctttgtaaacatttgtaatttacatacaaataatagtaatggcaaaaagtgcaattacttttgtaccaacctagtataaactgaatcatgttctcatatgaatgtttttattgttatgtatattcactgtgttgcccaggctggagtacagtggcatgatcatagctcactgcagcctcgaactcttgggctcaagtgatcctcctgtctcagcctcccaagtagctgggactacaagcgcatgccactacgctcagctaattttttattttttgtggagacagggtctcactgtgttgcccaagctagtctcaaactcctgggtccaagtgatcctccttcctcggcctcccaaagtcttgggattacaggcatgagccgctgagcttggcttcacatgaatatgttaactttcatttaatcattaccctctttttgaacattttcttctcaggtttctagtattataaataaagctgtaattaacatctctgtacataaaatttttgtctgcgtttcatgttgttttattagaataggccaagcgtggtggctcatgcctgtaatcatgcaggcagatcacttgagcccaggagtttgagaccagcctgggtaacatggcaaaaccccatctctacaaaaaaatacaaaaattagctggatgtggtggtacatgtctgtagtcccagctacttgggaaaattatacgggagaatggcttaagcccaggggttggaggttgcagtgagacgagatcatgccattgcattccagcctaggaaacacagccagaccctgtctcaaataaataaataaatactatatttttagaagtttggttgttgggtgaaggggttttggcatcttaatacttttgatacatgatgctagattattttttcttttttctttttcttttcttttttttttttttttttgataaagggtcttgttctgtgtcacctaggctggagtgcagtggtgtggtcatagttcattgcattcactgcagcctcaagcttcttcttaggctcaagcagtcctcccatctcagcctcccaggtagatgggactacaggcacgtgctaccacgcccatctgattttcaaatattttgcagagatgaagcctcactatattgcccaggctggcctcaaactcctgggctcaagcagtcctctcaccttggcctctcaaaatgcgctgggattacaggcatgagccactgcacccgacctaggttactttttgaagaaggtgtatcagcttacactcttagcagtgtttgagaatgtccagcaaccaccttcctgtagacattaagcattttatttatcttattttgttttttatttttgaggcagagtctcgctctgccgcccaggctggagtgtgttggcgcgatctcggctcactgcaacctccacctcccaggttcaagctattctcctgcctcagcctccgatgtagctgggactacaggtgcccgccaccacgcgtggctaatttttggatttttagcagagatggggctttgtcttgttggccaggctggtctcaaactcctgacctcaggggatccacccacctccgcctcccaaagtgcggggattacaggcatgagccaccgtgcctggctgcattaagcattttaaattttttacagtctttggcacaatgtaggccttcatgtatttgttgaataaatggcagaataaaacctgtccttttaaaaaatagactttacattttaaagcagttttgtgttcacatcaagattgaacagaatatacataaaattcccatgtacctcttgtctcccacaacataaaaacttctccgctatcaatatcccacaccagagtgggacatttgttacagtcagtgaacctgtattgacacatcatcacccaaagttcgtagtttacattagggttcactctcggtgttgtgcattctgtgggtaactagcttatttttatacatcactctgagtgagtaagtttggagtcatcatggactacattgtcagggttaaatctttcacctcacctcaggtgatgacatgccagcacctcaggtgatgagtagctcaagcttggaaggttggcatgggtatgtaggtgagtagtcttgttggtttgccattacagggaggaaagaatgtggtttccttatttggttatctttttttttgagacggagtctcggtctgtcgctcaggctggagtgcagtggtgcgatctaggctcactgcaagctctgcccctgggtccacgccattctcctgtctcagccttcgagtagctgggctacaggcgcccgccaccgtgtccggctaattttttgtatttttagtagagacgggatttcaccgtgttagccaggatggtctcgatctcctggcctcgtgatctgcccacctcagcctcccaaagtgctgggattacaggtgtgagccaccgcgcctggcctatttggttatcttatttttttactaacgaatgaattgtctgcaccataacagaatgttatgggagaagcacatcattcttttggagtaaaagctcttggattaaaccttctattgagctgaacagcaagagagtaggctgtctgtgggggctcagggtgccatactcagccagacatttaaacatttaaatacaggtgttacccatctctgatggtccttttcattgtttttttttttgtttttgtttttgttttttgagaccgagtctcgctgtgtcgcccaagctggagtgtggtggcacaatctcagctcactgcaacctctgcatcccgggttcaagcgattctcctgtctcgccctcccgagtagctgggactacaggtgtgcgccaccacacccggctgattttttttatttttagtagagacggggtttcaccatgttggccaggatcgtctcgatctcctgaccttgttatctgcccgcctcggcctcccaaagtgccaggattgcaggcgtgagccaccgtgcccggcggtccttttcattgtttattctttggctctggaagtactgtggaaggtggctgaggggagccagtgcacttggctgtcttgggctctaggtgatgtgcaggaggatggtagagggtaatgagatatttttaaatttctttgctttaaagagttcagagagaagtgtaaagatggaatagaaaaatcctgcccagtttagagttggaccatgactcttctgttttctggtggttgggagtggtcagctgccaaaaatgtgatctctgcttttcctgaagaccgtgtggcttcatggttatgaactttgcaattgatcacattttggtaaaataatatatattatacatatattaattttaatagactgatggatatccatcaaaacttacccatgattctctaagatggtagaattaaacatgttttaaattttcttttttctctgtatttttgtagttttctgaaattatcacaatactttagtaataatgtattgtgtaaatgtatttttaaaaattataatgataaaaagaaatatttgaaattagataaaactaggttctaattctgattgtttacttgctgtgttatgcaaattacttaaccatttccaaacctgtttctacgtccagtaccttgtggatggaatacatttaataaatgtttgttgaattaaactttcctgccataatgtgttcgccactgattgccagtgtttctccccttcccataaaggaagattctgtttcttattttgaacttgaatttcaaaagaagcaacttaggttttgagggtataccagttgtcttgtttttttttgacattttgacattactgattcttctaactcttcctgcattccagaagaactaacaacctcatagatcaattagggaatatttagctcatcttgaaaatggaattattttagcttcataaaatgcataaatccctcaactagagtatgtctccatggggacaagagactatataatattttagcaaattcctaacaatgttcaaggctaactccaaaattagatgcttattctcacaaaaaagggccagaaattttgaaaaagttaggtgcctaatcagtgattgattgattgattttctaaggtctgaaaatgtataaagagtttaggcaaataagaaattaacagattgttgatttaaaaaaattatgtcttataggtaagtatttgtgccttgcaaaatgttaataccttagaattatatttttaaaaaattctgtaagacttccatgatgatgaagtcatcagaatccctttgagatggtaatgttacagtagactgctttgagaaatcacggtttaaatcttcagcctactttttcccccccttttcttagccccaaactgtggggacctctctctctccctctgaagacagtagaaagccaaatctgtaaaaaaaattcctattacctcactaatgctcttgaccccattccttggataccttggttggtcccttccaagggagattggggtagctgctttaccatcgtggtacctgccatctgagtttccaccttgcccgagatccctgaaggccaaaaatttctgcctactgggaagaggcagaaatacctctatgtgtgcgctgtttctttaaaagaaagtgtagcggaagtgatgctgcggggaacatctgcactcagggctgagggagagcgcgagatgcactgcagctggtgtaaggccctggcaggctgaggcgctgctgtctataggggtttacttctgtctgcattgaaacatggcttgggaaggggttggtggcctgctgccagcctcggttagcctgcccttctctttcctctttcctcctcgccgccccccacccaccctcactcccctccctcatgctttaaagtcgcatttccaggccagacgtagaattaatctctgggcacttcacattgctggcagctgaaagcaggatgtgggatctttttttctctctctttctctctctgcgtcttggctgacttttttacctctcgaagaatttggaaggccgtgagatccccccccacacacacaagtactgtggagtttttcagcacgctgatcaccctgctgcggcttcaccctaatagacttcatatgttgatgcagttgacatcagtatcaaactattttacatgtgatctggtgtatttcctgaggaaatctgcaagatatttattaagaactaataaaataaacctctccatgagtttttaggtagttttcaatttttcatgtctgtctcgtttcctcttatcaatgagttgctattttctctctctactctgaccatcgcaaaaggaaacaaaaataaatgttttaaactgttcctgaagggacagagagagaatagttctgccatgatgtatcagccgggactgtatttttagtgcagcattgtagaaactaaaaatatcctgttatagtagatcctttttataggtctgtgtgtgtgtgtgcgcgcgcgtgtgtgtgtgtttataatgtacgcacaagtgcctttgtgcatcagcagccactcttcacattacagctggactccattagtccttgaaaattaatgtaatcctagttaagaaaaaaattaattactgtaccagagctgtgttttatccaaagctagtgttagctccctagctggcagcttagtttgagaggctccagggccccgtggagttgtggctttggtatcgcagcattggctgctgtgtttttcctgtcgagagcattcctcagttctttagggctagacatgtggcatgcagaaagtaaccacagacccctctgcctcagtgaaatattatgttccagtctggtcatcccccaaaatggtgtccgtcacaggtttcactcacctgccatagcaggttttcttatcaggtttctttccaagagagctacttcgacagcggtatctctgttcatgttcttgagaggagaaataacatttatcaaagtccaggagacacatggaatttaaccgggaggattttgcatggacaattaagaatgacagtcacattttgcccttactttttgtttaaggatttgactagtttgtttaatatacaccttttattataaatgagtgtgtcagcgttgactgccggtttctagtcagacttctcagcaccagccctgggtgaggggctgactggctcagcatgtgagtaacgtctccagctttgtcatcagtgttctgggaagagatacggggcacagccgagaagccgttgccgtccacctcgccttcactctgcagctcttgtgcaattgcctgctctgttgttgtttgtttttcttcttcgggagcctggattggggtgggggggattgagagtggggtaggtaggaagattgctgtttctttgctggtcagactctccaggctctctgcggagagtccaggcaggatctgtctgacttggattgcagttctctttttctgctgagctggggtgtgggcagcctaggcctgtgtaactcgtgacaggcctcccaaagtgccatgatggcatggatcctcgtggagctgttgagaacaaaaacagggttagtgaccttttgtttctttttgggcatgggttctgagacttatctctgggccttatgttcctgctagtgactctaggtcccccggtcctctccccatcatcccctggctgacaaatggttgaactctcagcttcctgtacttgatccccaaacagtgtagttcagtaaaagtagtaattagggcttttacaaatttattttattagtgaagagagttggtaggtaatgggctgtaattctaacacagccagtttggagattaataaaaaattttaaaagagcagtttttaccagaggcagtgggcccgttatttcaagttctcggctgagccgaaatcagagtggggtgggatccgtggtagactttgttgctgggaggatgcaaagccacgttccttgttgttacagtctgtgcagtgcccatccttgagggtgttttaccctggcattggaaaaaaggaaaccttgttttccaagaactctgctctctctcagcttgataagcatttaaaaataaaagctgcacaattgaaattggcagtgcatcctcattcttttgtctctctgtttatttttttccctcatccctcaacatgtgtgctacagcccatggttattacaccctcaagaatgatggcctggaactcagcaaactcgcaccaacgtctgcccgccctgcattctgttgtttgaagctggctgcggcatcagggcctagcgctgagaggccgggtggatcagcctccacagctccatctgtggcacatttcccttctctgaagctgctgcttggaattttgagcttctccagaatcctgattgtcagctcaatctttcttgttagtttttgtagttaacttaattgatttgtttacctctccattggaggagctcaaaaagaaagtgctttggcactcagcagagcagttctgcctcttgaaaagattcttctgaggtagagttttataatactgacccagagaagaaaaaagatcctatggtttaggccagggtgactgtaagtcctggtttgcccagggatggatcctatttatgaattactcatagcacaccccttcactctcggaagtatcccagtttaggcgataaattttagcatcatgctagcttagatgaattcagcaagaaataacagataacccactcactacaaactgttaattctttgtctagaaatgtaatggcttcgtgaggcagcgccaaaccctgccctgagcattgcatgcagattccactggagtcatgcacatgtgacctcagaaagcattgctgtgtttctggctctgtgagtgtggactggccttcccgcttgagtaggtcccggttaagccaattttgaaacatgtcacttatttgagcattcctggttatcactgcctagttggttgagtcagaacctggagttagtttggtagggtgtggtttcaggtttgcagacatccccggttgatgcctatgaagggttggtgcctgatgtaactgaatagggtgctacttcaggttagtagtccttgttttctcttgactggttggactgaacctggtattactgtttaccaaagaatatttttggtttgaaaactgaaggtcagcagttcgcaagtgccgaacgtaaagccaactctgtggtttgtcttgtgccactgggccagcagcactgcagtcctgatcgattgatctgcagcaatataaaaccacgaacagcaactgccagacaaaactccatctcaccccatttccctgtccaacctgtctctctgcccagatcccctttctttttcctcgtatgtctgtctcactcttgcttatgtatttcacttttttgggtctatctttttccatctccctgtctctttccataacagttttaataatgttttagttagttccagccttttcgctgaatggatcccattggaaaatgcatttgaaaggaaacagttatacacttcccttcctttgaaactctgttggcaccttttccagtgcagtaaaccatacaacatgtattttcaaagtttccaaacagacacgctggcattaaatttatgaaaaaatattcagctatatggtaactgtgactttcagagatgctgatcagatttgaaattggtactgacttctggagctccagcaggttttcagatctctgtgggaaatataaccaaactggctcttggggagtctgtgatgcttggagccttggcttttgattggcaggttgggcaggaagagttggagcgagagatgtggatgtggggatccccagccacacccagagggaaacagggaaggtcagtgagtcagtgaagaatatggcatagccgtgttgggcacagtaacagaatgtatattccttctatgtgtctatgcatagaaggtaaactactttctgtttattccagccaagactgaaggtcaaagaacgccctttttttttttttttttaattagatggagtctcgctctgtctcccaggctggagtgccctggcacgatctcggctcactgcaagctccacatcccgggttcacgccattctcctgcctcagcctcccgagtagctgagactacaggcgcccaccaccacgcccggctaattttttgtgtttttagtagagacggggtttcaccgtgttagctaggatggtctcgatcccctgacctcatgatccgcctgccttggcctcccaaagtgctgggattacaggcgtgagccaccgcgcctggcccaaataacacctttttgttattttctttagggtgccaaggctaagaagagttatttattttccttcaagtcagtaatgatgttgctattgttaaaaatgtttacctcccaaaaaatgttctgaagcaaaaatatatatatgtattagaatttgtctatgtattttttcttattttttatgattgttaacttctttttttctttcacctttgaactgttgtccagtctaagacatcctgttatagcatgttctatgtatcttttttctatttttttttttttaataaaatccagctcctccaggaagttctatgtatttgaaagtccatcggtttgactgaggttggaatttggtagtcaagcatggtgatccttctcaagtaccccggcagtttgttcaggagatccttgggaatgctcttgaaagaagcctttcagaaggggatttcttccagattgctcaagcagaagctaatctgtgtcttggcttacctaggtgtaaaagctgagcatcctgcaggtcatgtatcccactcagttagttaacaagggtttgttaagcactcattatgtgtctttcttcttagctcttagcttgcttttttttttattttatttttttttaaagcttttgcctttgttggctgcagacagcatttccagaaatgctgtatctgttttctctcggtttgctcatcctctctgcctgtttcttgggtttcctctttctcgtgcagcatccagtatatcagcattaactaaagatactacgtttgccctcctctttctctttccccattggtgtattgtaaaatcttgtcgtttcaactgtcatctctgtgcaccctcgcaaaatttctttactgccctgatctttttcatgaactttggcccacatttctaactttttgttctatattttcacctggaatcgcaagtttattcaaaattgactcatccatagctggtttgcagtaatgcacaccagtagtcccagctactcaagaggctgaggaaagaagatcgcttgagcccagaagtttgaggccaaactgggcaacataatgagaccccatctcttaaaaaaaaaaaaaaaagaaaagaaaagaaaacggttcatcctctccctcacttgtcaagttccccccaggaagcagactgtgaagatggatatttgcatgcaggaagctggattggggcagagggagaaattgaactgtgttgcagctataacaaagggcttacccagtccagcaaggagctctggacctaggctaacctttccaagtactcccaaattgggtcaaaggggctgagtctttataccccctctctctccccaccaagtagttggatgtaggttacctgggaaggtgcggtgatttgggggaagtgcctttctttagctgagatcaagtctcagtgaaggtctcagtgaaggcctctttctgtacctgttttctgtgtattgcttgcctctctgaccctcttccctgcctggcatatagtaagggttcagtaaatggtagctttaattgttgtgtcacttttgtatacatatatttttacaaatagagctatcttggctgggcacggtgcctcacgcctgtaatcccagcactttgggaggctaaggcaggtgggtcattaaggtcaggagttcgagaccaggctggccaacatggtgaaactccttctctactaaaaatacaaaaatttagattgggtgcagtggctcatgcctgtaatcctagcagtttgggaggccaaggtgggcagatcacgtgaggccaggagttcaagaccagcctggccaacatggtgaaaccccatctctactaaaaatacaaaagttagccggggcgtggtgacacacacctgtagtcccagctactcaggaggctgaggcaggagaatcgcttgaacctgggaggtggaggttgcagagccgagatcgtgctactgcactctggcctgggcaacagagcaagactccacctcaaaaaaaaaatttttagctgggcatggtggcgtgcacgtgtaatcccagctacttgggaggctgatctcttaaacccgggagacagaggttgcagtgagctgagatggcaccattgcactccagcctaggcagtagaggggagactccatctcaatacaaaaccagaaaacaaatagagctgtcttacatcttactctcttgttttgttttgtttttttgagacaaggtttccctctgtcatccaggttggaatgcagtggtgtgatctcggctcactgcaagctcctcctcctgggcttaacccatcctcctacctcacctccccagtatctgggaccacagacacatgctaccatgcccagctaattttgatggagtctcactttgttgcccaggctggtcttgaattcctgagctcaggcaacccacccacttcagcctcccaaagtgctggggttacaggcatgagccaccgcacctggacatgttacgctttttaacggctatctatcccacgatacgtgtgtaccataattttagtggttttatattcatgtttgcaacctttttctgtccaaactatatcaacagtgagtttcatcattcacgtcatttcatgcctctttaaacttcttaagagatttttcactttcttctttgatttatagttgatagcataagcaagtcctgttagacttcagctccttgaaggtccagtttatgtctgattcatcttcaaaaactaagtgcccagcacagatccttacttgtagtagccacttggtgaatgctgactgtgtgaatataaagaaacgaattggttcagcaccatgtgaagtaccgttcagatcagcttcaacacccaggcgctgcagtaagcacttcagatttggtggggtctgcgctgtggacccctccctgttgggatttctaggctagtggggcagcttggtgaattgtaaatcctgtacgaggacagctgtgagcccacatacctggtgagtgttacagtatttctacaggtagaaatactgccagaatccagaggaggaggcctgtagtacaggtctgataacatgctggatcttgaaggaacgacttaggcaagggagaggaaagacgtaaactgtggagagtgggggtaggagaatggccattcaggagtgtggaggcaggtttgctattttgtctcttgactgtggtcattcaccatcttttgatgtgggaccctttatttatttatttattttagagagacacggtctccctctgtcgcccaggctggagtgcggtggcacgaacattgctcactgcagcctcaaactcctgggcttaagccatcctcccacctcgacctcccaaagtgcttggattacaggcatgagccaccgcacccggcaagtgtggggcccttttaaagaagcaaggcagtggtctataaataaacctgttaggtcttttgagccaggcagaagcaggtcagttctatcctctaaatggaggaagtctcaccaagaaaataaagttgaactggtgctttaaaaactgtctgtttggcagggggttgctaatcccacatttatggagctttgttctcgctaccagtgttaaaatataaatgtagcttttaaatccccttgctttatagcatactgttatactttttgttgtagaaatattccaaaaatgtgcctaaattaaattttacaatctagacaattccccctttatatccatacatttgtgtttatatatgtatatatttaattatagatattttaatatatcattgatctttttaaaacaatcttttctagtgtatgtcactttctcatttatctagagtttttctttaggactttagagttcttcattcctcattctggatggatcgttcatgatcagctgtaaagcatttttgcatttgggtttctctgacccttagtcagaggtgtcatgtacagaatgttgactaaacaactgcattagatagcaggtatccctctatttaaagaaacccatcatggataattttgaaataaaactgatcattttctaatttagtggggttttttgtttgttgtgttttgtttttttgagtcacagtcttgctctgttgcccaggttggagtgcagtggcaccatctcggcctcggctcactgcttcctgagttcaagtgattctcatgcctcagtgtcctgagtagctaggattataggcatgtaccaccatgcctgctatttttttttttttttttttttttgtatttttagtagagacaagatttcaccatgttggccagcatggtcttgaactgctggcctcaagtgatctgcctgccccggcttcccaaagtgctgggattataggcatgagccaccgtgcctgacctattgttattttaatttagttttatagatctttttaaaaaatattttactttcatctttatttgttttattattatcattatcgttattattattattatttgagaaggtgtctcactctgttgcccaggctggagtgtactggcacagtttcagttcactgtgacctccgccttcagggttcaagcaattctcctgcctcagccttccaagtagctgggattacaggcatgcaccaccacatccagctaatttttgtacttgtagtagagagggggtttcaccatgttggtcaggctggcctctggtcttgaactcctgacctcaggcaatccgcctgccttggcctcctaaagtgctgtgattacaggcatgagccactgctccccgccaaattttattattttttttagagacaagatcttgctttgttgcccaggccagagtgcagtggtgtgattatagctcaccgcagccttgaactcctgggttcaagtgatcctcctacctcagcctcgtgagtagctggaactacaggagcatgccaccttgcccaactaattttatttatttattttttttgtagagatggggtctcactatgttgcccaggctggactcaagtgattctccagcctcggcctcccaaagtgctggggttaataggcatgagccactgcatctggcctatagagcttcttaaaacaccatgtatctatgaatatgtaacttattcctatatatgggttttggaaaaatatttttagaattttatatatatatgtattttgtttcaccatatagataactttaggatactatttttggggtatcttttaacagcatgtgataagaggctgtgtgttataaaaaatattttcaggctgggtgcaattgctcacgcctatgatcccagcactttgggaggccaaggcgggtggatcagttgaggtcaggagtttgagaccagcctggccaacatggttaaatgccacctctactaaaaatataaaaattagccagacatggtggcacacatctgtagtcccagctactcaagaggctgaggcacgggaattgcttgagctcgggaggcagaggttgcagtgagctgagattgcggcactgtactgcaacctgggtgacagagctagcatctgtctgggaagaaaaaaaatatatatacacatatatatttatctatatatctgtaaggttattgttcacttttttcatatactatctcttgcatagagtccatgctttaaaaagttattttagaactcagtgctgagaaaaaggagttgtttttcctgaagaattgatatacttattcctttctaataatgagaactatacagttattggtgtttcctcttttgctttgcctgacaggaaattttaagtcaaattttaagtccgtttatggtaggctgttaatccatgtgattgacatttttacctttttcttggtcttgattctctaatctactttaatgttatctcattttatgtgattttgctgtaagttgtcacaaatcttttgtgaattgtggtataaaagagtaaatataaaaaattttaatctagtttaaaattagatacaggccaggcgtggtggctcacgcctgtaatcccagcaatttgggagtaattgctgtaatcccagcaagatggacggatcacttgaggtcaggggttcgagaccaggctggccaacatggtgaaactcaatttctactaaaaatacaaaaattagccagacatggtggtgagcacctgtaatcccagctacttgggaggctgatgcaggagaatcgcttgatcctgggacgcggaggttgcagtgagctgagatcgcgccattgcactccagcctgggtgacaaagcgagactcagtctcagaaaaaaaaccaaaaactagatacatacaggtttcaaacaatgtatattggtttcggtaagtgtattgacaaattgaccagtccagcaactgagtacaaatttggaagggctatgttactattaaggcagagttttactctgttgcccaggctggagtgtagtggcatgatctcagctcactgcaacttttgcctcccaggctgaagcgatcttccttcctaagcctcctgattagctggggttataggcacgtgccactacgtctggctcatttttgtatttttaatagaggtgaggttttgccacgttgcctaggctggccaggaactcctgagcttaagtgattcgcctacctcgcatcccaaagtgttggaattataggcgtgagccaccatgcccagctggaagcattattattaaaaggtatgtcgattccacagcttctaggtcaggagactagctggcaccttagcacatttctagtcaccttcattcattgctgctttctcacttccttccttggcataactgctttatctagcttattattctcctgacctctactttaaaactagatgcaccacagtgggtggggttggatgaagtcattacgttcgcagtttggtttggacattgatcatggattctgaggccttgaggaaccattttgggatgagtttctggagcagagtcaaatgaatgtgcagatctggatattcacaaggtaaccaccaaaaaattgtgccttatcattggtcttatttttcagtactgacccctcaaagtttgtttgatgactctaatctttacattctggaagcttcctgaaaaagctaacttctcagaaggcctccaagaggtcctttttattctaggtacctttctgtctcacctatctcggaattgttttatttttggcgttgtttacaaacactgtcagacttttaaaaatccttagctgggcatggtggcacatgcctgtggtcccagttacttcagaggctgaggtgggaggattgcttgagcctgagaggtcaaggctgtggtgagctatgaccatgccactcaactccagcctgggcaacagagcaagaccccatctcttaaaaaaaatcgttcaggaagccacagaatgaaaagaaattgagttaatttgtaaaaatggaagcagaacacttccctgcccctctgcctgccctgtcaatggagtttctctgaatcagggtgtctgcaggcattatccctccctaatttttacttctggctcaaagtgctcctgaagcttcacgccagcagaggtgggtttcaaggtgtgtgtctgaatcagcagccaaatctctccttgctttattaaaagtgatatagctatatttctccctcctgactgttaacaggaaaacttccttctagattggctaatgggtatgcctcttaggaagcctctttcatatcacttctcctccacaaccttaaataacttttgacacaggacacctcatatctgctgtatgggattccatagggactacctgtcttgtttaattaaagacctgccatgcttttctactcttcctttgcttttcctcaaatactgggagagaggcaagcttcccaaaacgtctggcaagcagtgtagaagcagaaactctgtcctgcaagatctgcttgtaactcttccaaatgagatgctggaatggcaggccctcgttctcctgggccccattactaagggactcgtccagtgccagcatgctattctgctggcagcagctctgtcctgcccaagaggggatgtgtattgaataactctgggctcagacagtaacctgtaagtaacaaaaatatcaatccagagacacaactaaggtggaaatggccaaagtgtgttttgactggcaacttacttatttatttattttccaggaaatctattggagtaccatttctgaaactgcatgggtatttcctggaacaagggaagcacccatttagaagtgttttcattttttcttgtagagagtagatggtttgctgtctttcttgccaagatgtattgatagagcccccaggacatttcttggccctggagtcctatataaagaagaagggaaagccagggtgtcctctggagggggcctagcacttctggagatcattgtctcacctgcagaaggcagcagctgtgtggtaatgctgtacagagctttggaatcaacctgatggagggcgagaattctctactcagccacttgccagctgtgtgaccttgatgacgaaagtttacttaccgtctctgaggttgagtttctttgttcataaagcaggttatcagtgccaattctcaggggttttctgagtgttagataaaatacgcaaaacaccttgtccaaggctttgttacctactgggtactcatgtatgtctacttttctttatcaaattagcctccagttatgaactcttaacagttcaagtgaagggtcagactaatgtgtttctaaatgtcattactctatttttttttttcctttttcagacacagtcttgctctatcacccaggctggaaagcagtgatatgttcttagttcactgtagccttgaacttccgggctcaagtgatcttcctgccttagcctcctaaatagctgagactataggcacctgccaccactgcaggctaattttttatttttttctgctagaggtagggtctcactgtgttgctcaggctggtctcaaactcttgggctcatgtgatcctctcctcttggcttcccaaagtgctaggattacaggtgtgagtctgtttttgacattcgaatgattaagtagtttattcctttttattgttgaatagtcctcactgtgtggatataccacaatttatttatccattcacttgttgatggatatttggtgttttctcctccagtttttaaccttcatgagtaaaactgctatgaacattctttgcgtgcatgtatgctttcatttttagggagtaaatacctgtgagtgatatagctgggtcgtttggtacttaacttttttttttcctttgagatggagtctcgctctcttgccccagctggagtgcagcggcatgatctcagctcactacaacctccaccttctgggttcaagcgattctcctgcctcagcctcccaagtagctgggattacaggcacctgccaccatgcccggctgatttttgtatttttagtagagatggggtttcaccatgtttgccaggctagtctcgaactcctggcctcaagtgatccacccaccttggcctcccaaagtgctgagattacagccatgagccaccgcacccagcctggtgtttaactttttaagatactgccaaagtggttatattatttaacttttttttttttttttgaatcaagtctcactttgtcacccaggctgtagtgcagtggcgtggtctcggctcactacaacctccacctcccaggttcaagctattctcctgcgtagttggcattacagtgcctgccaccacgcccaatattttttgtgtttttaatagagatggggtttcaccatgttgatcaggccagtctcgaactcctgaccgcaagccatccacacacctcagccttctaaagtgctggggttacaggtgtgagtcactgtgccccggtctcatttaacattgttaaagcagtgtgtgagaatttcagttacttgatatcctctccaatgcttgttattgttcatccatctgttttattattgccatgctgttgggtatggagttgtatgtgtgattttgatctgcatttccctaatgattagtaatgttgagcatcttttcatgtacctacttgccatccatatatcttctttgcccaattttttatttattttgctgagttgaaagagttctttatatacctcagttctgagtcctttgtcagatgtatcttttacaattattttctcccagtgagataattttctgtagctttccttttcattttgtcttttgaaaagcaaacatgtttgattctgataaaatcacctactttttagaaaatgtttgatttgtaattacagatacattggcaaaggggctatttatcagagtattgcagttgatgctgccaattaaaaaataaataatgggccgggtgtggtggttcacacctgtaatcccagcactttgggagttcaaggccggaggatcacttgagttcaggaatttgagaccaggaggttgggaggccgaggtgggaggattgcttgaacctggaaagttgaggctacagtgagctatgattgcgccactgcactccaccctgggcaacagagcgagagcctgtctcattcataaataaataaaattaaattaaattgtgtgtatgtgtgtctgtttgtatatatctagggctaggtgcagtggctcatgcctctaattcttgcactttgggaggctgagacaggaggatcacttgaggccaggagtttgagaccagcttggtcaacaaaacaagaccctgtctctacaaaaagttttttttttttttctgtcgtgggtttgggggaaggggagggatagcattaggagatacacccaatgtaaatgacgagttgatgggtgcagcacaccaacatggcacatgtatacatatgtgacaaacctgcacgttgtgcacatgtaccctggaacttagagtataattaaaaaaaataaggaatacagggcttaaattcacgtttttaaaaaaggtatatgcaggttgaatcccttttagtctccacttttcagcaaagtttacctaaaataaaattcatttactgctggcacttaaaaaaaacaaaaagttttttttgtccaggcacggtggctcactcctgtaatcccaacagtttgggaggtcgaggtgggtggatcacttgaggtcaggagttcaagaccagcctagccaacatagcgaaacccatctctaataaaaatacaaaaagtagctgggtgtggtggtgggcacttgtaattccagctactcgggaggctgaggcaggagaatcgcttgaacccgggaggcagaggttacagtgagctaagattgtaccactacactccagcctgggtgacagagtgagactccatctcaaaacaaacaaaaaaaacaaacctttgttttttgagacagaatcgtgctctcttacccaagctggagtgcggtggcacaatctcagttcactgcaaccccgcctcccgggttcaagcgattctcctgcctcagcctcccaagtagctgggactacaggcacacgccaccacacccggctaatttttgtattttttgtagagatggggtttcgccacggtggcccacaggctggtctcgaattcctggcctcaagtgatcatccgcctcagcctctcaaagcgctgggattacaggtgtgagccactgtgcctggcctacaaaaatatttttttaaatcaaaattaaatcttttttatttttatttatttatttatttatttatttttatttatttttttgagacagggtcttggtctgtcacccaggctggagtgcagtgacataatcactccacaatactgcagcctcaacctcctgggtctcacactgtattgcctaggctggtctcgaattcctgggctcaagtgatgctcccacctcagcctcccaaagtgctgggattataagcatgagccaccatgcctggccaaaaataaataccttaatatccatctgattgataatccaaagcaacaccaaaaatgcctaagtagtttcctttatgaagaaaacagtactcagactcatgtttgaagccgctttttcctctgactgccctttcttgaagaatgtgcataccattggtttgagatgtgtaccttatttttgagaagcaagaacattttttaactgctcgctcagtttctgcaattcattcgtcatctttcttcactttctcatcaccttcatcttgtgctgcttgctgtggaatttactgatccagtgattcacggccttgacgatgacgttctcttgctatactccttattctttagacagaagttctgtcttcagtgaacttttcttttttttttttttttttttttttaattttattttattttccttctggttgcccctgacagtttcttgtgtaagctggtgaggagccgcaactgggcatctccaccagctcaggccaggcagcagaagatgagaacaaggggctccagcatctggacagggtaatcagctactgttaattgagaaagtatcccccaagtgactgagtaacccttttctgtgtaaaactttctggaatgctgtgtcagatcttcttcggttttacttgggtttactttttttgttgtgtttacttgtttaaagctttttattttgaaataattatagattcacaggaagttgttttaaaaatgtacagagaggtcttatgcacccttcacccgtccttccccatttttcatgtcttgcatagctttagtatatatcaacatcgtgaaactgacattggtatccactgactttaatcagatttcacaagttatcttgcacttgtgtgcgtgtgtgtgtggggttctgtgcaattttatcacacatgtagcttcatgtaactattactataatcaagatgcagaactttcccaacactcaaagctccttcctgctctatgctttagaaccatccctaccgcctttcagcccccaatcctaacccctggcaaccactaatctgttttccatctctataaatatattatttcaagaatattatatagatgggattgtacagtatataaccttttgaagctggcttttcactaagcgtaatttcctggagtctgtccaactcactgcacgtattggttgttcattcctttttattgctgagtagtattccctgtattccctggtacggatattccacagttgtttaaccattcacctgtggaaagacatttgggttgtttctagtttggggccattatgaataaagctgctatgaacatttatatactggttttttttctaaacgtaagttttcatttcttcaggataaagccccagagttcaattgctggatcatatcataagtgcatttttagttttagaagaaactgccaaactattttccagagcagctataccattttacattccatcagcaacgtacatgtgatccaatttcccagcatccttaccaatatttggtggtggtactgttttttattttagccattctgatagatatgtaatgagatctcactgtagttttattttccatttccctaatggctaattatattgaacatctttgcttgtgcttattttctatttgtatatcctctttgatgaaatatctggtttgtctttttttttgcccattttctaaatgtattgttgttttcttactgttaagttttgagaggttttttgttttttggtttgtgtttatttttctttatgtgttgttttttttgagacagggtctctgtcacccaggctggagtgcagcggcactgtcacgggtcactgcagccttgacctcccaggctcaagtgatcctcccacttctgcctcccaagtagctgggactacaggcaaatgttaccacatccagctaattaaatttttttttttttagagacacagtcttgctatgttgccagggctggtctcagactcctgggctcaagcaattctcccaccttggcctcccagcgtgctggaattataggcgtgagccaccgcgcctggccaggttttaagagttttatatgtaatctggttactagttcttcggcagatatgtggtttacaaacagattttcctagcctatcatttgccttttcatctttttacagggtcttttgcagtgcaaaagtttttaatttttatgaaatccagtatatcagtttttccttttatggattgtacttttggcattaagtcttagaactcttagtcctaggtcctgaagattttcttccatttttttctaagagttttatggtcctatgttttatatataagtcttcgatctattatgagataatttttgtataagtgtgaaagttaggtcaaggttttattgctttgtttttttgcatacagatgtctaattgcttcagtaccatttgttgaaaagatattcctccttttaattttattttagaagaggtggggtcttgctatgttgtttacgttagtctcaaactcctgatctcaagcagtcctgccttggtcccccagattgctgagattataggcatgaaccaccatgcccggcccctttcttcattaacttaacatcagggagaacgatttctcccgctttattctttttcagaattgtttgaaatgttctacatcctttgcttttccagataagctttagaataagcttgtctttatctacgtgaaacgttcctgagattttgatagctgttgcgttaaacctatagatctattgtctacataaaaccttcctaagattttgatagcaattgcgttaaacaattaactggcatctctacaatgctgagttgctcagttcatgaacatggtaactctccccagtttttaggttgtcttttattttctgggttttgtttttttgagacagagtttgtcacccaggctgaagcgcaatgacgcattctcggctcactgcaacctccgcctcctgggttcaagtgattcccctgctcctgcctcagcctcccgagtagctgggattacaggcacgcgccgccacgcccagctaatttttgtatttttagtagaaacagggtttcaccatgttggccaggctggtctcgaactcctgatctcaggtgatctgcccgcttcagcttcctgaagtgctgggtttacaggcgttgagtcaccatgcctggctttgtctttgattttcatcagcattttcagatttttagcatagcgtttccgtacgttctgttagacttatacctgaatatttcattttctttgtcactattgtaaacgatggcatgtttttcattttggcttccacacagtcatcatctctgagctctttgtgcagcactgtggttggagtagtctgagcttttcatgttcatagcaaaggagagaggagcagtgggagtgtgacacttgagtcacgggcgtgtgaaaatcagatatgcaaacaatgtgggcatgagagcagacagaactggattcagatcccagctctggcactttctagccttgtgttattgggcaggtcatttagtctctctgagcctgtttcctcaaatgtcaaaaaggagaataatactcaggcaatccttttgtaaagctttgagataatatatataaatattgtttgcctaacataggtctcaaaatgtcttagttattatgtctggccacagtggaatcatgtcattcatggttagatccaaagtgagagaggcaagtgtgcctactattatgagcagcaaatgtttcttgaacctctctatggtgctgatttccaaggatgtgaagtcttgacatagctcttgccctcaaggggcttataattctgttgaggaaacctactgtatgaataacaattccaggacaaggtattgcttgttaagttccaaataggtgggcagacagtgtgagtgcatcaaagaaccttctctgggttttgtttgcccttttgtaccctgtccattgaggtggcttctggatgttgttgatgagagaatgtgtggaggtgggagagggtgtgtacagatttaggggaagggtgtcatgtgggaatatgtaattaatttttatactttccccagtaaaccatcgaccctttttatgatgtcatgagggattccttaattttgcagctgcttcctgattacgtcagagaggagcctgtcaccccacagcctggagctgtactcgtacaagaattggaaacaaatgaagtgccgaatatctaatggcttccacagggagcaccagttcagacttcccaggccgcctcttgctaggtcttcctcaagtatttctgaccccctgaagtgtctttgttctggaaagacaggacttggcccagagccaagagggagggagcctggggactccttgacacatacctctctccctccaggtgttttgcagtcctgagtttcttcccccttacttggatcttgtttggtgagttgttactcttcttgagttttcaggatcctctggaacctgccgagaatacacgtgagagtctttgacctgctccagcagtcttcacccctacgtaccccctcaacagcattatctccagcctcttttgatgtttctttctttttttttttgttttgttttgttttcttttcttttggtagagacagggtcttactctgttgctcaggctggtcttgaactactgggctctcaagcagtcctcctgcctcagcatcccaaagtgctgggattacaggcgtaagccaccattcctggcctcttttgattttctttctgcggtaattttcatatctgtgcactgcttttcattccctcttctacctctattataagaagatgttacccttacttggcattataaactttatgagtgctttacatgtaatttcgcttgcttcaaacaagttcatgctctcttagcttcccaactggtctccctcattgttacctttttccagctaccctaattagtcctaaatgctttagctagattaatctttataaaatattcactcattgcttcatccaagaacattgagtgagtgctccctcactgttgagtcaagttcatgttccctgttctggcattgcaggccctatactttgtggttccaggtagagcacagcacacacagtacttgcgtgcctcaagtagtacatgtggtcccccctgcatccaccaactccatcattgttcatctcttccagcccaccttagaaatggtctcttctggccgagcatggtggctcatgcctgtaatcccagcactttgggagaccgaggcaggtggatcacttgagtccgagagttcgagaccagcctgaccaacatggtgaaactgtgcgtgcctctaatcccagctacttgggaggctgaggcggaagaatcgcttgaacccaggaggcagaggttgcactgagccacagttgtaccactgcaccactccagtctagacgacagagtgagaatctgtctcaaaaataaaggtctctaccatgaaaccttctctgttacatgctagctgaaatggtttcctctccctctggtgacagaaacatcttacttccatcttccttatgatatgtagtacattgtcttgaattatagttacttgagtaggtatgtattcttcctgtcttccttattagattatcttcttctcccagacaggatcctactttcctttatatcctccacaattgggcactcaagtgttttcggaattaatgggagaagtcattttgttagaagattgggatttcctttgcccccatatttccctactttcagaagagctttagaagaaaatccaaagggaacactgacagcgagggctcctagggaggaaattaccttccaccttcttctgtcttgtcttggtgcattaggccgttcttgcattgctatagacaaatacctaagactgtataatttataaagtaaagaggtttcattgacttacggttctgcaggttgtacaggaagcatttcggcttctagggaggcctaaggaaggctacaatcatggcagaaggcgaaaggggagcaggcactttacatggcgaaagcaggagcaaagagtggggcagtcccacctacttttcaaggaccagatcttgcaagaattcagccactaccacatagacagcacccaagccctgagggatccaccctgccatccagacacctcccaccaggccccatctccagcagtggggattacaattcgacgtgagatttgggtggggacaaatattccaccatgtcacttggctgtatcagtttagggaaatgttatgacttgctttacactcagtcagcctctgttttgccattgtgcatgaataatttgcttgggtgtattagtgcctgattctgctgactcattcgttctgctcctcagggaataaaatgatgaaaagacatctctgcttttgctctgagattttgtttttgtctcgttcctatacagcgactgcttcctctacctcctcttcagctagcagctgccacggggaactctgtggctcaagcagcagcagttgaaagatactctcactgcccacttcctgtagacaaggaggttttggtgggctgcttaggaactgtgccagccttgtgtctgactggtaactgactcatgagaaaagcagccttatgtcggaaagataagggccaacaaattgcctccaggtggtggtagtttggaggtgactgaccattcatttcctttctttgggaggagacagtggggagggaattggtgaataagtggtcttgcctgcgtttttctccagctcttagtgatgcagccaggcagatagttggttctctgggctggaatggctcgtggaccccagtgccctcagaatcccctctgctgctatcagagcatcagacttatgtgtcatccatcctgtgtcttctcttcattactcttcttatgctcttgccaggaaactggctgtgtgcaccaagggaactctgatagttccatcgctgccagatttttctgtgaccaaccaaactccatcccactggtactggtttccttcaaatctctccctgatggcaacactggaattgatcagaagcagtggttctgaaccaccatcccttggctcggcttagagggcccaggcaggtgggcctgcctcccatcccctgctcttccctctccgcccctcctgcctcactcccatttcctgcaggaggatgctttgccatcctggagctgtcaggcacagctttgctttggcagcaccgtcgcacacatactggtgggagaggggacgtgtttatcacttttcctggagattatctgtttaagcacttctctgacagttacaataacaagggcagtgtgttgtgtttcccagcagaaggacacttgctgttgaaagatgtatagcactaattagaaatacataacatccggccacatggcagccttctcccggccgctccatttcctgatttcatgcaactttgacgacagttggtttatgttttccatgaatatattctcagaaaaacgagaaagtctccctgttacataggagcaagaagaatatttctgtccgagccggtatttggccataggaataataggagctgtggtcacctgcccacatgtgggaaggagcagaaccaagttcagacctcaggtgactttcttattaagaaatatttccgtctgacttccttagccaaaacccttacccgaaacccttaagcaagtctctgcttttggaaagaaggggaaaggctgtttcacagtgttaatgagttcctcagctcctgtcatgctcctgctacctgacacaaagccagaggaacccaggcgaataccaaggcaaacaatgccttttcctcccccaccccacatcacttgttggcttggcccagcccaacactagggatatatatgggcattcatcagactagggccagtttcctagatctagccccaaagtgggtggactctgggaatctagatgctgttttcctacccacttgtgtaacggtgaatgctttcagggagtagcgtcttacggtttctagcctgtggaagcctacgtgaggccaagagcagcccatgaagatgctgtgcacttagtgcatgtctcacttgaggcactggatccaagttgccgtggatacttggataaataacaattttctttaccctattgaaaggtcctacggttgcagagaccatgttttatttgtaactgtgtgctccatcatacctagtacagagtctggaacattctacatgctcagtatgtgcttgaggtactactgagccatggagaaggacaggccttccaggaggtgctctaggtaacatggccagtcagaggcctgaccaacactcagacatgctgacccccttgatcgtttgtaaaatctccacctgcttgattacagcagaacagttactgcttaatactccgcatcagatggaccagacacataagcaggcagtgttatttcaagcctttcttcaggagggggttaggggatggggagttgaggtgacataaccgtcaccaaggacagagcagtcatgaagctgccttctagctgctgccctgggaggtggctgagcactttcagatctacaccaaagagactccagctgttgctaccttgcctggtctccagaccttattgcaggagcctttagaaaaggagccaacctggagtccacgaagaccgcagatcccattgttgttaagcagccattctccctctgagccctagcccccaccttgaactctgagagacagtctagcttgtgattgccatttgtcataaatacagaactgggcttggtgaaagaaacctcccctgtcttatccctgtccagggtcatgggagtgtcttagtgtagcctgtgcttcataaaatgccagtctcttggagccaggacacccccctccatcccttctagccttctgagtgcaggtaacttctgcttagttgatgaggaggcactaatgtttactcagagtatcagctaccaggatgtggcctccacttgtcttctcccaactccctcttttctggacttactcccttcttcccggctctgttgctagttagaggcaggatgttgtccgggcgtggcaatggcctggactgagctgggcggtactgacagtgctgctgcctatggggagggtgaaggggagaagttggtaacttttcttgacaacttacatatctccccctttcctgctttccatcctcccctcttcttggctcttgcatgcttgttttctttgtaacagaggtttagggccttaacaggacaggagtgagactggtctattctaatcacatggattgttaccacttccttaactgcctgccacagttgagctggaaagtcagagggtgacatctgggaccagtgggcatctggaaggttggtgggaaagccacaatcaaagaattactaccctggatgctattcgtttgttgggcccttctgagcagcagcctgctccttcttacacccagtactttcagaagtgggttggggctggctttgtgtactccaatcatacttgctcctggggcaaagatggtaaggaatcactgtggttgggtattgtctcctggagtaacaacttcaatggggccccattgacaagactggtgagctgatgagagggctccccttggctactgaggttaaaatacaggcagggacagagatcagacattcagctgattatccttttaacacttggagattctgagagttctcctgtattagagagggaattcacagattagctgctgccagagctagtgagcctggcccctgattctgtctcctgtgggtatgtggtgtctcctcctcggaggctgtgtggtggactgctgccttctgtgtgtcaccagctcctctcgagttcagatgacgtggctttcagggaaggccagtgatgaagagtaggtacaggcaggcttttgggagtatgccacatagctcccaccaaagaataattctgcccaccaaaaagatggctcctttcggtgacctggagccagaaggaagttagttagccaggctgaaaaagtgacgggaagagggtactgggattgggagccaggtttattttttagcgctaggggaaggaatttgtgaaaacaaaagccaacactgattaagtgcttattatgtgccaagcactgttctgcataaaattaactcattccatgaaagtaggttatttgtgtcatgtgtgttttcttaggaggagggacatggaggaagtaaggatgggactaaaggttggtgattcaagaagatcatttttagacgagatcgggcgcgttcagggtggtatggcagtagacagaagatcatttttaaatgtgtatttttccaatcttaactgatgactgtgctcctgttagttatacactagagagactgagttaattaaatctgagttcttgttacgatggctttacattatcagtaggcagctaaaggcagagaccatgcagctccagctcagactgcccttcctgaggtaaccgttcctgggaaagtgatgtagaattgacagaggtgacccttatcatcttatcaaacacatatccatatgccagacctcatggtaagtgcttcacatgcattttctacttggccttatgaccactctgagagagggaatatcactagccctagtcttcagtgaggaaaaggaagctcggtaacgtggccagtgatgtgcatcttgtccgcctggggcgctgagagtttcatttgcctgtccgcagactgcttctcggaggagtgccgctctgtgatccaggaacaagccgcagctctgggcttggccatgttttctctactggtccgccgctgcacctgcttacttaaggagtccgccaaaggtaagcaggaggagtccccagcctggtgggctttccagttgcctggccttgtccagacctcacagtgccatgctgttttctcggtgtcttctccctgtagtctccattcttcctcttacctacatgcccctcttccttttgcctgcctaactagtcccatttccttttacagtctgattgcctctaaggccctcttctcctttttgtagaaccctttcctctctcttttctcctttagtagttaggattttcactgtacctatgagctgctgcatgttcctgcatcttcaggaaaccagaaaagttagtttccataatcgacgttgtgttttcccctttatctctttgtttctgtttgtgtggtacctggtgagttctgtaaccgctgtggaccagccatcatgggagactcactggaccagatagagcaggtgctatttttagcccttaggttgagacagtatcccatatcctttaaggctgcccttagaagtctaagccagattgttgtagcagtagaaggtagggctgaaggttacacctttcttttcagctcctagatcaatattagtgacttaatgagaccccactgtcaccccatgccgcaccagctttgtgaatgcctccagcttcggaggctgccttttttttttttagggacagaagggcaactttttattttgaagtaacttcatatttacagaacagtagccagaatagtgcagagaactcttacatacccttcacccggattccccagttaacattttaccatatgggcttacgttcgtctttccatacacacatacttaaggttattatttttcttctgaaccatttgatttttaagttacagagttgcgggccctttacccccaaatacttgactctatattcctaataataaggatattctcttaacaacggttatcaaaatcggaagtcaacattgacaaaatactattattgcattcacagaccttacttagtttgtgccagttgccctaatttctttatagcaaggggaaaaaaaagttgttttctgctctgggatccagtgcaggagcacacgttgcatttagatatcatcgtgtctctttaatgtcctttaatttgggatggtttttctgtctttctttgtcctacatgtccttgtcatttttgaagaatatgaagcatttgcacagtgtcccacagtttgggtttctctggtgtttccttgtgattaaattcaggtcatgcagttttggcaagaactctggtgccatcttggtactgtgctgaaggaaggctggaagggtgggctagaggccagagtagaggcttcagccaagccacaggtgaagcagaagcagttgtgtccaggggcagacccagtacactggttctctctttgtcctacttttcagaatcctcttaggtgctggcgcttgtcctcgcttctgggcctatctttcctgtggacttggtctcccttccctaagagcttgctgccgtcccagcgccccaggcctcactcgggggctacagcagacataggcccagttctcaccctttgcctctgcagctcagctgtcctctcctgaggaccaggatgaccaagacgacatcaaggtgtcttcctttgtcccggacctgaaggagctgctccccagtgtcaaagtctggtcagattggatgctcggctacccggacacctggaatcctcctcccacatccctggatctgccctcgcagtgagttgacctgcccattgcttcagcaccactggcttgggcctgcccgtgttcctacagctcccctcttcatcctgctctgtttctttctgcccacagcctgcctgcctctctatttcttctttatttgaactttttttgaataccttccctatcctctgatgttttaggttattttttcctgttctccaggcctcttccccctcctctcacactctctttttcctctcactctccattttgttatttgttcttgctctcgttccctcatcctcactccatattgtgcatactcaccatctctgcagctgcctctggagtctggatttgtgtggatatgtgtgtgtgagactttgtatcttctcttattagtttttctgtgcatcttgcttttttttttttttttgaaacagggtatcactttgtcacccaggctggagtgcagtggcatgatctcagctcacccaggctggagtgcagtgacgcgatctcactgcaacctccacctcccagctcatgtgatcctcctgcctcggcctcctgagtagctgggaccacaggtgcacaccaccacgcctggctcattttttgtatttttcggtagagacagggtttcgccgtgttgcccaggctggtcttaaactcttgagctcaggagatccacctgcctcagcctcccaaagtgctgggatgacaggcatgacccaccatgcccagccttctctgcatctttaaggctctctcactgctgcttgtgctgtcttctgcagtttgtctcctggcatggcagcgtgtggggaggctgaatgcatgcacatctctcttccattcactcatgccctgtcttctcaccacgtccctcccctcgccccctgtcttctcaccacgtccctgccctcgtccccgtcttctcactacacctcgccctcgtttccgtcttctcaccatgcctctgccctcaccctcatcccctgtcttctcaccatgagcctgccctcgccccctgtctctgtgtgtcagtctggcatctctcagagcatttgtgtatagcagagagcatttgtgtattgggggcgggggcaggtgttggagtctgtgtgtctgtctgggtgtatttacgtagatcagtttatgtgtttgtatacctttttctttttcttttttttaattgtggagatagatgtaacatttgccatcttaactatttctaagttcggtgacataaattacatttacagagtgttgtggaaccccatatggttacttcttttatctttgtctatatctgtgtctgggttgtgtccgactctgtgcttgtctaggtccatttgtctgtgtgtctgtaagtctgtgtgtgtcttagtgtctgtatctgagcgcaaagttctgtgtgtctgcctctgggcgcttgtctaggggtctttccgtgtgcctggtccatgtctgtctgtgtttacttgtccatgtgcatccatccaactgtggccacgtgtgttgttatctgtatgtgttcatgtgggatgtccgtatctatgtctgtatttgtgtctatacctgtttgtgtctgtatatccttgagtatatatatctctgtatgggattcatgtgtccccaagtaggtttctttcagtgtatgtctgtgttttcatgtctctgtgtccacatctatagctgtcttttttttttttttttttttttttttgagatggagtcccgctctgtctcccaggctggagtgcagtggcataatcttggctgcaacctctgtctcctgagttcaagctattctcctacctcagcctcccgagtagctgggattacaggcacctgccaccacacccggctaatttttgtatttttaatagagacggggttttaccacgtgggccaggctggtctcaaactcctgacctcaggcaatccacccgcctcagcctcccaaagtgctgggattacaggcgcatgaaccaccgtacccagcctttttttttttttttttttttttgagacggagttttgctcttgttgcctgggctggagtataatggcgcgacctcagctcactgcatcctcagcctcccatgttcaagcagttctcctgcctcagcctcccaagtagctgggactacaggcatgtgctaccacacccagctaattttttatttttagtagagatgaggtttcactatgttggccaggctggtctcaaactcctgacctcaggtgatctacccacctcagcctcccaaagtgctgggattacaggtgtgagccaccccatctggccctttttttttttccccccagagtcttgctctgttgcccaggttcaagtgcagtggcatgatctcagttcactgtagcctctgcctcctgggttcaagtgattctcccacctcagcctcccaagtggctgggattacaggtatgagccaccaggcctggctaatttttttatgtttagtagagatggggtttcaccatgctggtcaggctggtctcaaaactcctgccctccagtggtccacccgcctcagcctccagaagtgcagggattacaggcgtgagccaccacatcagaccagtgtatctgtctgtgtctgtgctgattctgggtccatgtcagtctgtgtctgtgtctgggtctgtgagtatgtgttcctgaatgtctgtgttgtgtccatgtttgtgtgtaactatgtctctgtatgccagtctggatctctctgttagagggggtttctgtgtatgtgggtcttcctgtatctgcctgccttgccttttacctacctgtctgtctgtctgtcctggcctgtctctgcctgcctgcctctgtctttctctttgcctctgctttcgtctgcctctgctgtgtgtgtgtgtgtgtgtgtgtgtgtgtgtgtgtgtgtgtgtgtcgcacgcacctgtatcagggatcagcataccatggcccacaagctaataatggtttacatttttaaatggttaaacaaaaaatcaaacgagtactatttcatgactcatgaaaattgtataaaagtcagattttagtgtccataaagttgattggaatataaccatgcttacttgtttacactgtgtctatggctgatttcacattacagagcagagttgagtagttgccacaggctgtatggttcacacggcctggaatatttgcagtttagctcattacagaaaaagcttgctgacttcaatctctgtccatgttccatgtgtcacattcttctttgtgttagtgtcactgtgtgtgttcatgtttgtacaactgtgcgtgtaggctccatctctgttcagccctgttcactattcatctctccctcctgctcactttaatttttccctccctccctcccttctttcttttttctttctttttccttcttccctcccttcctgccttcctaccttcctttcccagggtctcgctctgttacccagggtggacggcagtggcacgatcacagctcgctgcagcctcgacctcctgggctcaggtgattctcccacctcagtctcccaagtagctgggactacaggcatgcaccaccaacccggctaactttttgtattttttacatagagatggggcattgtcatgttgcccaagttggccttgatctcctgggctaaagcggtctgcctgcctcggcctcccacagtgctgggcctctctttcttatctctactcttccttagtgtctctgtctttctctgtttcacccctgcccaccccacccccctggccatttctcgtttccctcttccttttcttcccctaccccacattctctcagtgtggtcttcggctggtgctgtgtacccaaagctccttcatgctctgtgttatgcatttatgtgtgtttcagaacaagcatctccagtgttcttctctggagagaagtaatgctgggggatagattatggagaccctggctactttggagggcacttttggggagtagggaggggagcttgtttgacttggggaccagccatgtgagtctcctagactcatgggtaacctccagagggaaggctaaagcagagatttctgggcagcagtttatgtgtggactgtgtagtctgattcttccccttttctttctaaattttttccctgtacttgcctcaagatgtaccccctggactgttattaatctcagtctccccatgccctccccacctctagctctgtaacggtgtgggcggcactcacagcatcggacagttctctgcatcctatctgtgggccctcctaggtttccaaaatgcactccaggctgaagccttggagctccaagctgtgcagctggggccacacaaaggaactgacggatctgctggccaggggacagctgtttctcagcagtgatccccaaagagttaacatctacagcctcaaacttttcaggctattaatctgtaatgaggactaggcagtttgcagttttggaacgaaaatgccaagaaaggactcagttctccaagtatctaagccactgcttctgagcatgcacaagggtcactgagtgtcccttccttactctcagggtggggaggcagaccatctgtccttggagcctgggccttccccgggtcacctcacctcacaaccacaggtctcttagataggattcacacagcccctgtttacccatatcccgggccacaggtctgttagctctctcacgcagcatgtctcccttcatccctcctccctctctcactcccttttggcttttgttcggctgaggaaatggaaagctcacacaggaagtgctgggtctcatttgcttgagatgctgagtctgttttctctttggatgctgcagcaaatggcccgttgccggctctgagctgctgcccatctttgggcaagggctcaatctacaggcaggcacgtggtccaagctacagccatccccggctgggcttcacattctgggctacagagaggcagagggggttgggacatttgagtcatatttgcttagtcttctcagacttcttcacgaggagagcaaatctgaccaaatagtatattgaatttaattacccagcaaatacgttaccgtagctgtggataccacttactctctcgtgaagccagtccgggctagagagataaaacagtgtaatagagaaaaacatctccttctgtgctctctttctttctctctctgcagttaggatcagcagctggttatctctggaatgcgagtttaagcatgaaagagaggctttgctatcctggggcctgaccccaaggcatggctatttaaggactggtgcccgcgttcaacagagcaaacctggcctgactaccactgagggtagtcccacctcagagtcttcagatcagaggcctggaaaagtggaatcagaattgcaccttccttcttttgtttcccatattctcatgtagcttcctaatactcactgagtaaatactctggttgagagattggcaaaggtatggtgcttttgtgggtttcaaacttaatctcatgcccactgaccttacagattgaagaggcttttcttttaaggtcatagagaataacacaccccaatggttctgtagatgccaaaactgtaacccccctgacgcttgtaaagtccttgttgctgctcatcgttttgaagggtttggaaatgctcccaagggagcaggaatgaaatggctgctgtttagtgccccttcttggcatgctttcattggtctttgcctgagtttcttctttgcaaagatacatttctctgatcctaagataaggtgaccagagagcctgtttttcctacaaagaggaagtctcctttgcttttcctccagaaaccccacttccaaatggtccctctgacatgtgggacccttctttcatctctcttccttcattccctccctgtctttaatttgttaccctctttccttatgcagttagagaatcattgcacagcatcttcccctctctgaggggaattccagggttcatcttgagtttccttggttctctcctctttgcccatgctcctcttccttccagtcaaaaccacaacagcaggcacatgtggaacacctaggatgatgatgagagtatcgttggcactgcagagtgatgagggcaggattgctgggcatgtgggcatgtgtgccttccctcgctgtggcacttattagatctgtgtgttagagccagcatggatggaagcaagttgactccccagttgtacccgttagggattgtaacagaatggcttcataatcccaggagattattggtatagaggattatagcaggatgtggaaagtggcctggggccactgtgaaagtcaatgtagagtgctgggtgtgtttaggacagactgcttggtttggagggcccacctacttgccccatctgctagcatagtttgtgttcccatccacaccaagcctctggtgagaagggagaggcagctgcacccctacttcggcaagtgagcacaaggaaagtcgtgctggagaggagtagagcgacaggcttcatggacctgagcatagtgaccccttgcatcccaggacctttggcaaggctagggcagtgggacagcctacctcatttcagtctctgctgaggccaaatcttcacttatcctgatttctagttctcagtaagtgaaagagtcaggggactttgagaacatccaaacctagcccagctgtggcagttggtttattgctttcagctggtacttgaacccaggtcctggtcttggaggctttcccaggtttaatccccagagctttctctgcagctgtatgacactgcgctgaccccgaatgaggataggaaaatagaaccagtgccaagccagagtctctttttcatttggagtctggctgtctgcccatgaccagggttacataatgggaaacatagctggggctctggagagcccgcgtttcaccaggctgcccagaccttcgcattctgatgctatatatcttcctaattgtagctcggatgcatttatcacactgttggattggagtactgtttaaaaaaaaaaaaactctagaaattcttgtacttgctgcttttccatggatcgtcttccatagtctacagagcacactggagaagggtcgtagggagccctctgaggtcttgtcacatagggagaaagagggatacgtagggcgtatgcagtaagctgacttccttagggagcttccatgtgttgactctgtagatgagatagaaattctcaagttaaaaaacaactagttcactcaccttcatagggcagctctgaaataagaactaatcccaaggctaatcggcaccccttcaaggacacttaatatgccttcccaaaagggcattttaggaggtcactgagtaatagtccatcagcacttccctgaaggaagtggtggtggctgtgggaagcccctttgctaccctggctccccacccagtctccctggctccgggttggggcgttagcactgcagcctggcaccagggggttcctcttcctccaagtgctgagtgtggggcacacgtgatctctcccacggcaggagcccctgtcccctccccacgcctcccgtaggactccttgtgagaggaaggggtgttggcctaaggctccagtctgaccccagcagggtacagcagctgaccccagggagagtactttccagctctgagctgaggttatttgggtccagtgtgtgctaagctaagaagacgtgttggagtggttacagctaaaagtttggagaggcaggaaccgtgagaatccgcaccagggaggccgccgagggctccactcatgccgtggagatgtcaggatcccctaggggctgctctttcccaaacatacagtgctgatgggtttagcacaccatagtgatatgacagaggctatacatatgagggtggctttggagaactgaaatcaaataaggcgccgaccccgaacatattgggggcagtggatggttgaggtgctctgatacttgagaaatcctggaacgaggttactgtgacctattgctggccatagggttccagctgccctgcttagaacatggagaggtttatattcttgcagtagggcaggatgactaagcttcagaatttgatttgcccttttgggcaaaattgatttagggtgagtactctcccaaagtcccaagtcgacttgttggtataaatgagaaagatagaagggattaccttcatctaagtctggtctctttaggggtcacccagcaaacatctcttattcttagaggatggtgtcttgctgctcatatcttaactcctggaatggtggcctttgatacctttgtctcttctttgtatcatgtggcatctggatgacacattgttgctagaaatctccaggagccgcatagaattctccccatctccagcccagcccagggcctcttgagctacctagcactgaggtaccagaatcaaatccttcgcccaatgcaaacagagttggcatgacatcttggctttccaagaggcatgctaagccatttcaagcccgggtattattcttttaactctgccacacttattggattcaagtccatttctgctattagctgctgaattcctgcagttttctccagtggagtgagaagctctccagggcaacagtggtcttatgttagcctctgacccctgcgtggacagttgtaggctaggatataatggcccacagggaaaccgtttgaaaaggcagatattgcatgtcttaggcgtggttctcttgttacagccatttgtctttgtgtctgtaccacatgggtgtcctctttttcagcttctttgtgcctagcttctgtgccatcttggctgtatttccagatctcctcactccaggaaccagaagacccaacttgtttcccatctgtactgcttctctgatcttccatagctctgaaacacaatgcacggcttcttctcactcaactctttccgggtttgttctgcagctgtggagtttgaatgttagtgtttaaacaagctggtattacacaggaaatggccacctccacaggccccagcaggcttgtaacatggggtcattgtacttgatgttaatcaccagtcagcttgttcccccagtaaaatatgaaggagtgtgtgagtgcctcatcctccttagacttgccaggaagatggactgagtcttggtcaggcgttggtgctccactcttttcagactctctcctcctctcagtcctgccccagtggagctttcagaaaaagtcctgcctgactccttccctatgaagctggcagactgcctttctgagttctgggcaagaaggtagattattgtggtgtgacgtgtctcacctggcataccttaatctgtcagaggatgctgcagttgggtaacctctcctgtgagaaaagcaaaattttaggaacacagaaacccatggcccctctgagagcagggcttctcagttccctggacgtcagctgcctttctacagctatttgcagaactcacctcagcctgaagggttaatctgattccggagtcaatatcccccaaacaaccagccaggagtgtgtgttggtttgtttctgtgaaatgtgtttccccagtcacctgggctggcctgggctgcattgtatcggccagcagctgcactgcactcaaactgacagatacattaaaccttggaattctgaggcaataaaaagtaaattaactcttatttttttcctttcctggtggactaagtgaatgcatgtctgtagggaagcaagtgagccttggttctgagtgcatacttgtaactagtcactgctggtttgtcccaaactcggatctggctttccgactccagccagggctctgccgtcctggtgtgtggtgtgttctgtggggttgggccagtgggtcaccttgcaactgctgatccctgctctctaatcacatcacagctgctgagagactccctggccatcattctgggagccataagcaggctcattggacacagttgcgtattctctggctgctttgtgtctgcttggtgaacagtccaccctaactttagcgggatattgtggactctgggaatttccctaaaatatgcattgaaccagaacaaaccagaaggacctgcatgagtccacagcactctagagggtccatttagaatcaaaagttgtttgagattatttgggaaaccttctgggaagttatttcccaagcatttccaaaagattggcagctgtttacagatcctcatcgccacccgaatttgacttttggctccttggccctggccaaccttgaatccatagggcctaagggctgctgtcgggtgaaggctagaaggtgctcctggttgggatgaggaattaaagcaggaaaaagctaagcttttctccttctacagacaggaaatcctatgtgcacccacagaactgacctcccagcccagaggcctgattggggtaagctgaggtgatgttgcccagcttccaggaattacctcatccttttgcaaatatcttaacttttgagttcagacatctcacctggtttttcaaagcacctcttcctttgagtttcctgacactccctcactcctgtagagagtcactgtgtcgcccatgggtctctgggtagttgtgttgtgttcatgtctgtggtgttcgatgaaaggagataactgatgatatgaatgtgaactgagtttgggtgatcccactgaaacaccagaagaaggcagctactcacaatcagagcacaagaccaatttgaattaaccagagcagaagtgacctctcattgaagcattttgtgtatttccttggttctgcacagtctagcttggctcttggaccacttttatttatatttctgagttgggaactctgggcactccctgtgtcttttggcatcagctgctttcttacaaatcaacattgaggtagggattctcgtccaccttatttttgcagtgagtctcaaggttttggtacaaggtgggtggtaatgggcaaaaaggcgtatgtgggcaggggtccctagtggtggccagcagtctctgggaggagtcagttttggtttatctgagccttaggggacaggagagcatggtaatgagaaccacatggtaccacatatttcttcatcttggatccaagatggtaggggtgggaggatgagagagggatgtggggcctcccactgtggcagccgtgggtaattttcggccgcctctctctggctggggatgctgctgcccacaccacccccaacccccaactatgtcctgcagcagccttgacctgcacgcaccaaccagggcccccaagccaagaattcagctgggagacttttcaccttcttccttctcactgtcgtctttcctgtttattttccaaattgctgctctgcagccgagcagtgcctgttggccaaagctcaccagtgctgtgggatcagactcaggcagcgggctcaagtggccagcagggcactgggggaggaagcggggaactggaagagcctccctgtgcgtctcccatgggcagcactaacctcggaggcggccctgagcagccctatcacatccggtgcttgtctctgcagccgggaccggaggataaactatcagggctgtggggcagtgcatcattcctcttattattttcttctctgcagatggggtcgtggaaagttcagttccttttaaccctcgaagttctgtttattctacagctggtagcctgaatgccgcgtttcccattacatcacaaaggagctcaggcagatctctgcacagaaacgtgttgcaactgtttatttttttccatatttaaacatttctgacagccaaacccggctgagccaaaagatggagctttgtgaatgagtctggttgtcggtgtctgcgctgagagaggctttagaaaactcgtccctccggtgattcttcccaaacatgttctttttcctgggtaaagcctgtgaagcgagttacttctgcagtacacgtgtgttgattatgtgccgttgtgtgattaatggggctgtgttccgtctggttcccaggacactcttgaaaacaagatgtttcatttcattgccttttcctagtgcaatgattacagtaaataaaccattgcagcctccttccacctggagccagtcagggagttcccatacctctgctccactttctcccccactgtcaccttcggtggcatgtcccttgaatgctttcttttctgccatctcccaaagattcttggtctccaggagaaacaaattgcttagatctgaggcccctccctagtaggactcataggcagtaactccactggggagattccaggatgattcttctttgttgtttttagcaagagggtctcactgtgttgcccaggctggtcttgaactcctggcctcaagtgatcctcccttctcatgttcccaaagtactgggattacaggcgtgagccaccacaccccgcccaggatgattcttacagctctctttacatattgcctcttgccactctagctcatgaatctaattgtgaagcttttctttgtaattctcctatgcatctctcttcttttagagtaaaacttagcatccataggatattatctgttccagactcctggttaggtgctttcctggagaagaaagccaagtctgtagccttggcaggccctatatgcttaccacaatttgtagtatccctgggcaggccaaaaaaaaaaaaaaaaaaaaaaaaaagctttatggatcctcagcacccaccaaagcaggaatctgacccacagtcgatttttgacaagtgatggtgacagagaaatgaacctctttttttataattctatgctgaaatttcaattaaggagagccagactttgcagtttcaaggtttcttctcaggttcagccaggacctggtgatacgcaattaggacagccagccatcccagtttgcccaggactggggggtttctggggacgtgggactttcagtgctaaaactgggacagtcccacacaaaccggaatagttgatcaccctgtatctcaccttccacaaatgagagaaaggagaggtgtggaatggctgagacagcgctgatgaattgtgtaagaggctttaccttcctgtgaggatcttgatgggccaggaatgaggtttttgtttgtttgtgtgattggttgattgattgattgattgcctgcctatatatagggaagagatttctaaagcattgtaggaggaaaacatgcatgactcttgctgtattgtgactagaccctccatggctgtggctggaggaggagaggctggtgctcagttgctgtctgtgtggcatgtacttggctggacagcagtggggaattctgggagcagccacaagcactgggtgtctagagtgtttgagtaagcgtctcaggcacactgtctggaaagatgacaggaccctgcattaggcaactgagtctccaaattctttttcctctctggtgaggattaaaaactccccctaatcaatttcaactttgcataaatccacatacacatacctcagattgctgccttgggcacagttttgtttcctagcatttttggggtatgatttcctggcagatgccagcctagacaacatttgctgcaagtacttccctgctcacaaatactgagaatacttttttttactggtccctctttagagctgctcttttcttaccttatttctcacagtgttgctgtggatgtatggtcgacgctggctgatttctgtaacatactgactgcagtgaatcagtctgaggtgccactgtacaaggacccggatgatgacctcacccttcttatcctggaagaggatcggcttctctcgggctttgtccccttgctggctgcccctcaggacccctgctacgtggagaaaacctcggataaggtcagccccaggccaaacatccctccccattcgcccctcctcttaattctccagacttttttattcttgggaagttttctgtgcaaatggaacatgattaagtcattgagaagggtgttaagggaaaatatcgaccttttagccgctgacatccagctctgtgtcctgaaaaaaaaaagccctctcgacttcctttggtgtgtgtgtgtgcttgctggcatgttgtatatacgatcatttcctcacttgtttaaatagtgcagcttgtgttggcagtgctctcactcagctccaaatggtttgcatcatgcttaaagcaccctcctttctcccccttcctccccgcccccctccgccacaaagctctgcactaggaaaacagccagggctttttcccttctctgaggaggagagtgataaataggtgactagagagaagcagacaccatgtgttaacttagaaaaaaaaacttgtaggaatatgaagcattccccactgcctggtttctattttccttcctctgaggactgcgttttaacctgaacgtttttcttgcctgtctgtttatagaaaacaaagccgattccctgttgcgctgttggagactgtggagttcttagtctctgcttatcagttgggttttcagccaggtaaagagtaggggtagtccagtcggcttcacatttcccacgtgtaataacagttactaggctagggaagtagtagccaccgagcttgggagcgaagtgctgtgtggaggcaggaataccctgtgactgacttctctgcagagtagtgaggatcacatcccctggggacaggcctttggggaggctccacaaatgtcttctcaggaggaagtcttttgacctacatgaagtatatactagggacatagggagatgttaaaaaaaaaaaaaaaaagtaaaaattccaaacatgagccacaaatatgagagactttatgtagaatataaagtcttggcccgttgcagtggctcacacctttaatcccagcactttgagaagcggagacgggcggatcgcttgagcccaggagtttgagaccatccctggcaacatgagaaacctgtctctacaagcaaacaagcaaacaaacagtttttagtataaaagagtatttgttcactgtggaaaatctggaaaacacacacaaataaaaagaggaaaaattatccgtaatccttctttctacccagaagtgagagcactgttattttgctgatcatatataatcgtatttaatttatagtacacacacacacacacacacacacactctttcattttcaataaaactggaggttatattaatatttatatatactatttgtttttattttattttattattattatttttagatagagtctcactctgttgcccaggctggagtatggtggcacaatctcagctcactgcaacctctgcctcccaggctcaagtgatcctcctacctcaccctcccacatagctaggactacaggcacccaccttcatacctagctaatttttgtattttttatagagatggggtttcaccatgttgccaggctggtctcaaactactgaactcaagtgatttacctgcctcagtctcccaaagtgctgggattataggtctgcgctaacatgcccagctgtatatactgtttgtaatctgcttttttcctaacatttttaatatattcttatatggaatcatttttatagttacccagaattcttttatattccaagatttctttaaccaatctttgctttattgaaccaagagaatgttcccaatttttttacagttatgaatagtgtatcaatttcttgtagcagaatttgagcatatattccctttggttaaattgctgtaagtagattaaggttctagacattgatatatcaaaaactcatactctttggatgcacttaatggctactacatcttgggaatcagagaacccttctttcccaagaggaatacttactttttgcctttccaacaaaaacgtagagtgaaattctgctcttctagtctcagaatgggaaaataatggggatttgtagtatgtgaggctgaggacagctaacaagttgttttatacatgtggaagatgttgagttagaagagagactggatgacatggcttgggccagaggatccccatacttttctttggtgatcacaaggtggtcttgattccagaggatgctttggggagttcgctattgaagctgtcttttagtgtgggacaggtgctgagtagaagagtcctaacgagcttcagactcttcctacgccccatcttcatcagctctctcagctctagtgtcagataccacgtatgtgttttggctcgaggagaacacagagccagcagaccagccctcagcctatgtagtgatccacaggctacctagggggcagtggcggctcagtgagactaaggtaggtctccacttcaacgactgtgaaataggtatgtcaaacctaacatgtccaaatccaaactcctgaatcctgccccacccgctgcccgccaacctggtcttcctttacccttccccatcttggtaaatggcagccttgatttttgggctgcttgtgtcaaaatgcttggggttattcttggcacttctttgtcacacttccatatctaatccatcagcaggtaatgtcttctttaccttcaaaacacacacagatacaattctgtcttcccactgcaccctggttcagttctctgaaatgccttctgactggttgctctggttccttcccccttctactcttcagtctatttttaaaatatcagtgagatcatgtcatttcttagttcaaaaccttctgatggttgctcctctcacttagaggccaaagttttcacagtggcctacgatgccctccattatgtgaccccaccttcatcccactcccaagctctctgacctcaggtcctcctactgtccttcaacccagtgtgctctagtcacattgacatccttgctgttcctcaaacaaaccaagcgctcatgcctcagggtctttgcagttgctcttttcttaaccggaaacactctgtactcggctgtgtgcctctcgcactcccttctatcaccttggtaaagagagcttccctggccacatcatataatcatataaagtggtactctgctttattattctccatccacggcaggggaaaataacatctcctgagtatctatcatgtatcagtccctgagctaggtacttctgtacagtatttcgttaagttctctaaataagcctgccatgtaagtattattacctccttttttttttttttaagagatgagtctcactttgtcacccaggctggagtaagtggcactatcataactcactgccacctcaaattcctgcgcacaagcaatcctcccgcctctgcgggacctctttctcccgggttcaagcgattctgttgcctcagcctcccgagtagctgggattacaggcacgccaccatgaccagctaaattttttgtattttgagtagctgggactataggcatgtgccaccatgcctggctgattaaaaaaaaaaaaagttttggctgggcatggtggctcatgcctgtaatcccagcactttgggaggccgaggcaggcggatcacgaggtcaggagtctgagaccagcctggccaacattgtgaaaccccgtctctactaaaaatagaaaaagtagccaggtgtggtggcgggccgtgtaatcccagctactcgggaggctgagacaggagaattgcttgaacccagaaggtagaggttgcagtgagccaagatcgtgccactgcactctagcctgggtgacagagcaagactccgtctcaaaaacaaaacaaaacaacacaaaacaaaaaaaactttttttgttgttttttaatagagacggggtctcaccatcttgcccaggctaggctcaagtgatcctcctgcctcggcctcctaaagtgctgggattataggtgtgagccacacccttcaaattttgtaaaagaggatactgaggctcaagagaaaagaatgatgataagctcacatgggtcatttccatggccaacctaggagttgaatctttaggaactcttgaccttttagaaatctgcaaaagcagacctagcgtgatggctcacgcctgtaatcccaacactctgggaggctgaggcgggtggatcacttgaggctaggagttcgagaccagcttggccaacatagtgaaatcccgtctctactaaattagccaggcatggtggtaggcacctgtaatcccagctactcgggaggctgaggcatgagaattgcttgagcctgggaggtggagttgcagtgagctgaaattgtgccactgtactccagcctgggtgacagagtgagactctgtctcaaaaaataaataaataaaatttttttaaaaaaaacctgcaaaagggccaggcatggtggctcacaccagtaatcccaatattctggaaggccaaagtgggaggagcacttgagaccaggatctctaaaccagcctgggtgacatagtgaggccttgtccctacaaacaagtttaaaaacagccaggtgtggtggcaagcgcctgtagtcccagctactcaggagcctgaggcaggagaactttttaagtgcaggggtttggtgctcattatgattgcgccactgcactgcagcctgggtctcagagcaagaccccgtctgaaaaaaaagaaagaaaaaggaaatttgaaaaatataaacatttcctccagcttctagtgttcattactaggaaatgtaaaacatatctccagtgctcatcagtggcagcaacgtgagcagctttattgctggtcgagattagtctcatgtttggtcctgccttgatgcttattctgcagatacttacgaaacacgtattgccaacacagcctgggagatccagacacataaggcaggtatcttcctagttcgagagacagtttgtgccatatataaagatgtgagtggcaccataagtgaatttgaagagttcttgagttttgttgagctggtaataccccggtgaaggcgtgcttcaagagcactgatttggcattaacgtaatcattgtatctttgaagcagaaaagttttcaccttatatgcctttgagtgcaaatactctctttgttctattcttttcttcagtaatttctgctgtcctgatacattagatctccattctttgtcctatatgtcactttttctgtcatcactttaatctgtttttgcttttcttctgcattctaggaaggtttctcaagtttgtcatcttgatatatttttatagcattgattctactctttactacttctagttcaggttttaagtcttctattgcattatttgttctcttacattatatcttataacctttattttttttgcctgccttttagtcagtccctttatatctttttttttttttttttttttttttgagatggagtcctactctgtcgcccaggctggagtgcagtggtgtgatctcggctcactgcaccccctctgcctcccaagttcaaacgattctcttgcctcagccccccgcgtagctgggattacaggggcacgcgctgccacaagtagctaatttttttgtatttttagtagagacggggttttgccatattggccaggctggtctcgaactcctgacctcaaggtgatctgcccgcctcagcctcccagagtgctaggattacaggcatgagccactgtgcctggcctcagtccccttatatctgtctttgctttttcatttttcatttagcatacttcacagagtctataatttgaagaattcagttgaaggtcaggagcagtggcccatgcctgtcatcccagcactttaggaagtcaaggcagacagatcacttgagcccaggggtttgagaccagcttgggcaacatggcaaaaacctgtccctacaaaaaacataaaaattagccagggttgatggtattacacctgtagttccagctaatcaggtggctgaggtggaagaattacttcagccctggccgtctaggctgcagtgagctgtgattgtgccaccatactccagcccgagggacagagcaagaccttgtctttaaaaataaattcaattgaaagaatatagcagatagtaccttctttttcatttggcattttttcccccaaaatataatttgtttctctatttgcgtgctacattctcctttttattaatatattgcagattattttcttagacctcagctctagtttctacgatttgatgctggtcacttacatttctttgaacagattaggtagattctcactggataccttctttgtctacagtagttttttgttgttgttgttgttttggagatggagtctggctctgtctcccaagctggagtgcagtggcgtgaccccccggctcactgcatcctccacctatcaagttcaagtgattctcctgcctcagcctcccgagtagctgtgatttcaggcacctgccaccacgcccagttaatttttgtatttttagtagagacggggttttgctatgtcggccaggctggtctcagactcctgacatcaagtgatccgcccacctcggcctccctaagtgctgggattgcaggcctgagtcaccgcgcccgtccattttgtttgtttctttgtgtttttgagacagtgtctcactctgtcacccagaatggaatgcagtggtgtgatcatagctcactgcagtctcgacctcctgggttaaagcgatcctcccccctcagcctcctgagtagctgggactacaggcaagcgtcacctcacctggctaattatttttacttttttattagaggcaaggcctccctgtgttgcccaggatggtctcaaactcctgagctcaagtgatcctcccgccttggcctcccagagtgacccacagataataggtgaaatcccttgctcaagtatagagtttgtacacattgaatatccctagtccaaaaatctgaaatacaaaagactctaaaatccaaagcttgatttcagattttccaattagggatgctcaaccagtaaggataaagtgcaaatattccaaaatctgaaacacttctggtcccaggcattttggataaagaataagctatattagcaagtcattaacctcaagggagtgggaaggggaccaagtggtgtgcaatgtcaataaatgaatttattttctacattttctgttctgtatacagtggagctgctgtatcagagctatcgctcatgtctagttttcagttttttttttttcagtctctttcatataaatgatactgcagtgtcctgtcaccttcttggagctaccatgtgaagaagaaattctgtcattgggccactttccatttagtatgggaatttgccttagacctctctgaactgctgaagcattgcgaatggtactgattcgtagcagtgagaaagcttccaagtggtggtctgtgtctacctcatgagctgtcgtaaccctttgtggtaggcaaagtaacacccccaccccaaagaggtttatgtcttcaatctctaaaacctgttacatgttaccttacgtgacaaaaagacctttgcagatgtcatcaaggatttttttttttttccttgagatggagtctcgctctgtcgcccacgctggagtacagtggtttagtcttggctcactgtaacctctgcctcccaggttcaagtaattctcctgcctcagcctccggagtagctgggactacaggcacgcgtcaccacgcctggctaatttttgtgtttttagtagagatggggttttgccatgttagccaggctggtctcaaacgcctgacctcaggtgatccacctgcctcagcctcccaaagtgctgggattacaggcatgagccaccgttcccggctggttgtttttttatttgtttgtttttgttttttctttgagacggggagtctcactctcttactctgtcactcaggctggagtgcagtggcgcgatctcggcacgctgcaacctccacctcctgggttcaagtgatgatcctgcctcagtctccctagtagctgggattacaagtgcatgccaccacgcccggctaagttttgttgttgtttgcattgtcattgttgttttctgagacagcgttttgctctattgcccaggctggagtgcagtagcatgatcttggctcactgcaacctctgtctcccgggtttaagcgattctcctgcctcagcctcttgagtagctgggactacaagcacctgccaccatgcccggctaatttttgtatttttagtagagatggggtttcaccatgttggccaagctggtctcaaactcctgacctcaagtgatttgcccgcctccacctcagcctcccaaagtgctgggattacaggtgtgagccactgtgcccctctctggctaagtttttatatttttgtacttttagtacaatagggtttcaccctgtcattgtcgtccttgttttctgagacagagtttttctctgtcgcccaggctggagtgcagtaacgtgatctagacccactgcaacctccgtcttcttggttcaagcgattctcctgcctcagcctcttgagtagctgggactacaagcacctgccaccacaccggctaatttttgtatttttagtggagatgaggtttcaccctgttgcccaggctggtcgcgaactcctgacctcaagtgatctgctgccctcagccttagagaataaacaactacataaccaccaagcaagcagctcaagaaacagaataagataagggcggtgagttaccagttccattcagtctgtgttggtcctagtcagtacagtaagacgtgaaaaaaaaaaaaatgaagtattaataagactgttggaagggaaaaaataaagctgtttttatttgtagataataacatgatacatttagaaaatccccaaaaagcataaattattagaattattctcataataagtaaatgtagcaaagttgctggatatgaagccattgtacaaaaatcaatcccatatctacatattagaatcaaacaaaatgaagatttggtgcctggcacagtggctcgcacctctaatcacagcactttgggaggccaaggtgggaggatcacctgagcccaggagttcgagaccagcctgggaaacacagcatctctactaaaaatttaaaaaatcagctgggcttggtggcctccgtctgtggtcctagctacttgagaggttgaggtgggtgaatcacttgagcccaggaggtcgaggctgtagtgagctgtgatcataccactgcattccagcctgagtgacagagcaagaccctgtctaaaaaataaataaaataatctttgtattacaaaataaatgttcatttagaaatactttacaaattaagattagcagccaggcatgttggctcacacctgtaacgccagtacttcaggaggctgaggcaggaggatcgcttgagcccaggagttcaagaccagcctgggcaatataatgagaccttgtctctataaaaaattaaaaaatcagtcaggtgtggtggtgtgcatctgtagtcccagctacttgagaggctgaggtgggaggatcacttgaaccaaggaggcagaggttgtactcagcctagattgcaccactgcactccagcctgggccacagagggagaccctttctcaaaaaaagagaggaaaatcaagattagcaatacggaaaagaaaagattttcttgatccactacccagagataactactgtttcttgttccatgttgctgcatatgttccaacctagaaggatggctgataggtagatggatgactggatataagtgaagttttttggttatttgtttatttattagagacaggatctcagctgtgttcctcaggctggtcttgaactcctggcttcaagcagtattcccgcctcagcttcctgaatagctgggattgcaggtacaaacccccatgtccagcactgattttttttttttttttttttttttttctgagatggggagtctcactctgtcgcccaggctggagtgcagtggtgcaatctgggcttattgcaagctccacctcctgggttcacaccattctcctgcctcagcctcccgagtagctgggactataggcgcccacccccacgcctgggtaattttttttatatttttagtagagacggggtttcaccatgttagccaggatggtctcgatctcctgacctcgtgatctggccgcctcggcctcccaaagtgctgggattacaggcgtgagccacctcgcctggccaatttttgctttttaacagaaatagaatcaaactttatgttttgttttgtaatgtactttgttcacttagcaataaatatatatttccatgtttacctataacatgaatttaagagctgcacaatattgtatgaatatattataatatttgtttagtcctcaatcattagatgttttataggaagttattgacttttatctgttgtataaacgatgccatctcagggagccttacacataagtcttttgttcttaccctttgagatagtttctccttcttagacctccctctctatcatttcatagatatttaaagggactcagaatagttcccgaggataaacaaagaaggaaaggttcatatgagtggaatagaatgctcagactgaatttatcagcatctttccctctggattgaatgttcttcaaatcttggaatgccctggattcaaaagcacctcaaagtctagaatttgagtctttgaagagagaatttgattttttttttttttagacaaatccttgagacttgagagtgctctgagtggtactaaatgtatgtagtcttatctacatcatttaggaggtgtgttcaagggcaaaaatataagagtagtggcagtgcaatgtctgaggaccagaagatcaggacaatgtcctggactccaaactttggaggcaagattgcttatagatgaacagtaattaatgatgatgactggtatatgaaaacctgaagattagtgagccgaggtcgcaccattgcactccagcccgggtgacagtgtgtgagactctgtctcaaaaaaaaaaataaataaataaaggccgggattggtggctcatgcctgtaatcctagcactttgagaggccgaggcaggctgatcaacctgaggtcgggagtttgagaacagtctggccaacatgatgaaaccccatctctactaaaagtacaaaattagccaggcttggtgatgcacgcctgtaatcccagctactcgggaggctgaggcagaattgcttgaacccaggaggcagaggttgcagtgagccaagatcgcgcccctgcactccagcctgggcaaccagagcaaaactccatctctaaaaaaaaaaaaaaaaaagggtcagttatgtgagcatgcctacctgcctagccttcctacctacctacctacatacatacatacaacctttgtctcaagacttaataaatataaaattaaaattggttaagaggagaatgtatgatagaaaaagaaactttgatttaaacttctgccctggtactttttgtctcaccctttttagttttctttactaatataatatcatatatgtaaaagaatatatatttttacttcataattatatttacttttattttatttatttttttgagacagggtcttgccctgttgtccagggtggagggcagtgatacaatcatggctcactgcagccttgacttcccaggctcaagcaatcctcccacctcagtcccttgagtagctggggactataggcgcacgccatcacacctggctaatttttaaattttttgtggaaacggggtcccactatgttgcctgggctggccttgaactcctaggtttaggtgatcctcctgccttggcatcctaaagtgctggaattacaggcatgagccactgtacccagcccataattttagatattcaaaacaattgaaggccaggcgcggtggctcatgcctgtaatcccagcactttgggaggccgaggcaggcggttcaccagaggtcaggggttcgagactagcctgggcagtatggtgaaaccctgtctctactaaaaatacaaaaattaaccaggtttggttgtgcaccctgtaatcccagctacttgggaggctgaggcacaagaatcacttgaacccaggaggcggaggctgcagtgagctgagattgcaccactgcactccagcctgggcaatagagtgagatctgtctcaaaaaaattaattaaaaataaatttatagttaatacctttacttcattaatcaacttactaatatatatttacatacaatgaaaggtatacatttgaatgtatgggtgtatatatacccgtatcaagatacagaatatttatatattctgcataaggaccacttcaatcaaggtatagaatatttccttctccacaaaatgttcccaagtgcctctatcccccatcctactccctgccccaggcagctactgatctaattattctcactatagattagatttgcctgttataaaatttcatatacatggaatcatatagtatatactcttatgtctttgttttgtcactcagcataacgtctgagattcatccatattgggcattatattttttcagtcgtttattgatgagtagtattccattgtatggatatatcacagtttatccattcacttgttgatagatattttggctgtttttattttggaggggttatgaaaaagatactgtgaacattaatgtacaggtttttttgtggtcatatattttcatttctcttggataaatatccaggagtagaattgcttagtcatttaagtatatatctaactttaaaagaagcttccaaacttttttgaagtgattacacccttttatactcccactagcaatatgtgagcgttctagttgctcatattcttgccaacacttggtatttctgatctttatagttttagacatgctagtaagtgtgaagtagtatctcattttggttttatgtttttggagggtttttttgtttgtttgtttgagacagagtctcgctgtcacccacactggagtgtagtggcgtgatctcagctcactgcagcctccgtctcctgggttaaagcaattctcctacctcagcctctcaagtagctgggattacagctgtagcatgccaccacacacccacctaatttttttacatatttttagcagagacagggtttcaccatgttggccagactggtctcgaacttctgacctcaaatgatccacccgcctcggcctcccaaagtgctgagattacaggcgtgagccactgtgcctggccatagttttaatagtcattttcctgaataatgatgagcatctttttatgagtttactgacaattattatatcctcatttgggaaatgttctaatctgttggccatttttaaacattggggtgttttcttattgagttataagagttcttcaaatattcttgacacaaatacttgtcagatatacatcctgtgaatatttctcgtggtctgtgactggtttgccttttttttttttttttaaacatagtcttgaacagcaaactttttttttttttttttgagacagggtcttgctctgtttcccaagggatcctcccaccttagcctccccagtagctgggactatgggtgcacgccaccacacctgtctaatttttgtaattttcgtagagccatggtttcgccatgttgcccaggctggtctcaactcctgatctccagcgatctacctgccttagcctcccaaagtgctgggattataggcatgagccacggcgcttagccttccggtggaattttgactacacagtagggacttccacttttaactgtttcaaatactctagaattgccatcatttaggacaaaggcttttgaaggtttgatgttttcgtgggctattttttgtgatatcattattgtcagtgacaggaaaaatgaatctttagctgcctaagagtgaattcaagtgtttcttaactaccagtaaactcagaaataaccagatgaaataatataaaacctcatttgtagtgaatgcttatctagcaatacttttttttttcttttttggctcatgcatacacccctctctaaagtgaagagaataatgataaactgttcttaattctagaatgcagaggaaaacgtggtttgcatatgtgcagcaaaaaactttggaagattgaaattgcacaatgagtgtaggttgagcaatggcttcagaaggcatacatgttccgtgggggtgtcctttgctcttgtgcaattagggaactccagagctgcctgaacaggggatttcctttttatttctcacatgccatttaaaaaattaacttcttcccttcttttcaatgttcacccctttttattactcccttaaattcttacttgtggtttcttttcttttaaggaattactcaaacatttatgtgtcccactcctgtgactttggttagaaatgcacctgggccaggttctactggtggtgggaggagagcttgctgatggtttagggatttctaattcagcttcttgtcgccattgcaatacccagctggttctaagcatttgaaatacaggttacaaatcagccagcattccctgattgcttagtactagaattttgcagactttgtaatgagtgttctgaggtttttgcctgttttggttttattggtgaccaacacctcctgatgaagatcatttgcagactttactacaaagttaagcctaactttaagctgaaagcatgagagccaaacagtaagatccaaagctagacaggattggttttggcaaaaggaaagtccatgctttctgccttcttccctttggcctgctcagtcatactcatgttgggtggtacttagtaagcatgcttctaattgtggttcccttccacttacctttgtgataggggtaccaaaatctgtttaccctcatctttgctctcttccagaggaacaggagaggtagttgggtcagtgtgccagaaaagcagaagttgagtatgtggagttcatagctgcatgtatgagtgtttgtggggcagggaacttttaatggaaaacatttgtgttgcatcgaaaacagagcgaggcctggttagagtctgtctgctttgtctgtcagtctgttccctaccagcactagtcactgttctcctgggagtctcaggcatattgtggtttcttctgctcttgctagcccctaatcttgccagagtttttgtgtcatgggtggccccgtgtgcagtctggagtaagactgcaaggttggtgactaatggctttgaagaaggtacttcagcccacatacggactttgggaacctttttaggttaacccttaggaggagggagggtctctagcacaaacagtggaagaaacatgctgagatacatacaaacacttttttaaacccttcccttactgttagcaaagcatgaactagaagaatggagacacacccggtgacaccatgcctgtaatcccagcactttgggaagctaaagcgggaggatcgctcgagcccagaagttcgagaccagtctgggcaacatagtgagaccttgtcaccacaaaaaaataaaaattagccaggcatggcgttgcatgcttgtagtcccagctacttggaggctgaagtgggaggattgcttgagcctggaaggtcgaggctacagtgagcagtgatcgtgccactgcactgtagcctgggttacacagcaagaccctgtctcaaaaaacaaacaagcaaaaaaaaacaaaacagagacaggagggaaaggcttgctgtttgggcttggcatttcatttgtaaatgctcataagggatgcacctgggtgcccagtcttgcatctgacaggctgatgttagtcaagttgtgtgtggctggatctctttgggaaataacagaagaaaagatgctaatttccctgaggatagtgtcactctaagatagaaggacctgtagtttgagcttttaactctttttttttttttttttttttttttttttgagaaggagtgtctctctgttgcccagggtgaagtacagtggtgcaatctcagctcacttcatcctccacctcccgagttcaagcgattctcctgcctcagcctccggagtagctggggttacaggcacccactgaccacgcccggctaattttttttgtatttttagtagagacagagtttcattatgttgcccaggatggtctcgaactcctgacctcaaatgatctgcccacctcagcttcccgaagtgctgggattacaggcgtgaaccacggcacccggcctgagctctatctaatctgagtgcccctgaaattgacatttgttcattattttaaaaaaaaaaaaaaaaaggtaaagaaaacagtaaaagagcagctcagctcagttttctgggtccccaagaaggtaccctaccaatgtggttttcacattttcaggtttttggctggtgaataagattgagcagaaatgcttcttcccctgataacaatacattcaaatgcaggatcaggagcgtgtggattaaaaccagacggtggatgattaatacttttgcttatagaggtagacatggcagcttcctccatttaaatgaaaagaccttttctctgcatttgtatgtgtgcatatgcttacatgcttgtgccctttatgtacaagctgcgtttctgtaccatttccttcctctcttgaagcacccaaaaagtgctagaaggactaagttgtgaagcagaggcgtggagatcagacactatggtaggagtgggatgtgttctcttcttcaggctcactgctttcatagctttctgggtactgctgtaacacacatctttttccatggaacctacttgctccttatggtcatgtaacctcattataagaggcatactttttcatttaatctgctatatctttggaggtggctatcctcatcattttattgttaatgacatgaagagaaactttattttcacatggatactttatgttttttcccttacccactgaaaacatgacagatttcttggttcattcgccgtggctcacgcctataatcccagcactttggaaagctgaggcgggcagatcacctgaggtcaggagcttgagaccagcctgaccaacatggtgaaaccctgtctctactaaaaatacaaaaagtagccgggcatggtggcgcacacctgtaatcccagtaatcccagctgctaggggtgctaaggcaggagaatcacttgaaccagcaaggtggaggttgcagtgagctgagatcccaccactgcactccagcctgggtgatggagtgagactccatctcaaaaaaaaaaaaaaattttttttctcagagtatactttgttttttttgagacaacatcttgttttgttgccagtgctggaatgcagtggctcactgtggcctcaaccttctgagctcaagggatcctcccacctcagcttctgagtagctgggaccacaggtacatgctaccacaccccgctaatttttgtatttttttgtagagatgagatttcaccatgttgcccaggctggtcttgaagtcctgagctcaagcagttcacccaccttggcctcccaaagtgctgtgattacagccaccatgctgtccttatactttttaattagaggttagcaggtgtttattattaacaatagtttcagtattcatttttattaagttctgtgcacattaatcccttccagccagcaggcctctagttagtctaggcctctgatttcagcttgaatatacactttgctcttttggagaaacagagacctctgcctaagtgaaacaggacatgtaaagggaggaggaataccaggctgagatttcatacctttgtaatctctaaagaaggttgtattgtctctacaacaaggaaaaagttgaaggacaaagggcataaaattctttttttccaacataaatctttgtctgttttatagtgttgtctgtaatttcaaggtgaaagtgggccctccctcagccccgtcacactctagatgcatccccagattcccccccgtcaccgtcacactctacatgcatccccaggtttcccagtcaccgtcacactctagatgcatccccaggtttcccagtcaccgtcacactctagatgcatccccaggtttcccagtcaccgtcacactctgcgtgcatccccaggttcccccgtcaccgtcacactctacgtgcatcctcaggtttcccagtcaccgtcacactctacatgcatccccaggttccccagtcaccgtcacactctacatgcatccccaggttcccccagtcaccgtcacactctatatgcatccccaggttccccagtcaccgtcacactctacatgcatccccaggtttccccagtcaccgtcacactctacatgcatccccaggttccccagtcaccgtcacactctacgtgcatccccaggttcccccgtcaccgtcacactctacgtgcctccccaggttcccccgtcaccgcacactctacgtgcatccccaggtttcccagtcaccgtcacactctacatgcatccccaggttcccccagtcaccatcacactctacgtgcatccccaggtttcccagtcaccgtcacactctagatgcatccccaggttcccccgtcaccgtcacactctacatgcatccccaggttccccagtcaccgtcacactctacatgcatccccaggttcccccagtcaccgtcacactctacatgcatccccaggttccccagtcaccgtcacactctacatgcatccccaggttcccccagtcaccgcgtggagtggcgttccaccagtttacccctgtgccatagagactcttagcaaccaagatgggcgggtttgcataagttaaaattcactctgttgtacagttttgagaaacacatactttcatgtaaccatcactacaattaagatatagaccattttcaacacccccaaaaattccctcatgcaaccagctcccttcccaaccccagtccctgacaacttctgatgttttctgtctctgtaacttagctttttccagaatgacgtataaataaaatcatacagtacatagagcaggggtgccaatcttttggcttccctgggccacattggaagaattgtcttgggccacacatagactacactaacactaacgatagctaataagctttaaaaaaaagtctcaaaaaacatctcatagtattttaagaaagtttataaatttgcgttgggctgcgtgggccacgggttggataagcttgatatagagctcttgagtctggcttcttttcgcatagcgtaatacatttgagattcatgcatgctgttgcctatatcaatcatatgttcttttttgttgcagagtagtattccattgtatacatacactatgatttgtttatccattcaccagttgaacatttgggctatttgcagtttttggtggtcatggatagaactgctgtaaacatttgtgcatcagtctttacgtttcttaaatgaacttaggttttcatttctcttggataaatacttaggagtggaacgggtggtttatgtgataagagtatgtttaacttcgctagagaccagcaaactgttttacaaagtggctgcaccgtattgcacgagcagttcctgttctggcatcattatcagcacttgatcctgtcagtttgtttgttttttaataattatactaggtaccttgtgattttaattcgcatttctctaatggctaatgatgttgagcatcttttcatatgttcatttgtcatctgtgtatcttctttggtgaagtgtctattcacatcttttgcctattgttaaatcggattattttcttactgagtcttgagaggtctttatatatttaggatgcaaatcctttgtcaggtacaaatgcattgcagatattttctctcagtctgtggcttgtcttttcactttagagactaagttttgactgattaaatgctgagagctgaagggttcacaggctctcttagtagaggaccataaggaaattgagaccttagtcagcagaaagttgtgaggaccaccccttttgaagctgtttatttaaaatgaaagagggggataaggggtgggccaaactgaattgtccagacagatttctgaagcttttttcagttctttctcctgtccccgcctatgatgtagcttctgggctcttaccttcaactgggttcctcacttcctgccatcactccaaattcatcaaggcctctccggctcaggccgactccaacagaatacccgagaggtcaggccagcttcttgcccgtagtatattccagagtgaagtcgttttttgataagtaatcattcccaattctaaagtgatagcctccaaggagtcattgctttgaagaactcctttcatctccagctggactcttttccaaacaaccatcggcagagcctagtcagggttctgacacacagggttctgccatgagaagcaaattggcagcagcagacaggcccccgaggcaatggaattcagttctcagaacatactcaccatgggtctctttcatgttgtgtggaattctttccactgggcagccgcataggtgtagggaaaatgtcctgccccattggataaaagtcaagagaagatactatgtggaatcttgtcactttttaattgctgatccgtgttaagatgtttttcttaagcagcatttgccactgactagacattagtagagtttctttttctttgtgcatgtgacatggatcactaacactgcatgtgatggtcagaggaggcctgccttagtgctggagatctgaccatttctccaggacagtggagcctggtgaaggctctctgacttctgatcccagttggagcaatgtgttcagagaagaatttctgagccttcgtgaatctcagttatttgcatgtctttttgtaagcaaacagcaacttgtaggcaggcttaaaactttctttttctgctcatgaaagtacagattttgctatagacaaatcaattgaatataaaactgtaatgtggaataatatttcaggctttaaaaatggagggatgggttaaaaagttctgcaataaatctgcaaatgtggaatctaagggaaatgatcccatctggaaaaccctgctagtggtgctatggctggtttgtggagcagtgcagactgtggagtgaaaaaagaccctgtagtcttgaaagatgacaagctccttaattgatgtccatttcagctggtgctgtgccagcttatgttggcctcggtccagcgttcctgtaatttgggagccaggtgtgaagcatttttgttccatcttgttccccagcatctacagaagcctcacccatcttacttgaggcggcagcacgccataggaaacagatgtacaggtagaggtggaaggaagtgtcacagctgggttacggattttttttttttttaatccttcacactcaagtgagatctgggtttgagagttgggggaaagggtatttcacagcctcggtgtaagatgtcactgtcaagtatcctaattagaccaatactcatttgtgatttttaaaaacatatcttattaccttagagtcatactttgtataggcagagatcttttgtgatttgcctttgcctgacttctgggaacagcaatataaagtgtaataggaagaacatctcaagatggccatcagagttgaacctggtcacttccatagcatcgagggccaggagacataaccacctagaggtgagctacccctgatgacatggggcatagctgtgtcctttggggatcacttccatagcatcgagggccaggaagacataaccacctagaggcgagctacccctgatgacatggggcatagctgtgtcctttggggatgttgatgaacacagtagacagtgccaacagcatctgttcaacacattggtattgggcccttgatactctagaccggtggtccccaacctttttggcaccaggaactggttttgtgggagacagtttttccacagacagggttagcagtgggtggtttcaggatgaaactgttccacttgccatcatccagcattagttaggttctcagaaggagcacgcaggctagattccttgcacgtgtggttcacaatagggttcgcgctccactcctgtgagaatctaatgctgctgctgacttgacaggaggcggagctcaggcggtcttgcttgctttgaccgctctcttcctgctgtgcggcccagttcctaacaagccatggactggtaccacggtccacaaccccgggggctgggacccctgctctagactggatgcagttgggggaagaaggcactctgccagaatctaacctgtctcctttctagccctcctgctaaactgaacatgaatgaacaggcagttctgccttttaggattacaaaacatgagcaggaccctcccggtggaaacattaaagtcctgtggacttagaactgaaatgttggaattggtgctttgccactgacttacattttgatagaaggcaagttttagcctcttaggactaagagccagctctgtttcttggagggcccaacccataaaaagacaactgaagcagtcctttgttatttctttcttcacctccatatctcacacagacagagctgaggacaatatttggccttgccagtcagaccacgatgtcaaggagtgcctacaagccctgcctagattgctttttgctccaggtgtatgggggtcacgggacagcccttcgttcactggtagctttcacctgttcttccttgtgttgtcaataccagaagctgcaaaatgtcaactaccagaagaggcaagagggtgaggagttaggaagagagattagtcttattctttaagtaatgttcattctatttttttaattgtgatgaaatatacataagataaaatttaccattttaaccctttttttttttttttttttttttttgaggtggaatctcgctctgtcacccagggtagagtgtagtggtgtgatctcggctcactgcagcctctgcctcctgggttcaagtgattctcctgcttcagcctcccgagtagctgggattacaggcatgtgccaccacgcccggctaatttttgtattttttgtagagacagggtttcgccatgttggccaggctggtctcgaactcctgacctcaagtgatccactctccccggcctcccaaagtgctgggattataggcgtgacccactttgcccagccattttaaccagttttttaaatgtacggttctacagcattaagtacattcaaactgttgtgtagccatcaccacaaccatctctagagctttttcatcttcaccaactcaaacactgtacccatgaaataataagtctccattcctccctccccacagcccctgacaaccatcattctatttactttctctctgaattttttttttttttgagacagagtcttactctgcctcccaggttggagagcagtggtgccatctcagctcactgcaacctcagttttctgggttcaggcaattctcctgcctcagccttctaagtagttgggattacaggtgcctgccaccacacctggctaatttttgtatttttagtagagacggagtcttggcatgttgtccaggttggtcttgagctcctggcctcaagtgatccgcccgccttggcctctcaaagtgttgggattacaagtatgagccatggtgcccagcttttctctataaatttgactactctgtgaacctcatataagtggaatcataaaatatttgtccttttgtgattggcttatttcactcagcataatgatttcacgttttatccgtgccgtagcacgtggcaaaagttcatttctttttaatgctgaataatattctgttgtatgcatacatctaccacaatttgtgtgtccattcacctgttgatggacacttgggttgcttccactttttggctgttgtgaacgtaaatgtacaaatatctctttgagatcctgctttcaattcttttgggtgtatacccagaagtagaaagtagaattgctgaatcctatggttgctctatgtttaattattttattttattttattttattttttgagatggggtctcactctgtcgcccaggctggagtgcagtggcacactctcagctcactgcaacctgcacctcctgggctcaaacgatcgtcccacctcagcctccccagtagctgggaccacaggtgcgcaccaccacacccagctaagtttttgtgtttttggtagagatggggtttcaccatgttgcccaggctggtgtcgaactcctgagctcaagcgatccacccacctcggcccaaagcactgggatttaaggcgtgaggcaccgtgcccggtcatctgtgtttaattttttgaagaatcgtcatacattttccacagcggctgtactattttacatcctcaccaatagtgcacaggagttccagtttcttcacattctcacaatacttttgttttttagtaacagccatcctagtcggtgtattggtgtgaagcagtattgcactgtggttttgattttgcattttcctaatgacaagtgatgtcgaacatctttttgtgtgcttatttgttgtgttcattttaaatgtataatttctcctttctcagttgattggccttggaatgcttgagcattaaggtgtcagatgttggctctgatcatttttttttaagaagtaaggtctcattatgttgcccaggcgggacttgaactcctgagctcaagtgattctcctgcctcagccttcccagtagctgagactactcgtgtgcaccactacgcccacctaggctctgatcctaacttgctataagctacttgtgtggcctataacctatagctgtttttttgagatgtagtcttgctctgtcacccaggctggagtgcagtggtgcaatcctggctcactgcaacctctgcctcccaggttcaagtgattctcctgcctcagcctcccaagtagctgggattacagtcacccaccaccacgctcagctaatttttgtatttttagtagagacagggtttcaccatgttggccaggctggtctcaaactcctgacctcaaatgatccacccacctcggcctcccaaagttctgggattacaggtgtgagccaccattctggcccctataacctatagctttctaaaccaaacgaacaaaaactctatctcatatataccttcttttggattttctttctttttgaagcaaaagtgaaatatccctgtaacctctctgggcttctgtatcttcttcaataaaataaggaaacccctaactgccctacccagctcaaagagctgttgtgagaattaaaggagatcagctctatgaaagcactttgtaaagattttataaaaatacaatttaggccatgcgtggtggctcacacgtgtaatcccagctttttgggaggctgaggtgagtggctcacttcaggccaggaattgaagactagcctggtcaacatggtgaaacccaatttctactaaaaatacaaaacttagccgggcgtggcagcatgcgcctgtagtcctagctacctgggaggctgaagtgggcagatcacttgagcttaagagttcgagaatcacttgaacatgggaggtggaggttgcagtgagctgagatcacgccaccgcactgtagcctgagtggcagagtcttagtctcaaaaaaagaaaagacattatcatcttgagccatcaaattcactgttactgaaattctttgctaaacctgaaggcaaaacaaatttagtctttttgtcttagaccaaaggctgtatgtttctttggtaggtaaggggaacagagcacaggtgacctacttactcatatctgttcatctcccagtatggggttgcctcctctgaactagggcaagggtcaagtctctgacttggtttttccctgaaaatggtcacaaagtctgctcagcattgtttagggatgtggatgcattggccccatcacctgcccatctaaagtaagcatgttatgtaatctaacaaatatttaccacttagcatgtgccagacaccagagttcatgcttccacatgcttcactaggttttacttaagcatatttttgcattactattgttttttgagaattataacctcccacatatattattttagttcatttaatcatatcttctaggccctttttctcctgttgtttctttgtttcaacaaagagaaatatttaggaaaggagtcccttaagattttacttattttaaatatttttagttattcagatgctaatctgaataactgaaagacatggaatatatattgagatttagatagagcatcattcatctactcaggaacagttgcagacaggtagaatctacattgacccaaacttcagggtggattgtgctttccagaaactattccagttaccaacagtcacctaattgagttcagaatggatgaataagaatggattttcctctctgtggcttcttgttttttgttttttcttttttgtttttatttctggaggtacatcagcatcctctctgtggcttctgatgcaaaggtaagctatatgctttttttttttttttttttttttggggagatggagccttgctctgtcaccaaggctggagtgcagtggcgcgatctcggccatttcggcctcccaaagttttgggattacaggtgtgagccactgcgcccaccctacatgaggtttttagaactcaaggagcttaatagggtcttccatttttagttgtatggtaggattagatacactgaacaaccttctcaaattaacacagctaaagtgctccctgtaggctgggcacagtggctcacgcctgtaatcccagcactttgggaggctgaggcaggtggattgcctgagctcaggagttgaagaccagcctgggggaaaccctgtctttactaagaggacaaaaaaaaaaaaaaaattagctgggtgtggtggcacacgcctgtagtcccagctactcagaaggctgaagcatgagaatcgcttgaacccaggaggtagatgttgcagtgaaccgatttcaccccactgatcagcctgggcaacagagcgacagagagagactgtctccaaaaaaataaaaatataaataaataacataaaatgctaactataatataacgcatcctgagctggcatgaaaacgagaaatctgcagatcttaagaactaaatgaacaaaagatttctgaaaagtaagcgagtgccaaagctggctggtgcttgccctgatgatttctgtcaagccctggaagctttgggcttactcactaaaaactgcttggactatggtgagcgggcctgaaagcgtggggtgcgccctaggtgaggaatgatgtaggaggccctgcctaaagctgggattccagctttaggaaacctcatggtgagcattttacgaccatgagctaaccctcacctgagttttgagtctgaattcatactacctatgtactctgaaaaaccttgagcagcagatggtttaatttaaagtgatctctgtgtctgacagtgtcccagggtaacccgcagaagcaaagacaagtcctctctggaaaaaagcagcttctactcaggccacaaagaattcccgtggatacagttccatggaaatcagcccacagcctttaatatacttaaagtaaataattatcattcccaaaaaagctaccttgtaaaggataaacaaaggtgaccaggcatggtgggtcatgcctgtaaacccactacttagggaagtcaaggcaggaggatcacttgagctctggagttccagacccgcccgggaaacatgatgagaaacccatctctacaaaaagatttaaaaattaatggccaggcgccatggctcacgcctgtaaccgcagcatgttgggaggccgaggcgggcagatcacctgaagtcaggagtttgagaccagcctggtctcgaggtcaacaaggcgaaaccccgtctctactgaaaatataaaaattagctgggcgtgatggcaggcacctgtaatcccagctactctggagcctgaggcaggagaatcacttgaacccgggaggcggacattgcagtgagccgagatcgcaccattgcactccagcctgggcaacaagagtgaaactgcatctcaaaaaaaaaaaaaaaaaaaaaaaaaagcggccgtggtggcatgcacttatagtcccagtacttgggaggctaagtggggaggatcccttaagtccaggagtttcagccttcagtgagccatgatcctgccacttgcagccaaaactgatcaaattgtacactttaaatatgtgcagttttagtacacttcagttataccccagtacagttgtggagaaaaaaatctaaaagaatacttttaacccctttagcttaaaaagatacaatttattatttcctaactacaaaataagagtgaagatgttttaataccctttttaaattttaatcaatttattgagatatgattcacattccatgaagttcaaccttttaaagtacacaattccgttgtttcattatattcatagagcaatacaacaatcaccactaatttcagaacattttcattacctcataaagaaaccctctacctatcgcgtcatctccattttcccttcttcctagcccctgtcaaccactagtttactttcagtctctctagatttgcctcttctgcttctttcatatgaatgggatcatataattatggccttttgtatctggtgtcttctggtttgcttaatgttttaaggttcatccatgtcacagctcatatcagtacttcattcctttttatgcctgaatcatattccattatatggtaattccacatttgtttatccattcatcagtttcataaacatttaggttgtttgcattttttggctattatgaataatgttgatatgaacatttgtgtatgagtttttatgtggacatatgttttcatttctcttagatatatatacctagaagtagtattgtttggtcatatggtaaactgtgtttaactcttggaggaacttccacactagacagttttccaaagcagctgcaacattttacattctcactagcagcaaatgtatgagggttcaatttccccacatcttcactaacacttattattttttttattatagccatcctagtgtgtgtgaagtggtatctcagttgtgattttcacttgcatttctcaataactaatgatgttgaacagcttttcatgtgttcagtggctgttggtatttctttggaatactgttcaaatatttgcctacttttttttttttttttttttttttgagacagtgttttgctcttgttgcccaggctggagtgcaatggcgcaatcttggctcaccgcaacctccgcctcccaggttcaaccaattctcccgcctcagcctcccgagtagctggggttacaggcatgcgccaccacgcctggctaatttttttttttatttttagtagagacggggtttctccatgttggtcaggctggtctcgaactcctggcctcaggtgatccgcccacctcagcctcccaaagtgctgggattacaggcgtgagccactgtgcccggccatatttgcctacttttaaaattgggttgtcttttattgttgagttgtaggagttcatagatagatagatagatagaaagattacattgagttgtaggagttcatagatagatagacagacagacagagagggtctcactgtgttgcccaggctggttttgaactcctgggctccagcgatcctcctgccttggcctcccaaagtgctgggattacaggcatgagtcaccacacccagccttgagttgcaggagttctttatagattctggatacaagtcctttatcagataaatgatttacaaatattttctccctatgatttgattgtccttgcactttcttgaatgttttaatttttacgaagtccaattaatctggtttattttattttgttacttgtgctttggtgttataaagacatttttaaacaataaggactgggagaagctggtgtgcgcctgtattcccagccacttgggaggctaagacaggaggatcactggagcccaggcattggagtccagccatagtgagatcctgtcctcccgccaaaaacaaaaacaaaacagagtttatcaccaaatatcctcactaaacgaagtttcttctacctgaagtacacacttcagaaaagtatcctagattccaaagaaatggtaaacagtgattgtaactataaaattggatcagattgattacaaaggaaccatggagttaaaagcttccttagaagacatcagggccagtctcttatctaatgaaaaaatagtcctccagttttctcaatggcctctgctccagatgcttccccagaatttactctattatgagacagtcactataaaaagttcctcctcaggctgagtgaggtggcttgtgcctgtcatctcagcactttgggaggccaaggtaggaggagcacttgagcccaggagttcaagaccagccatgcaacatagcaagaccctgcctctgcaaaaaaattttttaaaaattagcgggtatggtgtgcacacctgtggtcctagccattcaagtggctgaggcaggaggatcacttgagcccaggatttcaaggttacagtgagctgtgattgtgccactgcactccagcctgggtgacagagcaagaccgcatctctaagaaaaaaaagttccttctcaaactgaacacagcctgccttcctgtaattcccacttaatgattttttaaaagttttctcaaaatcacaaagtctgttttttctatatctgacacaccttagttatacttgaaattctctttacgttttcttttctctaagctaaacaaaccagtgcaatcaaatagattcttggccagtgctgcgaaatattataggactttatgtaatgatgcagtgtttagtactgtaatgatggaaagttactatttccacaccatcctctatggtagccactggccacatgtgacttttgaatacttgaaatgtggctagtgcaaccgaaaaacaaatcttaatgtagttaaattgaaatatccacatgtggctagtggctactgtattaaacactgcaattctagatcattctcctggccagatttctctgtgccattaccagcagcatcagattcacctgggaacttgtaatgttttaggccctacctcagccttttgaatcataaacagttgagggtggagcccagcaggctcatttaacaagctctccaggtgattccaatgcactaatacttgaaaggcaattccagtttgtcaaggcttctgtaaaaagcagtgctcagacaaggtctgacatgcatggatttcacctaaagacagcttcaatggcttttttttttaattgaatactactttctaaatattgcattgactgcatgttataaaaatgaatacaatgtggatatgaagaatttttttttttttttttgagatggaatctcactctgtcacccaggctggagtgcagtggtgcaatctcggctcactgcaacctccgcctcccaggttcaagcgattctcctgcctcagcctcccaagtagctgggacaacaggtgcgtgctaccacacccggctgatttttttgcatttttagtagagacaggatttcaccatgctagccaggatggtcttgatctcctgacctcaggatccacccaccttggcctcccaaagtattgggattacaggtgtgagccatcgtacccggcctggatatgaagaatttaaaaaaataaagtgtcaggccaggtgcagtggcttacgcctgtaaccccagcactttgggaggctgaggcatgcagatcacttgatatcaggagaccagcttaggcagcatggcaaaaccccatctctactaaaagtacaaaaactagttgggcatggttgcacatgcctgtggtcccagctacttgggagtttgaggtgggaggatcactggagcctgggaggcggaggttgcagtgagccgaggtctcactactgcactccagcatgggtgacagagtgagaccctgtctcaaaaataaagtgccccttaacagtttaaaaaaaattagttaacaggcagtttcccagctgggcgtggtggctcacgcctgtaatcccagcactttgggaggctgaggtgggaggatcacatgagctcaggaattcgagagcagcctgggcaacatggtgaaatcccatctctactaaaaatacaaaaattagccgggtatggtggcatgcgcctgtaatcccagctacttgggaggctgaggcaggagaatcgctcaaactcaggaggtagaggtgacagtgagccaagatcacaccactgcactccagcctgggtgacagagcgaaactccatctcaaaaaaaaaatttgtttgttaaatgtcttggcacagtggctcacacctgtagtcccagcactttgggaaccaaggcagacagatcacttgcggtcaggagttcaagaccagcctggccaacatggcgaaaccccgtctctactaaaaatacaaaattagccaggcatggtggcgcacgcctgtgatcccagctccttgggaagttgaggctggagaatcgcttgatgccgggaggccaagggtgcagtgagctgagatcgcgccactgcactccagcctgggtgacagagtgagactccatctcaaaaaaaaaaaaaagaaaaaagcaggcacttttccataagtttcacacggtcttatagtactagaaccctgagctcttgattgtcagtctggcgtgctttccatctcttaggctgtttggtgaaataggcctcactgtttggtttggtgtctcccagaagagaaaaatctggttccttggcatttattttacctaccccatttgggggctgtttcttctgccttttcttgcacaacttccccattgttagatgcctctgtagtcactcccaataccctggaaacatctcccttttttagggtttaacagacttcacctgtatagttactgtcttttaatatgactttcgtcctcttatgcttgaaacctagaagaggagctggcttgttctgctggccttgagccagatgtcataacttcaggcagtgccacgctacacatctccagcagtttggaatggagaacagagttagagataagatcagcagctttaggtgatggctttgtttcaaataaaccatgcatgacccaagcctccacttcaaatggggaatgaaattgctttatcctttgacagcttgctctatgaaatacatttatcttcacttaattgctttagatcccaagaggctacatacagtaatttctaggagataattatatcaaattttaaaaatatgtgactgtggacatgaatatgtaactgcagtggacagggagggagagaggtgggggaaaccaaaagtcctgctgaccttgctggtaagtttccattcttattcttagagtttccttgggtcatagaccacttactctctgaatctgctgattcatatgtggggtcctttgtaccccatgctgctagggttaaagcatctggtctactactcctgtagctggatagtgttttgctcagtctcctcctgaaactgggaggggtcaggctggtggctgacttccggttatatgtcttcatttagtctggctgggcacagtctgtctacactgtaggccacagccactgggggttctggttagtggcagctgagaaccagcaaacttgttgattttaaaacatgactatttagatgtcagggataaacttcctgtagatgggggacaggcttctttatcttggagtgtttgagtatccagttctcatttccctaacctttacatttgaaaaaatctaaagctttcactgtcattttcactaatcccagccactgcctacctttaccgtatattttttttcttctttctgaaattccagggtgttttttttttcctgcctcctactaaataactgtatttccatgttgtgatataacaacaccaaaggcattttccaggtgtggacacagttctgggccatcgctcagctctttctgtctgcatctgcctttaagactacacactggacaattcgattgtgagctccgtgatactactctccaaccgccatccccaagtgtctagtgtggtgctcatgtcttatgagggctgtgtgaggaagagccagtgaggcctagctgaatgacatggttgacaggcactcctgctgtaaagacaaggaagatctgacttggagatacagaggacatttggattctgtactaaggtccatgaatatctaagccagcttgcgggtgggggatgtgccaaaaccaatcaaggtgggctgactgaatcagagaatctatagagccaaagactttcaattcccatcaagttctctcaagacctagtcccatggcgctttctgcttgctggggtcattctccaggtgtcttttatcccttcattctcacttaatcagggtcagccacactcctcagttcactgagagggaagtgttgccttttcttttaaactcctccccgagaaccctgacagctgtgatgagtaagcccatttgcatgtgaaaggtcctgctggcgtgcctgtaagcgaatctgcagcgagtactgtcacaccatttcttggagtcacatcaaggagttttttaaggaatgacactttggctcacatcgaaaacatgagcacctgaatagcagcctgtgggggtcatcaaggttagggtgtttgttctagtgtgtttcttttgagctggaaaaacatttctccgtatatcaccacttttggtactcccttctggagagttgcttttctcctgtctacctattagtgtggtagtagtaacctgtaccaagaagcgttccgtggttagtaacctgcattcaaaccatttcttttagctggatcctttttttgagtcagggtctcactctgtcacccaggctggagtgcagcggcgggatctgcgctcactgcaacctccacctcctgggttcaagtagcgatcctcctacctcagcctccaaggtagctgggactacaggcgtgtgccaccatgcccagctaatttttttattttatttttttgtaaagaagaggtctcaccatgttgcccagcctgttcttgaactcctggctcaagcaattctcctgcctcggcctcccaaagtgctgaaattacaagcgtgagccatcatgcctgaccttaatttgatctttcaggagcagaacatgcctgttttttcttgtgttttatttaataaaaagaacatactaaacttatgtaaggacttaccaagaaggataattgaaattctggtgtctttagacaaaaaagctaaaaaaaaaaaaaggaaaaaaaggtgaggccttttcagggattgaatcgtctttggtgcattttttggtgaattccatgaatccagctattttggtgtattcagtaaagttttccctgagtttgacttaggactctgtgtgcgtatgcgtgtgtgtgttgaacatatgtgtctattcctctggaaagatcattaaatccaaattctgaatagggaaatggagactttccaaggagtgtcaggagcaggcgaaaaggaaacattttgccacagatatttagaatcaatgagatagatgagatagaaatgaagaaatgccatgatttacttctatttcttagagctcactgtgtggttgactgataacagtcactagccacatttgtctacttaaattaattggccaggcgcagtgactcatgcctgtaatcccagcactttgggaggctgaggtcaggagttcgagaccagcctagccaacatggtgaaaccccgtctatgctaaaaatacaaaaattagccaggcatggtgtgcatgcctgtaatcccagctactcaggaaactgagacgtgaaaatcgcttgaaccccagggcagaggtttcagtgagccaagatcacaccactgcactccagcctgggcgacagagcgagactctgtctcaaaaaatatgtatatatttatatctgtatatatacacacacagacacacacacacacacacacacacacacacacacacacacacataaatatatatataggctaggtgtggtatctcatgcctgtaatcccagcactttgagaggccagtgtgggaggattgagtccaagcgttcaagaccagcctggacaacatagtgagattccatctctacacaaaatttaagttagctgggcatggtggtagcgcctgtagtcccagctactcaaggggctaaggtgggaagattgcttgagcctgagaggttaaggctatagtgagctgtgattgcaccactgcactccagcctgggtgacagagtgagaacactgtttcaatcaatcagtcaaaacttagttaattaaaattaagtaaaattgaaaaatcaattcttcagtcacactagtcacatttctagtggtcagtaaccacatgagactaatgggtactgtattgtcaagcataatatagaacatttccattattgccataaggttctcttagacagctttgctttgtgataaagtcactaagtataactcagtttttaagattggggttggtgggggtggacggggaaagaggagacgttgggcaaaggatacagagtttttattagacaagaggagtaggttcttgtgatctgttgtacagcatggtgactagagtgaataatgtatatttcaaaatagcttaaagaatagatttttaatgttctcaccacaaataaataagtatatgagatgacgaatgtgttacatagtccaatttgattgttccacatgtatacatttatcaaaacatcacattgtgcttcataaatatatacaattactatttgtcaatttaaaataaaactattaggctgggtgcagtggctcatgcctgtaatcccagcactttgggaggccgaggcaggtggatcacctgaggtcaggaatttgagaccagcctcgccaacatggcaaaactccatttctactaaaaatacaaaaattagccaggcatggtggctcacgcctgtaatcccagctagtcgggagcctgaggtaggagaatcacttgaacccaggaggcagaagttgcaatgagccgagttcgtgccacggaactccagcctgggtgacagagtgagactctgtctcaaaaaaaaaaataaattaaaataaaactttttaaaaaaggtctgggatgatgacagggaggatattgagagggagatactaggatttgaatagctaaagccatttaattaggaatgaatcagcatcagaagccatggacttcaaagagtggaaaattacaagattcctactgagataatttagtagtgtatttagcaggattcagaatattatctccaacatgatcaattttcatgaccttctataaggaatttgtctactcttataaacagcctcctttcatagacttcttaaaaagtgattttgtctttatgccttcattgttaacacttgcttttccaatctcagtgtttcattttcatagataaaacttacatcagcattttccgtagtgctatcatgatgtattatttcatttgatttccactacagttctaggaggcattatctttttttttttttttttttttttttttttgagatggagtctcgctcttatcgcccaggctcccaggttgtaggcacgatctcggctcactgcaaccttcgcctcttgggttcaagcaattcgcctgcctcggcctcccaaattgctgggattacaggcgtgcaccaccatgcccagctagtttttgtatttttagtagagatggggtttcaccgtattggacaggctggtctcgaactcctgaccttgtgatccacccacatcggcctcccaaagtgggcattatcacattttacagctgagaagattaagacttagactgatttatctgagatcatatgacaatactaggtcagaacccagaactatcattttgtattagatttaggtgaataagaggcctaaacatacagttttatcctcttacatcaagagtctagacataggcagtccagggctagtgttcgggctctaccacttggcttccccaagttggcagacactggaacctccagctcagtatacaacatcctacaatgtggtcccatcccaagatggttagtagagcatcagcaggcagcttaatggaggaagaaaacagaaagggtatgccccatatatttaaagagacttcttcaaggttttacgtaaaagttctatttacatctcaagagtcacatggctatcctacctgcagaaaaagctgaaaatatggtcacctggctggcagaaatgtatccagctattagccacatgtgttagcacgtacctgtaatcctagctactctagaggctgaagcaggaggatcactggagcccaggagttctaggctgcagtaagccatgatcatgccaccgtatcccatccctgggtgacatattgagaccctgtgtctaaaacacacacatgcactcatactcttagctaaaaatcaaagttattttgctaaagaagggaagactggattgggaggtaactagcaaactctgctccaggaggtgttttgatatttagtctagcgctttcccactgtttcatattgtctctgacttgttatgaaggctgccattttttccaaagaattaaacataagttctctctctcccagatgaataattacagtaaaagctacagtttactgaggacttgctttgtcttagatattattctaagaattttacgtttttaaacttttttttcccccccagatggagtctcgttctgtcacccacactggagtgcagtgacgccatctcgctcactgcagcctctgtctcccgggttcacgtgattctcctgcctcagcctcccgagtatctgggactacaggcatgcgccaccacgtccagctaatttttgtatttttagtagagacagggtttcaccatgttgaccaggctggtctcaaactcctggcctcaagtaatccacccaccttggcctcccaaagtgctgggattacaacatggtgaatccccgtctctacaaaatatacaaaaattagccagacatggtagcacgtgcctgtagtcccagcttcctggggagtgaggcagggacattgcttgagcctgggaggtcgaggctgcagtgagctatgttcccaccaccctgagtgacaaaatgagaccctgtctcaacaacaacaaaaggcagtatatttaatgtgccttcttgtttttctcttcactgtcccctttcttcttctgtcactctctcagacctgaggctaggaaaagagattgacatgctttaggtttttagaaagtttagttcctgtacctcatgtaggaacttgcatgagaaaattgtgctggggaattaatgagatgtctgcagagaatccagaggctcaaagtttctatatcttgttaatagaaatttgatttccaaatacaattttgtattttctcttcactcccactccctctggtactcttatgagttgtagcaggtaagagcaccatccactgatcgtcccacaccgcttccccatagacaactcagtgagaaccggcacttgaattgacagtccacatgtagactgggcttctctgccagggtgacgcatctgctgttaagttgctctgaggcttgacttctcgcgttcattcaacattagatatttattgaacacttactatttaccagacattcacagtgctagggattttgtggtgaatgagacaggcatagtctcttacctcatagattttacattccagttatggggatacagagcaaagaagtaaagaaataaataagcaaaataaattcactgggcgtggtggctcatgcctgtaatcccgacactttgagagcccaaggcaggaggattgctcgagttcaaaagttccttttttttttctttttttggagacagagtcttgctctgtcacccaatgctggagtgcagtggtgccatcttggctcactacaacctccgcctcctgtgttgaagggattcgcctgcctcagtctcccgggtagctgggattacaggtgcccaccaccacacctggctaatttttgtatttttagtagaaacggggttttactgtgttggccaggctggtcttgaactcgtgtcctcaagtggtccgcctgccttggcctcctaaagtgctagaattacactagaattacaggcgtgtgccaccgtgcccagctggttggtttttattgatttgcaagtctgaatatgaatctttgtcagctatgtgcattgtggatcacccagtttatagtttaattttaaattaatttacagcattttctttgcataaaaatttgtgtgacaaatcagccatttcctttccagtttatgtcttatttaagaaatcctttctggctgggcatgggggctcatgcctggaatcccccagcattttgggagaccgaggtgagcagatcacaaggttaggagttcaagaccaccctggcctatatagtgaaacccagtctctactaaaaatacaaaaaaagttagctgggcatggtggccaggcacctgtagtcctagctactcaggaggctgaggcaggagaatcgcttgaacccgggaggcggaggttgcagtgagcctagattgcaccactgcactctagcctgggtgacagagcaagactccgtctcaaaaaaaaaaaaaatcatttctgagtgtgcaatattggccatatattgctaaatgttgaagctaggtgatgatagcaggtttatttattacactagtctctagtctctccttttatatatgtttgagattttccataataaaattttaattaaaacaagaccactggcattcatttaatagcaaatatgcttaaagttttattgtatataaaaatcaattgttttaataataagccagagcttataatttggtggggtaaaagggttacttttatctctgtgcaggagtttgtcatttgatctttttttaaagacggagtcttgctcttgtcgtccaggctggagtgcagtggcgtgatctcggctcactgcaacctcttcctcctgggttcaagcaattctctgcctcagcctcctgagtagctgggattacaggcacctgccaccacgcccagctaatttttgtatttttagtagagacgggtttcaccatgttggccaggctggtgtcaaactcctgaccttgtgatccacccgcctggcctatttgatgtttttttttttttaaaccacttgattgttaggttaaaatattaccaagagtaattgcaattttacatgaaaaaaaaggaaaccttacataccctgaggtcataaagaatatataccaacatatttttcttctaaaagttttagttttactttaaatttttcttctgaatatttggttttcattttggttttacatttatgtctttgttccatttggaatttattttgtaaagcaggtttccctgtttcctagtcctctgttctgttccattgagccagtgagcaattgccatatttacaatatttagtcttcccatccatgaacatgatatactgttaatttattcaggtcttcttttatgcccttcaaggatgttttgtaatatttcccataaaaccctcgcacagattttgttactaatttaagtatcatattttctagttaactattaatggtatgaatataaatgctgtttcttttttttttttttttttgagacggagtctcgctctgtcgcccaggccggactgcggactgcagtggcgcaatctcggctcactgcaagctccgcttcccgggttcacgccattctcctgcctcagcctcccgagtagctgggactacaggcgcccgccaccacgcccagctaattttttgtattttttagtagagacgggatttcaccatgttagccaggatggtcttgatctcctgacctcgtgatccactcgcctcagcctcccaaagtgctgggattacagatgtgagccacctcgcccccagcctaaatgctgtttctttatcttcatcttacatctatcaactttactgaactgtcttgttctataatggtaaccataataatagaaattctatgtttctaactttaatagcaatgcttctaaagttacattattaaatctatttgtcatggatttcttttttttttttttttttttgagacagagccttgctctgtcacccaggctggagtgcagtggcatgatctcagctcattgcaacctccacctcctgggttcaagcgattctcctgtctcagcctgccgagtagctgtggttacaggagcgcaccaccacgccaggctgatttttttattttaagtagaaacaggatttcaccatgttggccaggctggtctcgaactcctgacctcaagtggtctgcctgtctcagcctcgcgaagtgctgggattacaggtgtgaccaaccatgcctggcccatagatttgtgataagtgtatcttgtcatgttaagaccattcgcttctattcctagattgctgagtattttctttaaatcacaaataagggctgaattttattaaatattttttcttaatctgttgatgatagtgtagtttttctttttaacctgtttatatggggttacacattaataatttttttaaaataggttcttattcccattgcccaggctggagtacagtggtgcgattatggctcactgcagcctcgacctccctgggcttgcccctcccacctcaccctcctgagtaactgagactatgggcatgtgccaccatatctggctacttttttgtatttttaataaagatggggtttcgccatcctgggctcaagcgatccgcctgccttggcttcccaaaatgctgggattacaggtgtgagccaccccacccagcccagtaataaaattctaatttaaaactatcattttcttcctaaaatagtccagtgtactctcccaaacttcaaaatgagcatattcttgactcatagttgtttcatgggagataacatatttctttcattttcttaaaggtttttactctgctgcttgcatgccattttctttctttctttctttttctgtctttttgtcttcctctttctttctttctttctctctctctctttttttttttttttttgagtcttgctctgtcacccaggctagagtgccgtggcgcgatcttggctcagtgcaacctccacctcctgggttcaagtgattctcctgtctcagtctcccaagtagctgggcctacaggtgcacgccaccacgcccagctaatttttgtatttttagtagagacggggtttcaccacgttggtcaagctagtctcgaactcctgacctcaagtttgcaatagtgggtatacaatgcttggagaggctgttagaataacaaattggcaggatagtggcatacagaatacagcataaggcagttggattggcgtataggttaataccgttgacatcagaatccggtggtttttaatctaactctagagccatcctgtccagtaccactttctgcagtggggaaagtgttctacttgacaccgtctagtatggtaactactggccgcatgtagctgttgaacacatgaaatgcggctggtctacctgaagaaatgattttttttaattgtggtaaaatatacacaacataaaatttaccatttcgtgccctccctgcacttgaccgccgctgctccgtgccggcagcctggggactgggagcactcgtgccttgggtatgccgccccactggctggacaaagcggcgcgtggatgtgcctgtggggccttgccctgggcatcgctgctgctgccagcgcccttcacccatgcttcagcatggtgcctatactcacttcctgcaggagtctgctggatacctgcagctggagcacaggagagatttcagctcttctgggagtaggaagctctcctttgacactcgttccttagtgtgctttctggaagaccatgggtttgctactcagcaagcagaaatcattgtgtctgcattggtccaggtactggaggccaacgtggacatcgtctacaaagatatggccaccaagatgaagcaggagatcgctcttcagcaaataatgtctcagactgtgaatgtgaaaaacgatatgattactttggagaagagtgaattttcagccctcagagcagaacgtgagaaaataaaactcaaactacatcagttaaaacaagtaatggatgaagtgattaaagtccgaacagatactaaattagacttcaacctagaaaagagcagagtaaaagaattgtattcgttgaatgaaaggaagctgctggaattgagaacagaaatagtgacattgcatgcccagcaagattgggccgtcacccagagagataggaagatagaaactgaggatgctggccccaaaaccatgcttgagtcatacaagcttgataatattaaatatttagcagggtctatatttacgtgcctaacagtagctctgggattttatcacctgtggatctaataaagtgtctatttaaagagggggggaaaaggatttaccatttcaaccatttcttaagtgtacaactcagtggcattaagtacattcacagtgttgtgcgaccatcactactatccatttccagaactcttcatcattccaaacgccgtaaccattacacagtaactcctcattcccccttcccctggcaacttctactttctagctctatgcatttccctattgtaagtatctcatataagtagaatcatgcaatatttgtctttttttttttttttttttttttgagacaaggtctctctgtgttgcccaggctggagtgcagtgtcaccattacggctcactgcagcctcgaactcccaagcccaagggatcctcccacctcagcttcctaagtagctgggaccacaagcacgtaccaccacacccagctaattatatgcacgcgtgtgttcacgcgtatatgtgtgtgtgtgcatgtgtgcgcatgtgtgcatgtatgtttgtgtctgtgtgcatgtgtgtgcgtgtgtgtgtagaaatagggtctccccatgttgtcaaagcttctcttgaactcctcagcctcgagtgatcgtcccaccatagcctcccaaagtgctgagattactggtgtgagtttccacctttgatgcacaaaagtgtttaattttgataaagtccagtttgcttttttttttttttttttgaaactgagcctcactctgttgcccaggccagagtgcagtggcttgatcttggctcactgcaacctccacctcccgggttcaagtgattcttgtgccccgcctttcaaatagctgagattacaggggcccacctggctagtttttgtatttttagtagagatggggtttcaccatgttggccagtctggtctcaactcctgacctcaagtgatctgcctgcctcagcctcccaaagtgctgggattacaaatatgaggcactgtgtctggtctgcttatttttttcttttgtttcctatgcttttgatgtcatatccaagaaatcattgccaaatccagtgtcataaagattttcccttatgctttcttctaagagttttctagttttagctctttttaggtctttgatccattttgaatttgtttttgtatatggtcttaggtaagggttcagcttcattcttttgcatgtgaatatccaggtttttttaagctctttttattgaaaagactattccttccataagattggaattggtcttgacacccttgtcaaaagtcagttgaccctgtatttgtgagagtttacttctaggttttctgttctattctatgccagtaccacaccgttttgattagtatagttttgcagtaagttttgaaatccagaagcatgagccctttaacttttgttctttttcacgattaatttggctgtatggggtcccttaagattccatatgatttttttttttttttttttgagatgggttctcactccatctcccaggctggagtgcagtggcacaatgtcagctcactgcaacctctgcctctcaggttcaagcgattcttgtgcctcagcctcccaagtacctgggattacaggcatgcgccaccacacccagctgatttttgtatttttagtatagacggtgttttgccatgttgaccaggctggtctccaactcctgacctcaagcaatctgcccgctttggcctcccagagtgctgggactactggcatgagccattgcatccagctagattccatatgaattttaagatgtttttatggatctgtggaaaatgccattgggattttgataggaactgcattgaatctgtagattgctttggttactgtagtcagcttaacaatattaagtcttccaattcatgaacatagaatgtttttccatttattggaactccgtttttaattatattcaattttaggaaatttaaatttgtttggccatattgtagctaatcatcatcctattggccagcaagcccaagagaattatcctcagattttcttttcttcctaaatcgtaggatcgtagtgacgtcttcagaggccttgtagtatctgaatcatcattggtctcaggatgtctggattgtatggaatgcatggttagaagggtgaataaatagggggtttcggtccctccaggttatctctgtctcggagatatgagagggctacaagtcttgccacatcagaccctgtctccttctctattttccctttggaaatgtctgtttttctccagagccaaagagaacctcttgttttccaaaaaattagcaaaaagtagactctgctctggcaggaatggaactccttctgcctcttcctatttccatagaagaagagaccatagtgccccaaatgaggtgtttttaaaagaaattccttctccaaatggagatgctgattattttatagcagcgtatgtaccttgttcatcattctgatggggttctcatgggaacagcaacaaaaaatgcctttcggtgccaatcatggttgtgctcccaattgcattttccttgagggtcagcagtctaagagatgcctgcacgttagaaacaaaaaataaagaataaacgctgtaaataattaattaaaccaggaaaccccctttcagtgtccattcgtttttctgccatgtaagaagtaatggtaggatgcggaagacctgtgtccttagtactgttccgtctccctgctgccccttccccagcttctctctaatgactccccggggagatcacaggtctcagagtaaacaggaaacctgactaagtaaaatagggagtcttagagcctagagggtaagagacacagctctccaggaagaagatgcctttggccttggacagccaggagcagtgggtttgtggggttttatataaacactctgttacgactctctgcggaggaaccctccaatccactttaggccagaaatggaactttgttccctggcctgcccatgactactctacatcagtctctcctgaaaagaggctagaatattacttgtgtattcagaattggactaacccagtagttagccagttcgctaaaactgatttctctaccttactgccctgtggcctgtaccccacccttattgtcacccctttctttgtacagagataacttctttactgtagcatttgggatttcccacactacagttgatctgtcaccgcactaccaaaatgcctctgccaaccacttgggtgtcctggtgtcagaagttagaagtgccccaactgtcccacccagcctgctcagctctcctctctctctcctgggttgttgttctggaatgatattcctcttggattcagtgtgtgcagtctgatttgggtggagccttgagctgtacacaggagtgctggtaatgtctggccttcagtgctgccaaaggcaagaagctggcctctcagtgtaaagcacatagttggattgctggggcagtgttaaatggagggtggggtgagcagatagcactctcttcctgctctgttttcaggaagtgattataaaagcagctctaagtttgaatgaaatcaaaagaatgaattgtcaccttcccccaacaaaaaccagatgagcacaaacatatacacaaacacactcctcctctgcactccatccaagatccacaccctggctctgccgggcttcacttcggtgctatttcagagcaaagagcctttgttgtgccatctccattctcttccctgggagagagcttagtagtcttatgaatgagagctcgacttcccttttggcatactgtgggtttcacttccctgtcctctctccttccaagaagagtgtgggcagaagtgtataggtgggaggaataaccattgccaagatttaattcatcagttagggattggggtttcagaactggtaataaaattgtttgcagttaattgtcaatgaaaggagtttctgtgccgttaacacacttccattccttccttccagctgcctctttccgtcgtactgcctttttcctggtacctccatggggtttaagccatatggctcttaggaatatcgtttggagtctccagaagtggaagatttggctgtgcagcacacagcacccctgggtctactcctcccctcccctctcagcagctgtttgccactgaccgaggtggcgaccaagcctatgtgtgtggccagagtcagtgacaagcctcccacccaggcctggggaagcccttagccagcgcggttcctgaggcagccgccaacacgccagggtttcctcataccttcagggctgcggtggagcagccagcgttatgcggcagcattgtctagcgttgcttcacttgacttctctgtccccaccctctgtgtttaagggaatctggccatcatccagcagggaagaagctggcatttacagagagtggctttctgccacccctcatgtggtaggagccaggaccacctccatctctgcttcctacccatgtggcaaagaggaaggggcccctctgtgctcagtctcctgttgtggagtttcgagttgcctaagatgagaataaggctgtctgccaggttatctgcccagataaacatttattgtttacagggacatgtttcagctgctctggcacctcccactggtgagatcctctagtatcttgaggttttaagccagtatatggggccgacgtccagacacagaactactggagctggagaggctaagtggctcgcggcttctaacttagcttcgccattgccccccgccccgcttcccactgccagagctagatttacatctcttgttcttagttctgcctcctggatattgaagctgcatctacattttaaacctttctagcctttagaatttggggatttatatgcgatccagtgttaggacacagcaagctgaagacttcttttacatggcaaaaccagccctctgacactgtgttttccttaatagctaatgagacagctgtttagtgacggcaacagggattgatgcagattttctttttttaatctgactaggtccactgcttccagatattgtctttttatttttttagtgatgtgattgattttccaacattttattatacagcaaagttgaacattctccagtgagctcacttatacccagtacctacatgctgtgattctcattttactgtatttgtcttatcatgttatctgtttatttctctctctccctctcttcccccatctatccacccatccatccattttttcttcttttaaataatttttttaatgcctataatcctagcactttgggaggccaaggcgggcagattgcttgcagccaggagttcgagaccatcctggccaacatggtgaaaccccgtctctactaaaaatacaaaaatgagctggatgtggtgacgggcacctataatcccagctattcaggaagctgaagcatgagaattgcttgaacccaggagggcagaggttgcaatgagctgagattgcgccatgcactccagcctgggcgacagagtgagactatctcaaaagaaaagaaaagaaaagaccagcctgggcaacatggcgaaaccccatctccacaaaaaatacaaaaattagccaaatgtagtggctagcacctgttgacccagctactcgggagagctgctttagtagcccaggaggtcaaggctgtagtgagcccaaaatcatgctactgtactccagcctgggtgatactctctctctctctacacacacacacacacacacacacacacacacacacacacacacacacacacacacacagacagacatgtacatatatacatatatgtgtgtgtgtgtatatataaataatcatataattatattataatcccttatctccacctctgtccccagaggcaagctctgttctgattttttccaccaagattagatttgcctattttagaaccccatataaatggaatcacacaataagtacatgctcttgagaaaggcttttttcatttagcttaatctttttgagattcctctgtgttgttacatatattagtatatattagtagctcactcctttttattgctgagtagtattccattttatgaatatgtcacagtttatctggttgacagtgaatctgtttctagtttttagctgttatgaataaagttgctgtgaatagttgtacacaaatctgtttttggacatgtgttttcacttgagtaaatgcctaggattagaattgctgagtcagagattagatgtgcattttttattagagatcccctggaccaagcttgtccaacccgtggcccacaggctgcacgcagcccaggatgctttgaatgcagcccaacacaaattcgtaaactttcttaaaacattatgagcttttttgccccccgcttttttttaagctcatcatctatagttggtgctattatattttacgcgtggcccaaggcatttcttccatcgtggcccaggatacccctgccctacagctttttccaaagatgattttgttagactccaacaattatgacacttcccattgcttcacatcctctttctggtaggtgtgtggtgactggtgatatatcatttttggctttaatttgtatctccctgatgactaatgaagttgtatgctttttgttttttcagacagggtcttgctctatcacccaagccaaagagcagtggcacaatcacagctcactgcagacttgacctcctgggttcgggcaatcctcctgcctcagcctctcaagtagctgagactacaggtgtgtgccaccacattgggctcattttattacaattttttgtagagacaaggtattgctatgttgtctatgctggtctccagcttctgggctcaagcagtcctcctgcctcactcgtccaaagtgctaggcgtgagcccccatgcccagctgaagttgtatactttttcatatgcttactgacttttttgcctatcttccttatgaaggatcttttcacatcttcctcccattttcttgagttattttcttgttgagttccttatgtattctggatgtaagtaatttgtcagatacatgttttgtgaatattttcacaaagcctgtgtcttacctattcattttcttaatatcttttgataagcaaaaggttttaattttcatgaaatcaatttatcctgcttttcttttatggttattactttatgagggctaaaaatcccaagtgatgaggatcttctactcggttctcctctaagcgctgtatggaggccgggcgcggtggctcacgcgtggaatcccagcactttgggaggccgaggtgggtggatcgcttgaggccaggagttcaagaccagccttaccaacacggtgaaaccgtttctctactaaaaatataagacgttagctggacatggccgggtgcagtggctcatgcctgtaatatcagcactttgggaggccgaggcgggtggatcgcgaggtcaggagatcgagaccatgccggctaacacagtgaaacctggtctctactaaaaatacaaaaaaattagccaggcatggcagcgggcgtctgtagcccaatctacttgggaggctgaggcaggagaatggcatgaacccgggaggcggagcttgcagtgagccgagatcacgccactgcactccagcctgggcaacagagcaagactccgtctcaaaaaaaaataaattagctgggcatggtggtacatgcctgtaatcccaactactcaggaggctgaggcacaagaatcgcttgaacccaggaggcagaggttgcagtgagccgagatcgtgccactgtactctggcctgggcaacagagcaagactccgtctcaaataataataataaataattctgggctgggtgcggtgactaatgcctataatcccagcactatggaaggctgaggcaggcggatcacttgaggtcaagagttcgagaccagcctggccaatatggtaaaaccctgtctctattaaaaatacaaaaattatggccgggcgcagtggctcatgcttgtaatcccagcactttgggaggccgaggcgggcagatcacaaggtcaggagattgagaccgtcctggctaacacagtgaaaccccatctctactagaaatacaaaaaattagccgggcgtggtggcacatgcctataatcccagctatttgggaggctgagtcaggagaattgcttgaacccgggagacggaggttgcagtaagccaagatcgtgccactgcactccagcctgggcgacagagcaagacttcgtctcaaaaaaaaaaaaaaaaattagccaggtgggtgcctgtaatcccagctactcagcagactgaggcaggagaattgcttgaaccgggagacggaggttgcagtgagtcgaggtcacacctctgcactccatccagcctgggcaacagaacgagattctatgtcaaaaaaaaaaaaaaaaagctacattgagccaggcacagtggcccatgcctataatctcaacactttatcagtctaaggcaggagaatcccttcagtccaggaattcgagaccagcttggacaacatagtgagacccccatgactacaaaaaaattaaaaaatcagccagacatggtggcctacacctgtggtcccagctacttgcagccgtgcacggcaaggctgcagtgtgccatgtttgcaccactgcacttcagcctgggcaacagagcaagaccgttgctcaaaatttaaaaagacaaaaaaaaaaaaaaaagctatctagatttagcttttatatttaggtctatgagacattggaaataaatttttttttgagacagagtctcactcttacacccaggctggagtgcagtggcacgatcttggctcactgctacctctactccccaggttcaagtgattctcgtgcctcagcctcctgagtaactgggactacaggtgcacaccactatgcttggctaatttttgtatttttagtagagacggggtttcatcatgttggccaggctggtctcttaactcctgacctcaagtgatctgcctgcctcagcctcccaaagtgctgggattacaggcatgagccactgcgcccattcctgttgttttgttttttgagacggtcttgctctgtcacctaggctagaatgcagtggcagggatgactcactgcagcctcaacctcccaggctcaagtgatcctcccacctcaacctcccaagaagctggaactataagcaagcaccaccacacctggctaattttttaattttttatagaaatggggtctcactatgtttcccaggctgctcttgaactcctgaactcaagtgatccccctgccttggcctcccaaagtgctggaattacagacatgagccagtgtgcctggtcttcaaattaattttgtatatggtgtaatataagaactaaaacttttttccccccatatggatatcaagttatatcagcactatttattgaaaaggcatttcttgcctctgctggattgctttggtactttttttcaaatatcagatgagcatataagcaggggtgtcatgctttctgttctttttgttcgttttatttaaaaattcttacgacaaacgctagaatccttatgggagtaagtttaatttacgtatcagttttgagaaaattgacatcttaacaacatttttctagtttatgaacatagtatagctagccttttacctaggtcttttatacttttcactgtacaggtcttatacattgtctgttaagtttattcctaaatacattttattttttatgccattataaatggaattgtttctaaattgtatttaccagtcttttgctgctagaatatgaaaatacaattgacttttgtatattgatgtatccttcaatcctaaagacatttttattagaatttaatctagtagttatttgcgcattatttgggattttttgtgttaaacaatcatgtcatctgcaaacagaggcagttcttttccatttttatgctttcagcgttttttttcttgccttaatacagtgtctgagatctccactagtgagttgaaaggaaatggtgagagcaggcatccttgctaggaccacgtatatctgtggtcccagctacttgggaggctgaggtgaaaggatcacttgagcccaggaggtcaaggctgcagtgagccatgttcacgctactgcactacacactgggcgacagagagagaccctgtctcaaaaaaaaaaaaaaatttaaaagccatactggtgactgtctagaagtatttcattgtgatttttgttttgttttgctttctttttttgttgttgttctcattgtgattttaatttgcatttccctgatgagtaatgatattgagtgccttttcttctgctattggccatttgaataccctcttctggggagtgcctgttcctgatttttacccatgtttttcttggattctttgtcttttttcttactgatttatagggtgttttttttttccagtattctgaatataagtcctatgttggatagaagtattgaaaatatcttctcgcagtctgtggttcatcttttcagggtttttatttttttgaggcagagtctcgctctgccgcccaggctggagtgcagtggcgcaatctcagctcactgcaacctctacctcctgggttcaagtgattctcctgcctcagcctcctgagtaactgggattacacatgtacccgccaccacacccagctaatttttgtatttttagtagagacggggtttcaccatgttggccaggctggtctcaaactcctgacctcaaggaactcctgacctcaaactcctgaccccacccacctcagcctcccaaagtgctgggattacaggcgtgagccaccatgcccagccatcttttcagtattaatggtatctttttatgaacacaaatcttagttaaaataattttttcttggtcaggtacagtggctcatgcctgtaatctcaacactttggaaggccgaggcgggaggatcccttgaggccaggagttcagtaccagcctgggcaacatagcaagaccctgcctgtacaaaaaaaataaaaaataaaaaatagctgggcagggtggctcatacccatatgtaccaactactcaagaggctgaagtgggaagactgcttgggccgaggcagttgagggtgcagtgagccaagatcatgccactgcactctagcctgggcaacacagcgagatcctgtctcaaaaataaataaatgaaataataaatagatatatttttattaaaagttagtgagtgctttttgtgtcttatttaagaaatgtggccaggcacagtgactcacacctgtaattcttgcactttggggggccagggtgggaggactgcttccatccatgagttcaagaccaacctggccaatatagcaagaccctgtctctaaaattaaataaataattaccctggcatggtggtacacgcttagctactgaagcaggaggattgcttggacccgggagttcgaggctacagtaaactatgatcatgccactgtactccagcctaggggacagagcaaaaacctgacttcccacctcccccgcaaaaaagagaaatgtttgcctattccaagtgcaacatattggaaggaagatattcttctgtattttgatcttgaaactatattattttaccattcacacttgggtctgtggttcattttattgaaagatcagttttccccactgaactgcaatgatgccatgtcataagtcagatgattatatatgtttgggtctatttctatactgtatcttcttccccaaaggtctatttatctctgcttgtgccattactattaaatttttaaatattagtttgaaagtttccgaagtttgtgcctgttttcacattgactcttctagaaagaggtttaccaattccttagattggtatcctgttgaactgcaatacttttttatatgttaggtgatttttttttcatccttactagggccagtctatacttgttcatattgagagtttagatgggcctcttaagattttcaggtgcagacaaagggaaaagaggaacatttgatttatactgccagtgttaaacactctgtttgctagagtagactaggtttctcaacctaatgttattctgggttttttgcctttattagaacccatcctcctcagctgtgtcttccttctgcctcatctggccacccacaccagctatcagttagcagccacaaatacctgctgtgtttcccatcaaccctggtaggatccagttgtgcccttctttttttttaattattttattttattttattttattttatttcatttcatttatttcattttatttattttattttattttattttattttattttattttattttattttatttttgcccaggctggagtgcagtggcacgatttcgactccacaacctccgcctcctggattgaagagattcttgtgcctcagcctcctgagtagctgggattacaggcgcctgccaccacgcccaactgatttttgtatttttagtagagatggggtttcaccatgttggccaggatggtctcaaactcctgagctcaggtgatccacccgccttggccccccaaagtgctgggattacaggtgtgagccaccgcgcctggcccctgtgcccttccaactgcatcacaacccaccttggttcttgtcttagttgccccaagataagggtattaatgtggtactgccgctaaggtctcatctgtattcttactcagcctgaaaagggttgaacatcagttgtcctttttctcactccagttccacccactgttagacttgcagacagtttcccaaagtttctggtatggggttgcctagtactgatggatgctttcttcatttttatttatttatttatttttagtcatttcaatgggaaactggaaggatagaagagaagcatatgcttaatgtcattctgattaaacaaatcaatgttagttttgttttcattttggggagtattttttgttttgttttgggatggagtcccactctgtcacccaggctggagtgcaatggcgcaatctaggctcactgcaacctctgcctcctgggttcaagctatcctcctgcctcagcctcccaagtagctgggattacaggcatgcgccaccgtgcccagctaatttttgtatttttttagtagagacggggtttcgccatgttggccaggctggtcttgaactcctgacctcaggtgatccgcctgcctcggcctcccaaactgctgagattacaggcgtgagccaccgtgcctggcctcaatgctagtttttaagaaatgagtttctagccttccagattgaaatacttggaaggtcattgttcatttgataaaggtaggcattggacttagattgtgctttcatgggtttatatgcatgggtttgttacttcataactagttccaccactctcgtgtgacactcaggaggagataatttagtgatttcatgaagatgctccttaagtctttctgtgttgggtctcaaccctgtaggctggatattaatagggaccataccccaaaggtccaggaaaggaaaggtgaaaataataagatctccagaatggagtaggagtgatggttttgaggccatgggttttagatgatctagctgtttgctttcatttgataagaatgccatatagctcacttggcagctgtgtaagagaaagcagtcctgataacccagagacccatttaagaattgtgtgctctcgtggagccagcaccctttcccaagccggctttgttcaagacccagctggagagcagggatgtgtgctgtattctttgtaaccctagtgcatgttataatgttcaggaattggtaagcaaatgagtattcatttagaaattgggccttaggcccagcatagtggctcatgcctgttacccaagcacgctgtgaggccgaggcgggtggatcacttgagcccaggagttcgagtccaatctgggcaaataggccctatctctacaaaaaataaaaaaaaaaattggccaggcatggtggcacacgcctgcaatgctagctgttcactaatcaggaggctgaagtcgcggggaggatcactggagcctgggaggctgggagatggaggctgcagtaagccttgatcatgccactgcactccagcctgggtgacagagcaagactctgtctcttaaaaaagaaaataaaaggctgggaacagtggctcacacctgtaatcccagcactttgggaagctgaggccagtagatcacttgagctcaggaggtcaagaccagcctggttaacatggtgaaaccccatctctaccaaaaatacaaaaattagtcaggcatggtgacgcatgtctgtggtcccagctactcaggaggctgaggcagggggattgcttgagcctgggaggcagaggttgcagtgagctgtgattgcgccactgcactctagcctgggtggcggagtgagagtctgtctcaaaaaaaaaaaaaaaaaaaagtttggagctcattacacctggcttttattgtttgctgttttgctttttaatatagctaaagtatgcagatttatttagctttaagttttgttctcaattccctagtggaaaaaaaaaagcaccaaaaaaattcaatttttacatttcaattcaaatgcaagaacttggaacagaccattgccttttatttatttatttatttatttatttatttatttatttatttattttttattttattttttttgagacagagtcttgctcagtcacccaggctggagtgcagtggcacgatctcggctcactgcaacctccgcctcccgggttcatgccattctcctgcctcagcctcccgagtagctgggactccagacgcccgccacgacgcctggctaattttttttttgtatttttagtagagacggggtttcaccatgttagccatgatggtctcgatctcctgacctcgtgatccacccgcctcagcctcccaaagtgctgggattacaggcgtgagccaccgcgcccggccgacttttttttttttaagagggaagcggtaataggaaatttaatcaggaagatttctaagcttcaattgtaaagatacctccttttcccaagagttaggcctaatgaagactatacctaccagtacggagggggaggggataaatcacaactaaagaccttggcacttctgtaagaaatttaaataacaggcagacatatagagatttgtaaatatgtacttgctgccagataaaccacagggaagatactgtatttgtggtccagggaagtttaaatatttgtggtcaaacttaaaattcaacgtaaaactctcatctgtgatggaaactttccagaaactgcatggagcgggtgtgcaagctgcataaactctcaaaggcctctcctctcaccaggctgagctggaaaagcctgttctccttccttcaaactgtgtagctaacaagcccttcgatcagagaaggaactccttgatgctccagccaccacccaagaaacccgctctaaggacctttcgggccaggcacagtagctcatgcctgtaatcccagcactttaagaggccaaggccggaggatcccttgaacctaggagttcaaggccagtctgggcaatatagggagaccccgtttctataaaaaattagccaggcgtggtggcaggcgcctgtggtcccagctacttgggaggctgaggtagaaggatcgcttgagcccaggaggtcgaggctgcagtgagctatgatcacaccactgtactgcagcctgggcaacagcgagatcctgtgatctcagaggacctctttgagcgagataagaaaggacctctcttttttgtggcttgcaccttcaagtctgatcaaatattacctttcttagggtcttctattcaccatcttatataaaatagcaatactcttccccaccctgccgctctctgtctcccttacccaactttttttcacagtacttcccactactgtctgcttatttgattctcagtctcagaaaaatgttttaagttccatgggaacaggagcattgttttattcactgctgtattcctggtggtttgaatagggcctgccacaccatagcatgtgcttaataaatatttattgaatttcagtagaatacatttagaactcagactgtgagatcagcctgaaacacctcagatatcttactttgtgttctgtgaggctctacgagctcctctgataaggaaactggcactgaaggtgggcgtagcggccttcagatgtaccaggcagctcttgccgtaacacctatagcctacacatcgaaatggaattggagccgcttaattttcacagtaaatacatatatagcactctttgtttctggccttcaaatttgttgatgaccctcctgatattgattcctctggggtgggagctctttctgggcagcgtgcagactggagcacatgtatatactttgcacattattttgcccaactttttgtcatttgagaccctgcttggctggggagactgttgttgctgacctctcccaggcctgttggacttgatgatgactgatggacttgagcacctcatcagggtctttcttccgtctgctttcctttgctgcttccgccagatctttccatcagtccccccaacacagagtgctttattgttgatgatccttagtatttggcatgaaatgtgcttcacaaatgatgttgattatctttaaaataccgtgtgtgtgcgtgtgcgtgtgtcatagtatatcaccacttacataaatgtatctataaaaggcatagagagagctcgtagttaatcacatatgtcagtaaatgcagaactatctctgaagaacataccagaaactcgcaacagggcctaaaaatcaaaggtgggaaggttttgtttttaaaattcggcctttgtattgctttttttcaccatgtgccatgtttctgaactccacgttactaagcagctttggcttcagtttggcctggtacttgattctgagatgccaccatatctcattgaactcctttggtactttgtcagcagcaagagtgactttagcttaagtaacagaattaagtgacagcttttagttctgtgttgtcttttttttttttttttttttttttgagatggaatctcactctgtcgcccatactggaatgcagtagtgcaatctctgctcactgcaacctctgcctccgggttcaagcaattctcatgcctcagcctcccaagtagttgggactgcagacgtgcaccaccacgcctggctaatttttgtatttttagtagaaacagagttttgccatgttggtcttgaactcctgagctcaggtgatccacccaccttggcctcccaaagtgctgcgactacaggtgtgagccactgcgtctgcccttgtgttgtcaatttttttaaagtttagggtgtatataggtttctctagtataggctggtccagaaattttgtctctgttttgtcagtataaagcactgaaactatacttcaaagtagtttataatggtttgcgtgtctatatgtgttcttcaaaagtagagtaagcagcacgtagttattggattcctgtctctaatcctattcttaatctactgccttgaaaatatttaataaagaatgagaaaggccatgcacggtggctcacacctgtaatcccagcactttgagaggctgaggcaggcggatcacttgaggccagcaattcaagaccaggctggccaacatggcgaaaccctgtctctactaaaaatacaaaaattaaccaggcgtggtggcacgcgcctataatcacagctacttacgaggctgaggcacgagaatcacttgaacccaggaggtggaggttggagtgagccaagattgtgccaccgcactccagcctgggtgacaaagcaagtctccatctcaaaaaaaaaaagagagacatatattctaacagcagctttttggtctctttttcaaatcctgtgagaatatactacatagacttggtaatcaggaatggatcagatgagatactgtcaactctaatgctattttgccaggacaacctgcagaaaaatacatcttcctgttctagatagatgtcatagcctttattatgctctgtgctagtcatgagaaaacgccagataattaatgtattgtctctggggttgagtttactctctgaaaaatggggatgacattagttatttcataagattttagtaaggattaaatgagataaaataagtgaaaatgcctaggtttttttgctctgtcgcccaggctggagtgcagtggtgtaatcctcaactcactgcaacctccaactcctggattcaagtgattctaccacctcagcctcccgagtagctgcgattacaggcgcccgccaccatgcgcgactaatttttttatatttttagcagagacgggtcttcgctgtattggccaggctgttctcaaactcctaaccctcaggtgatccacccaccttggcctcccaaagttctggaattaaagggatgagccaccacacctggctcagaatttttttattattattattatctgagacagagtctcgctttgtggcccaggctggagtgcagtgacacaatctcggctcactacaacctctgcctcccagattcaagcaattcttctgcctcagcctcctgggtagctgggactgcaggtgtgcacctgcaggtttgcaggcgtgggcctggttaatttttgtatttttagtagagacagggtttcactatgttggccaggctggtctcgaacacctgacctcaagttacccgcccgcctcggcctttcaaaggcctgggattacaggcgtgagtcactgcgcctggcaagatttttaaaaatgaaagtttcaatatgtgttttcatagtggacgctggggattggagagtggctaagaagactccaaagaggtccagttacaactcagtcacacatcagattcccatgtctccttctggatcatcctgtagtttctatagctgttttctgtaattcatgcaaattctctgtaatccttcatttccgttttctacccacttagctgttgccattattttgaggcattggatgtaaaaaacaaaacaaaacaaaaaaaaacctgttagatttatcttgtaggctaaggctcagaaattgggcaaggttcaggtagcttttcagaaggcgaggcaggtgtgcttagttacactattccaagattctcccagaaatagaactctaaagtgaggacttgggtgcccttgaaggagaacaacaaaataccattttggaaataaaattctgctgtcctgggtgttccagcccctcccatgctggcctcctttcggcaccattcctttctgcagtcccaccccgcttggccctggcacgcagtcccatgaacatgccacctgccttctctctctctctggccccatccattggctgttcagtttattttttccacatcctcaccctcttccagctccaagttaaataaccctcacagatggcttgttccatcagagctgtttaagaacacagagcagtgaactagtgcccagaggagctgccccagcccaagactgcccttcctatggaggctcaagacaactgtgtcatcagctacctagaggcccagagacagtgagcagaaaggctggcaggttgggtggtagaatgtctgtttaacactataatcctctagcagctaacaactagttctcacttagatttacaagtcagaaccaggagccagatacactgcatactccattttccatagaagacatagtacttcgtagctggcatttctcccccacttttttacagcatggaaacccaacaggaaatgacagtccccatttgtgtttgggatcatggtttcagtccttagtgaacctcttcatgaactcccgagaggtctagatccctgccctgcctgacccaaagggcaggatttccagctgtcagcacacccatgggaagacagggaacttcacatgcctattaggaatcctgcatagagtctgggcacagtggctcacacctataatcccagcactttgggaggccaaggtgggcagatcacctgaggtcaggagttcaagactagcatgaccaacatgtcaggctaaaatactaaactactaagtactaaaatactaaacgtctctactaaaaatacaaaactcagccaggcgtggtggcacatgcctgtaatcccagctacttgggagactgaggcaggagaattgctagaacccgggaggcggaggttgcagtgagccgagatcgcacaattgcattccagcctgggcgacaaaccgagactctgtctcaaaaaaaaaaaaaaaattcctgcctagagagaagatcccagaatttctttcactctttctttcctgtcagcagggacacggaggtttcctgtctgccttgtcatcagctttgaaacattttcctcctgcattcccccatatatgtagtggcctgtaagctttgcccccttcatgttcccagcatcctccttccctctctcataatcggctgggtctggttaattttgcccttgtgacaggacagcctttcccttgtcctcggagttattcctgtgggacataagacctctctggtcatggtctccctctctttcccttccttcttgccctttcctctctaactatagcctttgtaaatagactcctctgaggtcaccgaggaatggtagtatgtgcctttgctgctataggactctcttttcccccagtaagcagagttcccttgagagacccccctcccttcctttattaaaaggcacgttggtggcttatctgcttgaactctggcataacagggcatggaacaatggcatgtgcagagtgctttggccaaagggaaattaactttgagccagagacagcagtttgaagaaacttcccttagtaagaaaagagacaagaagaaaagtgatggggtggaaagggaaaattctatggcagagaaggtctccctgagaactcaatcagaaatcagtatctcctccttaagcctggtttttccactgagaagtaaactattattctctcttctcctccttcataccttctccaagatcaagcgttgccagataagtaacacaccctgttgcttgcaaagtaaaagttacttggattgacagatttgtggagcctttgggtgccaagtatcaggagggagctttgatttccattttcctgtcttcatgatggactttactctttacattcagtagaaaagttcaaggctgtggtgcagacaactttcagaggttacccacatataggtcttaaaacttaacatctggcagttactagtttcctatattcattcagctcatcaagtattcagctgaggttttgcccatattatgtccagtgaaatgaaatgaatctaagtgatagaactctttttagggcaggtatcctgagaaattttaaatttcagtatttcttttcttgcctgtagcttagccaagcacccattcaatttgtgttcctctaaaggcaaattcgtcagaactgtttcttctgtcctgagggcctttaggctactgctgagtctgggcaagtgttatttatttatttatttatttatttttgagacagagttttgctcttgttgctcaggctggagtgcagtggcgcggtcttggctcactgcactctccgcctcccaagttcaagcaattctgccttagcctcccaggtagctgggattacaggcacctgccaccacgcccggctaatttttgtatttttagtagagattgggtttcaccatgttggccaggctggtctcaaactcctgacctcaggtgatccacccaccttggcctcccaaagtgctgggattacaggtgtgagccaccacgcccggctgagtgtaatattttttaagtgagaaagacttgaagtaggctgagtgcagtggctcacgcctgtaatcccagcactttgggaggtcgaggcgggaggattgcttgagtccaggagtttgagagcagcctgggtaacatggtgagaccccatctctacaaaaaaaaaaaaaaaaaaaaaaaattagctgggtgtggtggtgcatacctgtagtcctagatgttcaggaggctgaagtgggaggatcacttgaacctgggaggttgaggctgcagtgagccaagatcacaccattgcactcagcctgggcaacagagtgtgaccttgtctcccaaaaaaaaagatgacttgaagtagagacctttccctatactctttgtgaaagtgccattaccttcataagaggccatattataatataatgaactgagcacaaactttggagtaagacaaatctgggttcaaagcccagcttcatcacttcatcacttgctttttctgagctttagtttcctcttcctgtctcacaggattaccatgataatcaaatgaaataacataattcctagtaaccatctgtcaccacttcatctacaccacagctttcccagtaaaatgggatatttaggccaccaagaaagcgtgatcaatgaaaattgcagaggaagtaagatgctaacttgctctacctgccactaccctgaacctttttttttttcaacccccttaacctctttaaagagcttctggcatgctcatgggtttttctttctagaactttccctgccctgaatttgttcagtatgcattgtcacttgtgaggacttcttttcacaataaatacccaagtgctttagaatgtctggatggtggccaggcacagtggctcaagcttgtaatcccagcaatttgggaagctgaggcagacggaacccttgaaatcaggaattcgtgacctgcctggccaacatggtgaaaccctgtctgtactaaaaatacaaaaattagccaggtgtggccgggcgcggtggctcacgcctgtaatcccagcactttgggaggccgaggtgggcggatcacgaggtcaggagatcaagaccatcctggctaacatggtgaaaccccgtctctactaaaaatacaaaaaattagccgggcgaggtggtgggcgcctgtagtcccagctactcgggaggctgaggcaggagaatgacttgaacctgggaagcagaggttgcagtgagctgagatcgtgccattacactcctgcctgggctacagaacaagattccaactgaaaaaaaaaaaaaaagaatgtgttgatggtgattctcctggaagtcaagcctgctttctctgtgccatcacagaggtgttgctggcagactaatcttgagacgacttcttacctctttgcaccaaggctcttattaaggggtctttcctgactttagatccggtgatgagttagcccaaaagagtgtgctcagtctcctatagggctcacaggtttggcttataccctccaagtggcccaatgggagctacagggtgttggaggtggtcatgggaaagaaacagctcacaagaagagcgtggggcgagagccagccgttccccactgcctgctggagcaagctcagtgaggccgctgacaagagtcctcagaacactaaacaggtgattaaaacatcagtataagtctttccaagcttcacagaaagccaaaaacttagtttggacagcaacagaaattttccgctctgtagctttataaactggtccgctgtttcttcctctgctctgtggccagaggggagctctgtgctaatgattccataaaaccctccaagtcttcctgagtggcttatcatatgagagtaacctataccacccttttccatcagagtaatctctagcctctcactgttagttcgcattctgaatctttaacccttccaaaaaggccaagcccagctcttggcactgtcccctatgacagagctgagctcctccatcaagctcagtggcagaacgatcctttcctcctttccaagatgactgcccagaatcacagaaacctgtaagaatggaaagagagtaatcccaattctgggcattcacccaaaagatttgaaatcagttggttgaagagatgtctggactcccaggttcactgcagcattagtcacaataaccaagttatggaattagtctgagtgtccatcaacagatgaatggataaagaaaaggtgggacatacacacaatggagtactatttggcctttaaaaagaaattctgttgttttcagcaacatgggtggaattgaagagcattatgctgagtgaaataagccaggcacggaaagacacataccatatgttctcacttacatgtagaatctgaaagagtccagctcataaaagcagagagtaggatggtggctacagaggctgggaaatggggagatgatggtcaaagggttcaaagcgtcagttccatgggagaaagatgggtgtgtgtttttctgagatctgttgaacagcatggtgagcataaaaatacagcactgtacatttaaaattgctttaagaggtcagacgtggtcactcacaactgtaatcccaacattttgcgaggctgaggcaggatgatcacttgacaccaggagctcaaaccagcctgggcaacatagtgagacctcatctctaaaaaaaaaaaaaaaaaaaaaaaaaatgaaattagcaggatgtggtggtccacgcctgtagtcccagctacttgggaggctgaggcgggaagatcacttgagcctgggaagtgaagactgcagtgagtcttgatcacaccactgcactccagcctgggtgacagagcaagaccctgtctaaaagaaaaaaaaattcctttaagagtaaatttcaaattttctcaccacaataaaatgataagtatttgaggtgatgggtatgttaattagctgggtttaattattatacattgtattcataaaatatatcactttgtacccttgtaaataaacacaaatataaattgtcaatttataataaaattttgtaaaggactaggaatatagatcttcagagttattagcatcttgcagacagggctcagtaatttgcctgagagcacacaagttaggaggccacgacactgtcgttccactaggccctgcttgtcctagactgtggcgtgtcacccacccaggaggagtgcaccatgcccagaagagttcagtcttcaagaaatcagctctgagaggctgcctttttctcttcttctgtgaatttccaggcaagagaagagctttctccttggggagatggtgagggtctctgaaacacctgtgaatgttctggatcatggagagctgtggcagttagaacagtccggcccctgcagttactggctgcatttcctgagcaagttacttctctgtgccttaatttcctcacctctataatcgaagcagtgacagtatctacttcatgaggttgtggggatcacgagttggttcgtgtaaagcatttggcacagtgcctggcttgtagtaaccattcgctcggtgttcgctgtggctgcgaagggtgagtgaggcatgcagcaggttttattacgtcccggaaggccgatggcactcttccaggaaggtagcgctggtgagctggtaaaccttgaatgaggaagtcattttatctggctttggatcttagttctcctgagaatgtcattgaatttatttgaattttagtttcctcatctacatcatctggatgtagtaactgcatcaaagagtgcagaggatttctagatcctaaaagtatcatgaaaaatataaagtaggttgggtgcagtggctcacggctgtaaccccaacactttgggaggccaaagcagaaggactgcttgagaccaggagttcaagaccagtcctggcagcatagcgaggccccatctctacaaaaataaaaattcaaaaattagctgggcatggtgatgcatgactgtcgtcccagccacttgggaggctgaggcaggaggattacttgagtccaggagttcaaggttgcagtgagctttgatcacgccactgtactccagcctgggtgacagagcaagaccctgtctcaaaaaatatatagatagtagtagtgtttgcacctttgaaaaatagagttgcattttgaagagtctagtaaaattgtgaccactttgacctaaccttccatcctttaaagcagtaattctaaaactcagtgttcataagtacctggaacacttacacacattctggccaggtgctgtggcccacacctgtaatcccagcactttgggaggctgaagcagggggatctcttgagcctaggagttcaagaccagcctgtgcaatacattctggccaggtgctgtggctcacacctgtaatcctagcactttgggaagctgaagcagggggatctcttgagcctgggagttcaagaccagcctgttcaatatcgcgagaccccatctctacaaaacattttttaaaaattagctggatgtgatggtgtgcgcctgtattcccagctactcgataggttgagactgcagtgagccgtgtttacaccacagcactccagcctaggtgagagagcaaaaccctgtctcatagaataaaatgtttaaaagtacacattctaaggtcctatctcaagaaatactaattcattgaattcaaagtggaatccatagccaaggagtagtgttaggtaaaaagaaaacaaacaaagtcgggcaccagtggcttatgcctataatcccagcactttggtaggtgaaggagggcagatcacttgaggccaggagttcaagcccagactggccaatgtggtgaaaacccatctctaaaaaaaatacaaagattaggccagggacggtggctcactcctgtacttgaacactttggaaggccgaggcgggcgagtcatttgaggccaggagtttgagactagcctggccaacatggcaaaacctcatctctacaaaaaatacaaaaactagctgggtatggtggcacttgcctgtaatccctgttgcccaggaggctgaggcagaagaattgcttagatctgggaggtggagatttcagtgagccaagattgtgccactgcacgccagcctgggcaacaaagcaagacactgtctcgaaaaaaaaaaaaaaaaagataaaaattacctgggcatggtggcaggcacctgtagtcccagctactcaggaggctgagatggaaggatcacttgagcccagaaggcagaggttgcagtgagcggaaatctcaccactgcactccagcctgggcgacagagtgagacccagtctccagaaaaaaagtggagttcgggaatctgcatttttaataagctcagcgtgtgattgtgatacagttggttttgaaaaaatgccttttcatgttcagatgtgaagaagggagaactgacactgattgagctggttctgtatggcagccatttgctgacttacacgttatcccgagctatggataggctagttcgttttcgttaacaaagcttctcttgtctccaactatgaggcatgggtcatgtttgtgattcaggactccagaaacatagaacctgaaaatgcaacttaaaatggctttctacctcagcccaaatctcagagaatgtctgcatactacattttttaatatgctgtgggggttcttcagatgtggatgtaatttttttttttcaaagcatgacatcagtgctttgaagatcattaaatgtcacttcttaggaggtacattttaccttgacctggtacaacagcctccatggagttaagacctgcccagagcgtggcttcttctggtatctggtttcacatgagaaactggaggcagcctgtcaaagaggagtccctattccttattgagtccaaacccccatgaggagcaccccccaaacagaaggtagcatctccgagtgtgtccaggtgtctgtgttgcacagcttcggggagcatgattgacacagtataggcagtatggccgcaccacctccgtgatgtcctctgggattgtcctgaggctgccatctgacccccacgatcactcatccacattgttcaggtatccatagtgcatgttaaatactgcagatagattttattttaagcacacacacaaacacacacactagtgcctcccctcaagaatcttacttaggagaaaaaaacacgacagattaatgggagaaagatattaagaattgtaaataaaaccaactgataaaattcatgtaacatggccaggcacggtggctcacgcctgtaattccagccctttgggaggctgaggcgggtggatcacctgaggtcaggagtttgagaccagcctgaccaacatggggaagctccgtctctattaaaaatacaaaaattagttggacatggtggcgggtgcctgtaatcccagctactcgggaggctgaggcaggagaatcacttgaacacaggaggcagaggtttcagtgagccgagatcacgccattgcactccagcctgggcaacaagaccgagactgtctcaacaacaacaacaacaaaaagtatgtaacataaacctgagaagggaatgcattcttagatgaaaaatttaggatccaaagagaacttaataggttgcaatggggagaagtaaatgacaagatgaaatcagaaaagaaagaatgtaaaaccctaccctggtccaaaaagtcagccacacttagcatgtagcatgcagcacaatggtaaataatcggatttcttcaggcatggggagaagaccttggtgaaggaaaagatgtgaaagggaatagttggtggagggcttgtactccataaagggagataggatttagcaacatatgtgaaaacaatttggggatttgttgattagaagctcacaattggcagggcacagtggctcacacctgtagtccgaacactttggggggctgaggcaggaggattccttaaacttgaactggagttcaagaccaactggggcaatatggtgaaaccccgtctctacagaacacacagccaggtgtggtggcacgtgcttgtagtcccagctcctgaggaagttgaggcggaaggatcacctgagtctgagaagtcaaggctgcagtgaaccatgatctcgtcactgtactccagcctgagggacagagcaagaccctgtcccccgccccccaagaaaaggaaaaaagaagctcacagtttatcagtagtgcaaggtggggacaacaacagtaatgctgttaagtctattattaaaattgagtatccccgatagaaatgggagggaatggtctactctctgctctgctaccaggtcacgtgggcactcactgtgggagacactttagtcttagtgaaagtcttagtgaaagaataagcaggatgtttaggagacagttggagtgaggcacagttgaaggaagtgggactgtttagcctagagaaggtgtataacacagcagacctcataatttgaggccagtcagataaaagcagaatttgagtttgttttcttttgttttttgtttttttacatggccccagagaaccgaattagaagcattgggaggcagatctgggtttaaaaggtgtaaacatttctagcaattagaaaagtccaaaaatagaatggccttctggtaggaaatatgcccccttacagattcaacacagtaacacacctcatacagaatggtcaggaaaaaagtctgttagtgtagacaataaaaatgattggctggacgtggtgactcatgcctatcatcccagcactttgggaggcggaggcaagcagattgcttgaggccaagagttcaagaccagccatgccaacatggtgaaaccctgaaattagcaggtgtggtggctcgcacctgtggtcccagctatctgggaggctgaggtgggaggatcacctaagcccaggaagtcgaggctgtagtgagccgtgattgtgccactgcacaccagcctgggtggacagagagagaccctgtctaaaaaaaaaaaagaaaagaaaagaaaaattatatatttcttcaatgttaagtaatgattgattttaaaaactactccagggccttgagtcctctccaccagaagtagtcaagaaagacttggatcactgaggggtatttagaggaggttctcttgtggctctgagtgattgttaaggtctcttccaaccaaaggacaaaagaattcactttgtgacgtacaagtagtgcagatgttgagggctgctaatggagtcagagaagatgaatgaagtgtaggcctagtccatagttgctggagggatacctgtgtacttgggagaggttagtgtgaggttcctgtggagtcctttgctggactgaaggtcatgtgaagtcaaggactgcatctgtcttgtcttgtcttgtcttgtcttgtgtgcccaggatgtctagcagtccctgtcacatagtagggcgttacgaaagatttgtggaaggtaggctggcagactggacaaaggctaactggcgtcttgaaggacttataggctgggatgggcggctcacacctgcaactccagcactttgggaggccaatacaggaggatcacttaaagctatgagtttgagatcagctaggggacatagtaagaccttgtctctacaaaaaaaaaattagccattagccaggcgcagtggctcacgcctgtaatcccagcactttgggaggccaaggcaggtggatcacctgaggtcaggagttcgaggccatcctggccaacatggtgaaaccacatctctattaaaaatatgaaaattagccgggcatggtggcgtgcacctgtgaatcccagctactcaggaggctgaggcacgagaatcacttgaacccaggttcaagacgaaggttgcagtgagccgagatcgcgccactgcactccagcctgggcgatacagtgagactctgtctcaataaataattatttgccagacataagtggtgtgcctctgtggtcccagctactctggaggctgaggtgggaggattgcttgagcccagttatttgaggcagcagtgagccttgattgctaacagagcaagactctgtttcaaaaaaaagagaaaaaagaaaaagaccttaccaagcttaaaagacgatgagggaatgaattgattgcttaaatgtaaaataactgcaggttgggggagtaatatgtgaactttcagaggtgccaggggaagcagacagcctgcagggtatagcaaagggggttgcctggggcttgaagttccggattagggaataatagccacaagtgccagtagtgatctttggggggaggggtgggtgggcgagggtttgcaaggagcttgggatttcatttgatagcaaggctaagcccaaaagaattttccatcccgacttcctcgggacccatccgcctgaaaggaatgaaggagcagtgtcctgggtctctgcaaggagcttttcttctcccttgggctgagaattctgccttcctgagtaccgcaggtcatggcagccggggaggggcgcgtgctctcttgatgcagggggtctgttgatgtatctggtatgaatgtgacccacgccacccaaccccccaagtgaaacagggattttcctttgttctgtgatgagtccccagggtctggaggacagtgcctcacacacacagtaggcacttacatgttgctgaactgcatgttgcctaagtgtgttgaagactacagatgtctccgagagtccactcttgtgccacgcgtagaataaatacaattaggagcaaatttggtaaaggagcctaaacacaaacctaaggggaggcctcctggacgtggctgtctagaaggcaaacagtgtggttcagagtgactagagcccaaggttcagtgcttctggcccagagctaactggcagtgtagaaacagactgtgtgtggatatttgcagactgagacagacgggaggactttcatccccaggggctgagcctgcagcctcccctgctggttcagtaagtgagggccccagcgcctgtgttccaggtttcagatcagctgaagccagccagacctgaaaggcttgtgttggcagtgccaatatccgtccttaacccctgccaatgtgggtggctgctctaagagcactctgcaggggaagcagaattggactgaagcccgagctactgctgcctatagcttgctctctgtgacgcttttgccgctgagaatgtacctttctggtacagccggagccgagagctctagaaaagaatagtttctgtccatgaaggaacagttcaagaagagcaagcttactctgcccatggaagaccagactcctatctggctttgtttggaacatctaagctcaggaaattcaggtgggtagaaaataccatattggggatcttctcatcactactttcatattgggagacatgaggcaaggatccagctgggtcttatttaagaaagataccaggctggacacggtggctaacacctataatcccagcactttgggaggctaaggcagtgggattccttgaggccaggagttcggagtagccaagagcagcccgggcaacaaagcaagaccccatcttagaataaaataagatactgttggccaagcaaagtggctcacgcctgtaatcccagcactttgggaggccgagacaggtggatcacttgaggtaaggaattagagaccagcctggccaatatggtgaaaccccatccctactaaatatacaaaacttagctgggtgtggtggcacgtgcctgtagccccagctacttaggaagaatctcttgaacccaagaggtggaggttgcagtgagctgatatctcgccactgcaccgcagcctggggtgacagagccagactccatctcagaaaaaaagaaagaaagttacgttgcagggtttgcagggcctcctcaaaccctcaacgatcccactagcaaaggcagagccaccgcccgtaccccactgtgaagggacctcatggacaaggcaattgtgactgtatttctgatacatttattagtggcccgcttgttccgaagcccgggaccttggagcctctctagattactggagtaatgcatgcatacctatggttaggtccggagtctttctgaagaatagggagagggattgctgaagagaggcaaggtctttcctcccctgcttggccagcccagtagcctggatctagcaccttagttctgaataaaatatttcaggccctgagtggtggctcgtgcctgtaatcccagtgctttgggaggccaaggtgggaggatcacttgaggccaggagtttgagaccaacaatatagcaagacctcatctttacaaaacaatttttaaaaattagccagcttcccgcttgagctcaagagactgagcctgctgcaagccatgatgacgccactgcaaactccagcctggacaaatttaaaaaaaattttttttgcagcttcaacagccaggtaagcattccagggcctctccccttggccctaggctatgtgccagccccatgcttcccaccttgcctctcagactggcttccaaacagctcagccatgttaggcagtgcccctcccacctctgaagagagtggagataagaggaaaaaaaaatgccagctgctcaattatcgagcacctactgggcccaggcatctcgctaagtatttgatatgtattccctctgtctttttttttctttttgagtcacgatatcactctgtcaccctggctagagtgcagtggcgtgctcatggctcactgcagctctgacttccccggctcaagcaatcctcctacctcagcctcctagttagctcggaccataggtgtgttgcaccaccatgcccagcttttttgtttgtttgtttgtttttgacagacacagtctcactatgttgcccaggcttgtcttatctttttttttttttttgcaacagagtcttgctctgtcacccaggctggattgcaatagaacgatctgagctcactgtaacctccacttcctgggttcaatagattctcctgcctcagcctcttgagtagctggaattacaggagcccgctactaacccagctaatttttgtatttttagtagagatggggtttcaccatgttggccgggctgatctcggactcctgaccgcaggtgatccactgcctcagcctccccaagtgctgcgattacaggcatgagccactgcacccggcctgtattatcttttaaacctcacaaacaacttgagcaaacaaaggctcagagaggttaagtaacttgtctaaggataaacagccaggaagtggcagttagtacttgaactcacgtctgtgtaactatgaagcccaggctcttgtccaacctcctgtattgccttgtcttgcctcttgccagaatggccctgttttttatactttatttacctcattacttcctgtgtgtgcttcacaactcccctgttcccctggttctcccttcagtgtgaacatcgtctccttcctagtagccaaatatacgtgtaccttttgggatcttcagtaaccctgtcttgggatagtctccccaccagcaccaggtcttgccatctgaccatttgccagttcccacctccccttctctaagagacttcagcacacacctggtggttacaggtggggacagcaggcatctgtgcaatgctggctgattgataatggccctcattgcctcctctaagaagaaaacacagctgttgggaccagacacatggaatggtgtggttgctgtgggtggaccaatgatgttagcatttcatcttgtgacccaatgacccttcagctagcacaggccaaccataggactacggagggttggatctggacaccgggattagaaatgactgagaaaggccgggcgcggtggatcacttgaggtcaggcgttcgagaccagcctggccaacatggcgaaaccccgtctctactgaaaatacataaattagccaggcatggtagtgcgcacctgtaatcccagctactcaggaggctgaggcaggagaatcgcttcaacccgggaggcggaggttgcagtgagctgagatcatgccagtgcaactccagcttgggtgactgagcaagactctgtctcaaaaaaaaaaaaagaaaaaggggccaggcgcagtggctcacgcctgtaatcccagcactttggttggccaaggcgggcggatcacgaggtcaggagatcaagaccgtcctggctaacacggtgaaacctcgtctctactaaaaaaaaacacacacacacacaaaattagctgggcgtggtggcgggtgcctgtagtcccagctactcgggaggctgaggtaggagaatggcgtgaacgcgggaggcagagcttgcagtgagccgagatcgcaccactgcactccagcctgggcaacagagcgagactctctctcaaaaaaaaaaaaaaagcaaaaagactgagaaagtagcctgtacttaacgctttacatagaaagaggcccagctatagcaggggtagggaaagagtgaaatactgtttgaattgatcccttggacagtatgctccgaggttgtcaggagatgcatctggtccaaggatgtgtgctttttctcactctgtcccccttatcattcagcccctgcacaggttctttctttccctcctctctgacccatgagcctctttctcaatttcataccaacttcttctgactcaagtaggctgtgaatgtctgtctccccatcctaagctactgcctgtgtcttcagactgactgtgcatccttgtggccagtttcgctcctgccttctggagtctgcttcctgccaggaggcccctccccctaggaatgtgaataaaccatttcctctgtcctcccagctccagaggattccctgtgtggtattttttatttcttgtgtctgaacttccattggcagaccccttcgtaggctggcccacccttggctgctacagaattgagcttcccacccttcagtttcctctgagggtgagtagtgcataactagaggttcccagtttgtgaaaacacattagtctgagttaaatttcttgtggccaatcctggaggtttggctcattaaagatgataattaacccattgctaattgacctcagaagccagccaagcagcctgtattttaccagccttggtgttggatttgtaggctattttaaggtttcttaataatctcagaaagacttcatgttcctgtctgcatcttatttgctctaaggacattctgtaaaattaacaagctataaagtttgattgaaggtttcaacaaatgtgagaataattggctccatttagagaaacaagaaaaacaacctgtaaacttgagtttgtggggggaaacccgtgtgattgttctctttaaccagaggagcagtagcaagctggactgttaagactagaaaaaagaactggctgatagtacaagtttaaactccgatttctccaaaccaaaaattcagaaaaagaaattttgcaaaatgactagtaaccatggttgtgccttccaagaagcctgtttggagaaaacggggaccaggtaacgatagagcgagtccctcactccctagagcttgcatccagggtcctggctctccagcccttcctcatattccctggctagatttggaggttttctcccttccccggggctgccctgaggtgttaagtcttgcaactcagagcacatgagtatgtgatacctggtgcttagttcccgttctctcttaccctccctaccttcataaagcagcatatagctcgttttctctccccaacccccctcccccgccgggcatctctacccacactgtgcttgttccctaccgagtggctgtgaagagtcaccagttttcagagaacaccattttttcttctttccttttttttttttttttttttgagacagagtctcgccttgttgcctgggctggagtgcggtggtgcaatctcggctcactgcaacctccacctcccagattcaagcgattctcctgcctcagcctccctagtagctgggactaccacatgtactaccacacccggctgatttttgtatttttagtagagatggggtttcaccatgttgtccaggctggtcttgaactcctgacctcaggtgatctgcccaccttggcctcccaaagtgctgacatgacattcgtgagctaccgtgcccagtcaagaaacaccatttttctttacttctccacctctccaccttaaataccccagaacagtaacccagtctactctcttgacctagaggttttctcctttgttcctcgctccccttggctccagcccctacttacccgatgcttacattatctctctctaaggaactgagcctaggagagaacagcctccggtatcgcctctccacatctcactttcagttttcctttctgcttggttctttgcgtgtggacttgattagagtgataactggagccctaaagctaaaggtttcagttcctgctgcagtggtaagctgcctccgacaatcttcaggggaagggaaaggggctttctttcagctcttccctgacctaaagccccagttttctttcccaagctgattgaaatgatttgtatgtgatattttgtcaattaacttgggaattcttgacaatcgcctacacagtgcatctccctccagaagggtcaggactgtgactgagaaggtacaccgcagaggagaggtccgtaggctccccagggtgttccctggctggcggcccttttagtcgcctctatccccagtccagccccacgtgctaatgtagcccaggaagggagcctctcccgcccagctctttctcctctggaggatccagagtttgcccccagagctgcgatatacatgccacttacattctctggttttcattgatatagagtggaaaaatgtgctcacgagcagagttaactgtggggatgatgtcacagacttcatctggagtccttcctctccaagcagggagtccagctttaacccctctcctaccaggaagtcctcctagaccaagcaaagatcatcttggaattggctttttgtcagtggtttgaaaggcttctttcattatgaagtctcttattaactgtatttaaactgtcttgtgttgctttttccctgactcaagtgctggaggctttgtctaggagaatattcccgtaagtctcctacagaactccagcatcaagagagcggtggtcctctccccagtgggcttattccccccaagttaagacagaatgcttttgcagacaggccagtgagctacagacagaaggtttctctgtgcctctgggcaagccctggacattctgcctctcagtttctccatctactaaagagctcagactgtgcacttctcactcccacagtacactttacacagctttgaccatcctccctgctgcttggattgcaaaggacagggtactcttccaaaagacagacaacctttctctctccaaacaggtagaatcctttccaggcctgttaacaccaggtcagagaccccagtagatcacagccttttgcatatcagccagcagttgtccttgtcctagagaaggaactaatagctatgacagacacaatccccaaggaaaccaatttccttctaaatggggcggaaatgaaaactgggagagggctactcctcgttgcttgtgtccatggaataggcaattcccacagaccctgtaaggaagtgctgcaggtggcctcaggatgtccacatccctgggtcctgctgtgccctggaaatccccatctccaggagtcccacatccacacatgtggcttttctccctgtcggccagaaaccatgctttcttagccacgcagcataccatgtagcccgtgctctagcagcagcaacactcctgcccgcctgtctgtgcatgtgtccgtggcacactcctgtcctgggcaggtttcctctgcacacttagcaggggtgccagtgtacctctcatcgtccaggtgaggccaaggacaattgcaagcttttcctctgtcctcttctcactccttagctcccctctcctctccattcagtggcagcagcctcacaccaagaaggaaaatcctggacccattacataattctccatagtgcaagcagtagctggggcgtaaggtcagaggtcatagtggggtcaggtggctgacacacactgtaacgacaaggtggttaaaattagaccacagagaggaaactggcagtcttgtggaaatgcagaagtttcctatgcaagtgagaggctggagatgcagggaggccactgtgcgtgctgcctgccaggctattactcatttcggctctgttctttaatgccttttagcccctgcttctgtatttctagccttcctcatcacatgtttgaatacacgcaatggaaccatgcttacctgccctgggccaagacaagcttcccttctccttcacggaggcaagcccaggaccaggcaccccaagctcaaggggctgaactttttctaagcccttctgggtagccgagaaccttctacatcaacctctcaggtgaaggtggtcaaagtacttagcttgagattccagcctataatggtaacagggccaatggtgagagaaagcagagaacactcctagaccgtgtaggaaagcggggttggctttttggtgaaggtggcagaggatgcagccacagagcacacagttgaccggtgtgtgccgcactttcctgggcagccagcctgcacagcggtgctcatttatttccactgtcttagagaacatgggtcatgcctgcttcatctgctctctgtggtacccagccgagcttccctgggctgtccgtctttactgtgagcctactgtgtgcacagcttgtccttacaattcttgccagtgacgtacgaaaacgatgagatttaggctttgccaccagaggggttgctgtccacatgagagagagaacacctgcacctgtaaaatgatcatcagtagtctccaggttagtacttccctatgtgctgcagatagaaggcttattactgtgaagttcctttcacactaagaaacgaggatgcattaaaagagaggcaggggctagtcagtgaggatgaaggggccgtcccctgtggcacgtctggccacggacgtgtgtttcccatgtggaatggccttcagctttcaagctccagatccagcagggcccctctcccttggtgagcactcagccagtagggagaagaggatgctggaggctagagatgaagagaagggcacacaggggcaagcatggaggagagtgtgagccaagcaaacgggtgtggaggagagggcatgcaggtgtggtgcctccagaaggggggcccagactgggggacggtggacacttaatctgagacacttacacatttgactgttgctcaagatactgagtttcatctcagctaaatcagcccaagcttctctgacagcactgacttgtgtgctgatgtggccacatgggagcaggttggcgtaaacgtcagaaagagtatagctttggtgaaacatccccacctgctctgcctgtctctctcctgacaatttcctgcctgactctagtctcttgagcatgaggagctcttagatagggcaggaacctgtcaggggaagcccaaaatgatctggttgaaatgaaacagccaagaaagcccttagcattcaatttgcacttgggctgaaaattctccttttgggagtctggagcaggggtgctgggagaggagtggagagtggcagcgaggggccccagaaagctctatgctgtgaaagcactccactcttccctctgctggttctagaccaaacttagaagatatgtcatatattctgttttgtatcaggaccttactcaaataaatgtaaggcacctgtcactggtccctggggttgtctgctgccccagagataacctaaggagagataacctcagaagatcttgatcctcagcctgccctgggccctcacttaccacctgacatgcccttgtgccctccgcaccccgtcattcattctgacccccttgcctggtagctttgacacagttcccctgtgcccctcagccggcaagcaacatctcgtctccatcttccctttcagaaaatgctgtttttcttctctccctctcaccctgtaggttattgcagctgactgcaaaagggtcacagtgctgaagtattttctggaagccctttgtggacaagaagagcctctgctggcattcaagggtggaaagtatgtgtcagtggcacccgtcccagacaccatgggaaaggaaatgggaagccaagagggaacacgactggaagatgaggtactatgcgggaagagcccgctgtggcagagggaaggccccctccccattctgctcgtggcttcagcttttcctcctgcttatttatgagcacagagaacagcgtctgtgttaatgtgaccagccagcttctcgagagtgtgctctgatggtgccccttcctgccagtccaccccggtgcctccatcctactccactacgagttccagatgcttcttttaatgctgcattgaggagaagggaggaaaagaaagaaaggagttgaataatgtgcagctctcgaggcttaggaaagggagaggggggtggtcaggatcaagtttatagatgtgtggagcccaatgcagcacaggcctgaactccagcctccagcacacgtacaggaagagctgacattgctggccctgtgtggaaaatcacccctcccctgccctaccctccctcccttgttccctccctccctcctgcacatcctgatgtgattaaggaattctcctcttgtttgtttgcccttggttgttcctgtagcccttgcttcactccagactcgtgtgtgtgtgtctgtgtgtgtgtgtgcgcgtctgtgtgtgtgtgtgcgcacgcgcatgcacatgcatgagcctgtgtacccgcccctgcaaaagtccactggcagttgccctgccctatatattgccattgcctatttgtgtctttctgggagtgattgttgatgtgggtctgtgtgtgctgggtttgtgtgtcagtttaagtaaacactgctgccagcttccctgctctctgtgggttctgagtggttgtgagtgtgatgttgttggagcatgtatgcatttagtatcacttccagctgccctgctgtgtgtctgggtgtgggtatttctgtctggatgtgtgttcacacacacctcacttttacctgaaggttgactcttctttttaccccacagtgttaaagacaagagacttaggtgggaaggaacatgggactaagggaagggacggaagcgattctagccaggggccaggtcacccataggccaacacagtcatttggcctgcagcagtctcaagcgcccggtagagcagggcggggtacagggatgaagtcagcaacaggccaaggaagccagatgtcagctggaagctgtcgtttgtgatctgaaacagtgatagagtggccacctttggatcagagtcctgagagcagcagagtcttggactggcttcattagaataactggagagccccaccccacccctgatgacatagggctcagcttccaggacagaggtggttccagggataaagctgagcctaggattccagactctccagatgaaacctgggcagagaataatgggaaagaatgagctgttagcatgggaggggacagcaggcttgctaaagctggcagggcatccaggcttcaggcagggcagagcagtgccacccaagccctgggtactgtgtggggaagcacaggtggagcagtgcctccgtcagctctttcacccgcactttcaggctgagggcacagccaggttagctcccaggcttgcccaaagatgccctgtggccaggggagcctgcagtcccaaatccagtgaggcaagtgaggcccagagagggccacagcaccaaagccagagaaggccttctctgccctcacaaggaacagatgacttctctggtcccggatcttggtagtgccacacttttttttctcgttctaaggcttattgaccagacaaaggttgtgacccacaccaggctgcccacttcttccttttcccacgagtctcctgggttccttcatgttagtggcctctgggaaactgtgcttaccctggtctgtgtaatttcataaccttgcacttcctcgtttactgtgagagctgagccaacctcagacaagcttctctgaccctcttttgacctcagtcaagctcacttcaagccccgtgataaccttgtatatccctagtcagagcaggcagaggcagtgttcccccatgggctaggcaggcattctgtcccgctcactgcagtctgggttaacctcatgaacaaggaagtgaatgtgcagagttttccttctttccacggcctgggcctctctggaggtgagcgctgtgacactatagcatgcctgtgtcagatgaatggtgactgtggacagcatcccagacccctgacatctcttaggatagtgacagttctggccccatcctcagatctcatctctccccaaactgcaaaactgaatcacttcagcagattgggagaggtagggaaaggtgtttcttcagacatagttctttgtgaatagaacacagtttagtcgcttagggatcctaccaaaacacccctagattctgctcacaaggcaaagtatacccccgtcatctacccagccacccacctgagtaatccctttcagtcaagagattccatctgtatatgaccttgagctggacagttagagaagagagcagtctgtactgaacagatctagggtgggcctgcagcaggcctcacgatgctgagccactgagggctggatctgagcttctggtctggattcaggatggcttagcttattattattggtaagagcataaactttggagtcagattcacttgggcttcaatccctgttctgcctttactagccatgtgaccctgagcgaggtgttgacttctaaacctcagtttgttcatttataagatagggatggtgatagcacctatcttatctcacaggctgttgtgaggattaactgagttaatacatgaaaaatgggtagcccggtacctggccagtaataagcactcagtaagtgatagctgttgtcatcactgtcattattataatccagttagaaacaggaaccttctactaaattattccctgtgtacccatgctaaccctgtccctcaaaggaagctatcttgggcagctgcatgttctctgttgaccaaggccaaaagtaagaaagcaaggaatggagcctgggaccacccagggagtgatggctgctaagagctgaggctgcaagtagggaggtgccatccttggggaatgtgccaccagcctggcaggaggctccttaagccagccagccacctcctaccctgcccaggccattgagggcagctgagcaaggtcatgtcgtgtgaattccagtaaaggggcccagcagtcctcacaccaccaggctggagtcttcaaaagaaaccagggcgaggtctgctgagctgcagcatctgtccctgatgctgtctgcggcaagggaacttccacgcctcattcccagctgttggccagagctgattcctatcagatcgttagcatgaattagatttaagttgggtggtttaactttctctgttgtttccctcttgaatcattggtgacttcagaatgaaaataggcctaaagtttgactttgtgagtgtgtaccaggaagaacacagagtgtgagtaaagcacgcaggtatatatgtgtgattgcgagtgacttatggtgtaactctctgagggaaaagccccagagtataaaagagagcagctccgggggaagagtgacagcttttgtcaacctccctttgcctgagtagagggaagcacacaccaggggaccctttgcaagggatggtcccagtctgcgtgggtgaggggccacaagggcaatgttgggttcagtaagagccatgggcccagctaactgtctcctctttgtcctggtcggctccaccacccaaaggaggaggatgtggtgattgaagactttgaggaagattcagaggctgaaggcagcggaggcgaggatgacatcagggagcttcgggccaagaagctggctctggccaggaagatagctgagcagcagcgtcgccaggaaaagatccaggtgaagtcggcctggggagcgtggttcccactatgggggttgctgtctagggcatgagaggatgtgggcagagagcagagctgagcaggacactaagagtgagtcagtcctgcagtgttctctctagctctacccgtttttcactctaccactaaattctggtagcaggtttggtgcctagagtctccctcatcctgggctccaaggcaggggtacggtcttctcagagactctgagaaaagctgcttccccagtgagaatctccaaatgcacaccacacatacatgatctttcacacaatgtgaggggtttcagagtttccctgagccttatccagatatccctggagaggctgtggattcttacttcagaacgcctgttcccagggagaggatggcatggccacagtctgcttgcctggattcccaatgaaatggaagactcctctggacaagatactccctacacccttgcagagacaaactacttaatctccacacagggactttgacccccatcagccctctcacgggcctgtgccttcacccccagcaagtgtttcttcctggccttctaggtctgttcccttgtgctgtgaggccgtttgctgtcctctagggctcggggcagacagggaagaggcagtcctgctccccgtttaaaggtgaaccgtgtgcatagggaagcatcaagccacccactccgcttctttaaggatgcccatttccaaccctgtcctttggcatagggtttgatgcatgtgatcaggcagacccagtgacagtctaggccctgccacctaaatagctttgtaacatggggcaaatcattcagcttctcagagcctgtttcctcatctgttaaatgaaagtgctggccgggcgcggtggctcacgcctgtcatcccagcactttgggaggctgaggcgggcggatcatgaggtcaggagattgagaccatcctggctaacatggtgaaaccctgtctctactaaaaatacaaaaaattagctgggcatggtggtgcacacctgtaatcccagctactcaggaggctgaggcaagagaatcgcttgaacccgggaggcggaggttgcagtgagccaatcttgcaccattgcactccagcctgggctacagggtgagactccatctcaaaaaaaaaaaaagaaaaaagaaaaaagtgctaatagcacctatctctcagagtcactgtgaggcctacacgagacagtgtatgtaaagcacttagcatagtgcatggcacttagtatgtgctccatgaacggccacctttgtctgatatttgtctaatcaccctggccagggaagaggaataaataccaatcgagagccatcttttttttgtttgtttgtttttgtttttgttttgagacagagtctcgctgtgttgcccaggctggagtccagtggcatgatctcagctcactccaacctccacctcccgggttccagcgattctcttgcctcagcctccagagtagctggaattacagatgcctgccaccatgcccagctaattttgtatttttagtaaagacagggttttgctgtgtgtgccaggccagtcttgaactcctgacctcaggtgatctgcccgcctctgccttccaaagtgctgggattacaggcatgagccgtcacactggccaagatccatcattcttttgttttgttttgttttgttttgttttgttttgttttgttttgttttgagatggagtcttgccctgttgcccaggctggagtgtagtggcgcaatctcagctcactgcaacctctgcctcccgggttgaaacgattctcctgtctcagcctcccaagtagctgggattacaggcgcctgccaccatacccagctaatttctgtatttttagtagaaatggggtttcaccatgttggccaggctggtctcaaactcctgacctcaggtgatctgcccgccttggcctcccaaagtgctgggattacaggcgtgagccactgcgcccagcctccatcattctttagacagattcacgtccctgctaccattggaatcagtgtgtaatacctctaccagcatcatccattgtcatgtggctgcctccccagccctgctgtgggtctacatgtaaacttgtgcatgatcctcaaaacagctttatcctcatgcttcttttacttttttttttttgagatggagtctcgctgtcgtgatctcagctcactgcaacctccacctcccaggttcaagtgattctcctgcctcagcctcccaagtagctgggattacaggcatgcaccaccacgcccagctaattttttttgtatttttcgtagagaccaggtttcaccatgttagccaggatggtctcaatctcttgacttcgtgatctgcccgccacggcctcccgaagtgcccttatgcttcttttcttgctcttccttaccatctgttttcccagaaattctgtttctaccgttatttcttgactctcaacccagcagttatggaaactgttgcgtcaaaagtcaccaatatggccaggcacggtggctcacgcctataatgccaacactttgggaggccacggtgggtggatcatttgagatcaggagttcgagaccagcctggccaacatggtgaaaccctgtctctactaaaaatacaaaagtgagccgggtgtggtggcgggtgcctgtagtcccagctactcgggaggctgaggcaggagaatctcttgaacccaggaggcggaggttacagtgagccaagattgcgccactgcaccccagcctgggcaacagagcaagactccatcttaaaaagaaaaatcaccgatgacctatcttcatcaaaccttagtctgtgtcatagttgaccaatcaccaatgacctatctttatcaaatttcagtctgtgtcatagttgacctccctttgtctttgggccctaaagccaccttccttcagcttcccttcagcatcgatgaatgaccccttgtcttctccctgttcgccagaccaccctcctgggcttcctcaccaccattctttttttggtctcctccatccttccttttactccttagtctcagcaagctgagttagtgctcagcagatatgtattcagtggctgggcgcagtggcttatgcctgtaatcccagcactttgggcagccgaggctggcagatcacttgaggtcaggagttcaagaccagcctggccaacatgatgaaacctcatctctactaaaaatacaaaaactagctgagtgttgtggcgggtgcctgtaatcccagctactcaggaggctgaggcaggagaatcacttcaacccagaaggtggaggttgcagtgagccgagatcgagccattagactttagccctgggcgagactctgtctcaaaaaaaaaaaaaaagtattcagtgacaataatagtagcaactagagcatcatcttaaattccactctggcttttaacccctagtatctaatttcatattaaatactatttattcacacatttattccctcttctcctctctgtttccattgccactactactattctaggtcaagtagttgcttagagtgtagcagtcaaggcccctgcattgcacagccccagaaggtgccatttgccttgtttctgtaagtggcacctcctggagtttgtagcataccaggctcctgcccaccaggctcctattcactgcactgcctccatcattctcttcctgaaagagccactcccctgctcagaaatcatcaggcctttgcttggctagtaaaaaaaagtcttaattccctattattggcatttaaggctttttgatctgttcccagtctgtttttccagcctcttctcccactaccccatccctcatgaacccttactagttatatgacattgggcagattatttaacttttctgagcctgtttcctcatctttataatgaaagtaatgccagacacagtgggcacgtgcctatggttccaactactcaggaggctgaggctggatgatagcttgagcccaggagtacaaggctatggtgtgcagtgatcatgcccgtgaataaccactgcaacatagcaaaaccccgtctcttaaacacttttttagtgaaagtggtaaaagcaccaatattagagctgctgtgaggcctcggaatgaaccacagtgcacgtaaaatgcctgtgcagacactaaggccctcctgcctggacagtgacacccaccttcctttccactccctaggcatgctctgcctttttccactcgggtttttgttcatgctgtccctcaaagcagagtgccctttttctgctccatatgtcttgttacctgtcgaaattctattcctccttcaatccccagatgaaactccacttccccagtgaagccccccctggtctcccccaggaggaatccgtctgcctctgcttagcgttcctgtgacactcttcaggcttcatttgtggacctgccatcatgtctcatgttccagttatttctggacttgtttcccacattgtctgtgcactccttggaatcgggaggcatgtcttcagctcagtttagcaagcggcattgagcatttactgtgccagtgtctgggggacacagaactaatcacattccagagtgtacagtggtacagtgtggtagagtccttgacaagtgatttgaagtgtgaatgagcgtccgtacaaaacgcaagtccaggatgccgagggagcacatgctgccaggatccatccgcttctggagcttggtgtttagctttgcctctccagcgaccagcagcaccttcagaattggaggtctcctccaacgcttgacttcccgtgcgcctggtgggccctgtccaggctgcctgttctcctgatcagctccttctgaggaagctgcttaggcccaagcatggaaggcctgctgcgggccagctggagttggggttgctgtggcccctttaagaacaggccccacatgcaccaagctggcggccctgcctcctgtcagcctccttcctccagcctcacagccacaagaggatttctcagcagaggaaaaattccccccttcccttccccaccccgctttaatgcccggggcccttcacttccataattcttcattttccagccttgaacgtaagccagacacatctgtctggccatatgcgtgaaccctggagtctgtgccgaggtggctgtaaaacagggccggtgaaggcccttctgggagagcacacacatgtgtgccctcaggccattggcttcctgcccagaaccacgggggcttcagtgctccaaacccatgctaaccttttctcatttttcctctttttgtttaatttaaggggggaaaatccaaggaaaaggtataaattgtcctgggagttggggagaggctcctagctggagaggccattattgttggcaggtacctgggtcacactaatacaataaggaagaaaggagcatcgagtgaattaagattggagggatgggctgtaaattaccctgctctgaactccatcagtctccagggtgttaaccgagaggtgtaaggcaagtccccgttcccagcgcctctcacagatgtggcaaaacaggaaccacgcatgtttggggaaggggatgtgaagatggggttgaaaaaaatcctcctggcccccaggatagctataaagtccaagtgagatctggggctgtaaccacacccccacttccctgctcttacctagacccctgggccgcctaagctcttctgtgagcatgggggaggtgaggcctggtctccctctgcagcctgtccctccctgcttccggcgttgcacagaggctggtgagtggggccgactggaggtcagaaaaggggtgtggggagctctcagagcctgtgcagctggagctgcagcgcccaggcaggcccctggatgctgggggcgccaagtccgcccacccagggctttgaggccacactctccggctcagcccacgctctgtcttgttgcctgagacagctcctcctgtgggttctgcccaccttgctgcttttctcctgagttctttttgttcccattgccatttggagttgttcagagaccagggcagggtacatggtttgggaagttggtcagaagtgtttgattcctaaccaaaccaccagggcaaagcagtcactgaaaatgctcctccaggcatgaggcgtggcctcttggcacctcatgctggccctggccctgtgaatcccccgcttcctcactgcctctctgaggctttgctgtgatttgtgctgctgtcgggcggggtcaggtttcctgagcagttgcaaacatcccacctgaaacataacaggctcttcctctggccacatctattgtttccctcagcattatggccacagtcttgctctgtggccagcaatgacatgtgttctcaaaatagcttctctcccctgtccctttcccgcccacccgccctcctgaagatgtagtccctcctttgtggtggccccaggagttccactctaaatttagctgccgtccattcatactgccacccagctagggggggctgttgtggaacaatggggtatacacagagccccccacacctgtatggaagctggcggaaggcagacactcaggcctggctcctggctgtcggagacagggtgggagccagcacagcaccaggccgggggcacgttcacgtcaaggcaggaaagcacatcagcctgtggagcgggcatccgcccttcccacccagacccgctccagcctccccaaaacctgagtgctgggccccagcttttgctccagcaccatccactgggggcctggcttcccacagagtggccaggccactgtctgaaacgccctcaggctgctgctcagagcaagctcaaaggtgtcatgcttagccctgcccctccctctccatcaggaaagggcctgcctgcttctttggctttttagatcaagttatcagttaaaattcaatccgattatctttaagtgcccttcagctctgagagccagtgactgagcccactgtcccccgaagtcctatgatacaacaggcggtatgggaggtatgacaatggaaactgcaagaaaagtaggcagttctccttgagcacttgacagtctagtttgaaaataagatgagtcctcctaaaacagtaagaaatagcaaacaaattgccatagttatcacttttaaaaagagtgcaagaatatattaagctctgtggtacatttggacatccagaaaaggagttctaagcagcagtttttcatttgcagtgtaccccaaatgaagatgctcctcctcctgctcccaggggatgctgctggtggctctgcctgccttttctagcaccctcagtatctgccctcgttggcttctgctggcccaggatgaacagttagccagtgcttatctcacccactgttcctatttttattttatttccagtttttcatgtacatccacatagttaagatacatatatacaataagtcttttcatagaaatcagaagccgggcatggtggcacacacctgtagtcccagctactcaggaggctgaggcgggaggatcacttgagcctgggagtttcaggctacagtgacctgtgatcgcaccactgcactccagcctgagtgacagagttagactctctctctctctttttttgagatggagttttgctcttatcacccaggctggatggagtgcagtggcatggtctcggctcactgtaaccgctgcctcccgggtttaagcgattctcctgcctcagcctcccgagtagctgggactacaggcatgtgccaccatccccggctgatttttgtagttttagtagagatggggttttactatattgtccatgctggtctcaaactcctgacctcaagtgatccgcctacctctgcctcccaaagtgctgggattacaagcacgtgccaccacgcctggctaatttttatatttttagtagagatggggtttcaccatgttggtcaggcttggatgagactctgtctctttttttttttttttttttttgagacggagtctcgctctgttgcccaggctggagtgcagtggcaccatctcggctcacagcaacctctgctgcctgggttcaagcaattctcctgcctcagcctcccgagtagctgggattacaggcatgagccaccacgtccagctaatttttgtatttttagtagagacggggttccgcgatgttggccaggctggtctcgaactcctgacctcatgatccacccgccttggcctcccaaagtgctgggattataggcgtgagccaccgtgcctggtctgagactcgtgtctctttaaaacaaaacaaaacaaaacaaaaaaacgctgggcacagtggcttacgcctgtaatcccagcactttgggggaccgaggcgggcggatcacctgaggtcgggagtttgagaccagtgtggccaacatggtgaaaccccatctctactaaaaatacaaaaattagccgggcgtgttggctcacgcttgtaatcccagctacttgggaggctgaggcaggagaatcgcttgaatctgagaggcagagattgcagtgagccgagatcacgccactacactccagcataggcatcagagcaagactccgtctcaaacaaaacaaaacaaaacaaaacaaaaaaaacacatcagtagtcctctgctccacccctcctcatccccagttctatttcctggtggtttccccctgatatttatgctctggatatgtagaaaataaaaaatagagttaggaaggaagaaaggaagctggcatttattgagttactaatatgtgtcaggcactttgctaggtactttcatatataaggtgaatgtggaaatttcctgtgttacaaagcttctaatttctgttgaagacattgctctggccagagaggctcagggatgaatgattcttcaccctgtagagggaaggaagcagccgcactccctatgggagcccctaagcagaaggaagacctcagaaggccctctcctggtcttgctctgcttcatgatccaggttctccaagtgccacacctcctgtgtcagctcattgaattgctgttacttgtaatgttcagtgtctcagcttgcagcggtaagcatcataagatcatctccaccgtagagaaggaacttaacctgcaaaagtttttcctggagacccaagcctgttagcttcctccttaggtattattgtatatgatctctttcccagttctctgccagcttgctccaggaaactcccataccttagagaaagttagttacttagcaccttccagaaacagaattatttttttcttccacattttatgccaacttgggtccttattgctaccaatctgattcagagtgtccgtgtgttgcttgggttccaagggcactatccagggatcactgtggcccaacctcagctgctgttagaaggttcctgtggaactctccttccgggtcagcacgcttgactccatgccagggccagtctgtctgaaccacagcattccggttgcacccccctcacccccaccagaggcttctgcagctttttactcatacaaacaaaaataaacctcactaccggcctctgaactctgcagcggcatgcttcccctgctccccaagtgtcccatggctgcgagtggggacttggcactctccccaccgacatcactttttcactccctgcgcatcctgtgtcctcctcttaccgtgcgacccagagatcggaatgggacgtgacggccggcacaggcgccgtgcacagctgccaggaatctgacgggtaaaatctggaaaagttgggagggcagatgctaaacacacacacacacacagcgccactcagaaagggccggaaatgcagacacccgtagaagggtgcctgtggactccgaagccctcctccgcctgccactctttttaaggggactgagccagtcttgtgacccaggtgtgaccccccccgcccagaggcccaccggtaccccaggagaaaagggagcagcttcatctcatctcctgagactccatgagggcatgcggggaacaggaagcagttgtttggtgactcactgggcagagccaggttaagggaagttgtctgcgggcgtccctgggaccggatgatggcagcacagctctgaccaccctcacggggcttggccccaccccacacccagggaagccccctctgaaaggctgcggcctattcacctttctagctgcaagccagagctaagaacccggggaatttagagcgtctctggacctcgcttctagatttttcttctgtcctgccatcagaacacacaggtaggctcagtttgtccccagcatccctcagccacctggcttcaaggctctcctgcctaattgccagcaatagaggtaggatggtaccagggcttaggagctgactgttcacatagggtaaaaaaaaaaatggcagccacttccttgatagagtcagaccaggctggacggttgtttctcaaggcaggagaactgagatggtagtggacttgcggggcagaggcagaggcagaggcgcagtgcagagccggacccccagcccctgtcactccagctgccactgctcccacgtctccctaagccatgcttgttctgtccctgctcacccagaaagacagatttgagagccacggtaccaggagagcatgcctggcaacagaagagctagacggagagcgcatggcctgagaaatgaggaacgagagtgctgatgctcctccgcaagaggagaaagggcagaggggtttactgaacctgagcagggaccatttcctgttcttacaaactgcccaagccaggtttgttggaatgcctgtcaccctctaggtggcagccctatgtagagggtcagtgaccccgcctcccatgggaaggtagcccgcagtagtggcaccttgctctcatgaggtgagatcagtaggaagacttcagcagagcgggcccctgagctgcatttctcatgcctgccagcgttctgtagcctgtgcctttaccagctgtggtggcagtggcagcaacaacttactcatagggagaggtccctggcaggtcacagagaagccacccccatcatttgaaggcatgccctttcagttttactgtcattgtcagtgaaacctgagcagcctcctcactgactgttggtggccaggaccagcactgtgggccccatctcggttggcacgcacgtccacttccccagccctgtgcctgcatctgggtctctgcaagttgctctgtggcagaaggccatgagagggtgtgacagggctgggacctgccctcctggccccgccaggtttgtgtgggtgccctccacctccctactcagggagcatgctgtctgggcagatgccagcagatcagttcgattcttggccatggtccccagaagaggaagcagtgcagtagtggccatgttctgtagtggcagacatacccagagccggtctcgaagggccgctgccacacgtgtaaggctgtcagagaagaaaatcaggcttttgcaaatgtgcatctctcgggaacttccctgagaaatgtgaaagtccacagggaaggcaagcgctgggccacgtgcttggtgagaggtgctagaggaggcggtgggacagtggggccaaggagactcttctgcttttattcttttgtctactttttgtttggcagtttagcttgcactagtaagcatatgactaggctgtcaattgcttagtaccacgatatggttgctgaagaagaggctaagaaaaaaagtgacaaagtcagtttaaagaaaaacgtcgagtaaataatagtgtagctggtacagattcgtggcaaaggagcagaggtagaacagaaaagacccgtgtttaggaaactgcgctggtcaagggcaaggtggtgggccattgtgatcgacctgggtgttgctctttgcagacacatgagttgagtcttaattcatcacattgcacggacttcggctgctgctgcaggagaatttcgtattattagctgtcagtatcacttttttgtatagcctttgagttcaacttcattgttcgttgtttgttgttgttgtttttgttttttgagacagggtctcgttctgtcacccagggtggagtgcagtggtgtgatctcggctcgctgcagcctccgcctccagagctcaggcaatcctcccatgtcagcctcccaagtagctgggaccacaggcgtgtgccaccacacccagctaatttttttttttttttgtagagacggggtttcagcatgttgcccagggtatattttattttgttttgttttgttttagctacacagtgaagtaagtcaaaataacagattctgtttgcattttcatgtctagattgaaaagtacctcctctgtaggctttctagataatgtatgtgaaaccactttcatatctaaggaacctaattctcccttgttgaatttgagtcccagtcttactttgagagacctgttatgttgaatatcctcaggatcctttctcagccctcggcagggttgtacccatgccattccctgggccccttgagctctgtttttattgcagtgctatgctcagcccttgggcctatccctgagacccgacggggactggttattactgtggaggggaagaggttcctaggggcaggatgctgacacaccgtagtgtcagggccctggctcacccacctgcttgcctgctcgctgtctggctcattcaccactctgtccccataggctgtcctggaggaccacagtcagatgaggcagatggagctcgaaatcagacctttgttcctcgtaccagacaccaacggcttcattgaccacctggccagtctggcgcggctgctggagagcaggaagtacatcctggtggtgcccctcatcggtgagtcaggcgggaagggcagagcggccttgcatgtgcacagcagccccctccacacacgccccacggcctgggggccaggcaggcagagccctgctgtgcgtgtgtaagatgggatttgcaggggagtagggaacgcgtggggcaaagaaaactgtttaataatcaaagtagttcacattctcatggctgatccatggcttaaactgcttgagcaaatggactcctgtgtcccagcaaccagaggctgcatgagcccagcccttgtttttatccttataaagcttgcagtaaaacagcaaagctggttcccgttattggtaaacactcagccctggcagataacggcagtgctgctgggtggtctggcagggaggctgggaggattttgaagtggttagatgcctttggtctgattgtcttgtagcttttcatgatcactctgttggttcgaggtagcattcttctggccagtgtcaccctaaggctaggccagcaggaaccctccagagcaagcccttggctcatgcctgtggattcctaccacttgggcccttaccactgtctgggccttggtgctggtgcagggtcagcatctcaggacccagctagcttgctttcccaccctctagccagagaggcccagctgggccgtctccacgggaccgtctgggtacccttagttcttggagctctgtggtgggtcagcctcagggtgggctctgggctctgggctcatatctagctgatggcctctgtggagggagagagtctaggagatgattgggaggcccaggcgtttgcacatccccttctcagcagctacttggagcaagtttgagagccttgtcttctggaaaagccaccagactggcagtctgcctgccaagccacctttgacatccatgccaagatgttccattgggccttccctcccagtcccaagtgtcttagtgccagatgggggtggaaacaaagggcaggaaacatccgcccctgcagaggctgcagaaccctggggggttgtgggaaacacgttagcaccacctgagaatgttggcaccgaagcagccctcctccctgcctccaccctccccgtcttccttcccctccccatgtggcctggccagaacctcttaaatccaggcccttagacctaagggaaggctttctgctcttcaacagtagaacagtttctgtcaccaaggcagggcagcagaaccatcacgttgtcccaggctttcccttctcctcgctggggcgggctgccttgccgggtcatatgtctctctgctttcctacccaggagcttttcaggggaaagaaagtgttttgctagatggtcaggaaagggtacaactgaaagaggctgtggacatctcaggagccccctaagagccgtaaggtgcctcagacgccgtcccaggctgccagggttttttgtcaccaggactgatcgtaccccaggctgtgggctgagtctccttgttcttgatccggtgaaaggcaggctgtagcccttggccctgaggagcttagggtttagtaaggaaatccggattcggtggggagggagcaaacgcatgagaaaacccagcagatacatgcaggacaaagagacgacgcctaagggtgctgggaactgacagttgtgctacagccatacaggccagcctctctggacctgcctcagctgggcaggctcctggactctcccagaggctgtaagaggagggctcctgtttactgatgctttccttggtagactcacgtcctgtgcccagagcagcaaagggttaagccgccagctttcccttcttgtttctggtgctctttaacctgctctgtgctccgcagacctgaccccagcgtggagaagccccgcctggtgcagaagcacaaacaagcttcctctttgaagcctgtttagtttggaagcaggaaagcagattttgggatagaatacccgtttttcctgtttgatgttgtttgctgtaccatacacccatctaccactgcttcccaacctcagccatgcactgtgtggacactgcagcctcagggtgccgaaagcatgggcattgtgtgtgtgtgtgtgtgtgtgtgtgtgtgtgtgtgtgtgtgtgtattcccacatgggccctttccagaaagtgtctccgaatacccagacaatgagtgccaggctcaccatggaacagcatgctcacgccggctccctgagccatgaatcactgcgctaaggagaggcctcagaccccaaactctcccagagcccccgaggagcacatatttcccacttgacctcaggcttttggctggaattttggaaagaatcttcaccagaaaatgaagccatgtcccagacacatagggaggcagacaggcacacacacacacacacacagagacatatacacacatgtacacacatacacgcatacacatacacacatgtacacacacacatacatgtacacacgcacacagacacatacacgcacacagacatacacgtgcgcgcacacacacacgtgcagtatcagagaaggtagatgtgccaaggttctggtcttgagaaataccagggccttgcaaatgaggctgtgactgccccttcctccatggtgacctccctgcactccaccagtggggctgggggtagaactttacccctcctggactgcagtgtgtgtgggcccaaggagttaaggaaggacgcctccctttccctcgagctgctgcataccctggactctcctgagggaccctttcacgtgagtcctgtaaccaaggaatgcaatagagggaccagatttcttcctctaaatacagcagctccagaagattcctttaagttcctcccaagaggagggcagggcccaggagaagagacagaaagggagtagagccctgtgaaatctcgagacacttcttgcccccacaagctcccctccggccctagtttcattggaagactcctgtgggggaaggatggattctggtctgggaaggtgttggctgggaaagtgaatggacagaggcctaggatgaaagctgattgctgaggctgataccttgtggggctctgtctcatcagtgatcaatgagctggacggcctggccaaggggcaggagacagaccaccgggctgggggctacgcccgtgtggtacaagagaaggcccgcaagtccatcgagttcctcgagcagcgattcgagagtcgggactcttgcctgcgagccctgaccagccgtggcaatgaactcgaatccatcgccttccgcagtgaggacatcactggccagctggtgagaccctgtggcaggaagggaaagcccacagccagcttccagaacaaggtctccaggaaggaagggctgaaggaggcccatcagcctgggcagctgagggccagccaccatggaggcccaggtgggggagttccttctcccctaagtcactcgtagcacagtcagatcaggccaggcagggccagcgcatgcatgggagggatcggggaggtggccctgcccagggcccccgaggcagaggatccctcctcctcctccacatggcgcccccttctgcccagtggtgcttctcacacacgtcttcctccagggtaacaacgatgatctcatcctgtcctgctgcctccactactgcaaagacaaggctaaggacttcatgcccgccagcaaaggtacagctttgcctccgccttgggatcttccatccccactgccctacctcatcctacccatcctcagcccctgagaagggctccactgactctggcctgggaagtctaaggaatcagtgctcagggctgatgtatgcctgaggcccaacctccctgtcctggctcccccagccccagggaatgccaggtgcaccctgggccaactagagatgagcctagcccaggaagcccagccctaggccgcgaggttcttcaccccgcatgcatccgtttcctttcttgggtgtcctcagtgagttccgtctgacagcaagaatgtctttatgattcactgtagctggtgctggccatggtctcccgagcccagccctctgcagctctgagggcagccccccaggggtccctggggcacacttccctttcttggccatgcttaccttcctaccttctctgttcacccctgagtgtttaccctatttcaggcctggggcagaggcatttccccagtgaatagtgggctttgcttcctggtctctttggtcacaagctgtagcactttgaaggctggctagagtttgaggttggtgagagcttgaggactgagccctcagcccggttttcaagaccttttggggtaagcagaatctcatctttgggccaaaggcccactctgggtttctcacccaagcgcttgaccacctcaccctcaaccctgagctggccttcatgcctcaccccacaggtcaatgacactagggttttctgctcctggctcccaggattctggcatttttttcatttggaaggaattcctaggacctgccagctctgtgtcatctgcagagctggcagttctcaccgtttcgtttctgtctacctataagtggtctcttgtcattgcctttccgtctctgctgctctctcctttctgtgcgtgtttctttctagcccttgtgttcaggctgctctgggagttgactctctcctgcgtcctctccccatacagacacagcccctcactcctgcatgagtctctttactaggggctggttacgagcccacagccgctactcaagagaggtcctgtcctgccaccaggtttgcatgccatatcccttgggaccagatatgagcattaaagtgataaaaggagacctggctgagccaaacagaggaggttatgttctgtccccggcagctcagtagtctctgagtatcccctcacccgaggccaccttcttctcccctctgcccaccacagccccttgcctcccttcacactctccttcctcctgtcgtcttctctcgccaccaccaaccccacaagcctctccctcccaaatcctccaaactcctccccaggctgaaagccagttctcagcctccctgcctggagctggcaagcctgagcttcctagaggggtacctcctgagagaaaggtaggcgggattgctgaaggccttgttgggaagtgtggttccaggactgctgggccccaccccagcctcagaactttctttctcagaacggacacattttggctttggtcctactagtcctcccacccccgacttcaccccaaacagcctacaggaacccattgccatccgggggaccgcccctatcagaatgacatcagcaatggctggtgtaatcaaagcccatttgtcagtgtgaattcttagcagattaacttgtcagattcacagagaaaccgtcactaaatgtttatgtgtaaacgatgttgaattttaaaatcatgtggattatggcggatggggcctgacaagatgacagtctctggtttctaacaaagtgaagttaccagtgtcaaaacagaggatgtttattgtgaaaaatgtcaaagtatccacagaaacccctgcagacccctgccagcaatgtcgggccttggttagctgacctaaggcctgggacgctcctggtttgaggcccagggcaggaatagtggggctgctacagacgcagccagtcagctgggagccccacacagccctgcataccaccaccccagccacacttatctgcagaggggcctggcccaggcagctgagtagtctctgagtatcccctcacccgaggccaccttcctttcccctctgcccacagccccttgcctcccttcacactctccttcctcctgtcctcttctctcgccaccaccaaccccacaaacctctccctcccgaatcctccaaactcctccccaggctgaaagccagttctcagcctccctgcctggagctggcaagcctgagactgctcaggtccgacatggatatttgcagccccccacccccgccagcccacgcagtcagtgagcacagcaggacacttcctgtgccttgctgtctgccggacctggacctctgtcaggaaatgcccagcctgggactgacgagtagacctgccacccaagcaggcctgtcagggtagggatgtcacttgtgtgagtgcttgtccctggcttaaattctctccaatgtgttaaagattagggagttagggaaagagaggtagtggagagactgtgcttaaaaaaaaaaaaagtcatctaaaaagaatgaaagatatctgtgccactatagcaagaccttttaagtatatactctgaaagtgtggctaatatgatcatgatgctgtaggaaaaaaaggttatatgtccaagtgtatgtacttgtaaatgtgcctaaagaaacctggaaggatacacaggtcttccctggggtacaagacggagaactgggatcatcatcttaactctactcttcctttttactcttctgtcctcttagagactttcgcctgtatacatggattactgttacttagcaggggcgaccggttggccaaagccttggtgtgcccttggcacaattctgccaagacccttaccctctcctctcctcagggctcccttaacccctctccccacatctggaaaaccctggatacattttctgttccatctttagttttctgcctctggatgcgtaaagcttcaacctgctggcttttagagggagaggacttgttaaaaaaaaaaaagtggggtgtggggagagcggtgttgtgatctgggggccagccatgtggtaaaaaggagtagaggtcaaggggctgcttctattccctcagtttagggtcctgggaggctgacgggtttgggcagcttttgggaactaggcagaagagagtcctgtatgggaggccggagtcaaggcagaagcccagtgcagccctctctaagccagcagggaagggtccccggggctgagagcccggacggaggaaaggactggtagaagagccaagacacggctagcgtggcaccccctccccaggaccacattctccagggtgagaagagcagccagccctctgcctcctgtcctcagtgacagccttctgctctctcatgcccacagaggagccaatccggctactgcgggaggtggtgctgttgacggatgaccggaacctgcgtgtgaaggcgctcacaaggaatgttcctgtacgggacatcccagccttcctcacgtgggcccaggtgggctgagggagccacactggggcccccccccccgtggaaccgttcctgaaaggccaccaggcgcccagtgtagcacggaagatgcccacgtgcctgagccaccaatccacccagacaataaaccatcctcttccaacccacgccacggccatgctgtgggggacctgctcctcacagagcccctcccaaggatcgggcggaagctgctgggaccctcctgggctgccaggatttagcagggaggtggctggctacagcaacagcagctgggcaagccagataggccgcccatgctctcagcctttctccctcccccgtctcattccaaggctgagggagggccttctcgcctggggacgcagccactttctccagtggagacagggcaggggttcagagtttccgtcagatgcagtgaaatcacagttccctttcatcttcagaacctctgtcgtgaatgtgttcaagaggctttggttaagtcaggaagaagtgcccagggtgtgtgtccccagtctccctgaggcctggactcgcccatgaacccaagtcggcttctagacagcatgtccctaacagcagccctgggcccccacctcttctaccatccaccccagacttaccacacacccttcctgctgctcctcttcctgcccttatcaacctgggtccctcacacttcgccagttgcgtccccgtggacagtcatgagtctagaggaaaggggcatctggtctcaggcccgtgctctcgggtggcctccacctgctccctttctcctcactggcctttctttccgtctagcttcctcttcaggaaatgtcctgactctcctcagctcccccttcacccctccttgcccgcctaccctccctccagaatagcccctcacccttcttccccttctagttgatccttttcacctccctgatccccttcatttcttcaccgcggttcctcgtcataggggttctcactctgaactttccctctctactacccatggcaggaacctagtacaggtctcccacccagggccttccaccctcggctcctgtgctgggagaaacttccaggcgtggacagcccagcctgaggcattccagtgctggggcaccgtcgcctaacctggtttctagctttgccctcactccccggaaaaactgacactgacacaggggccctttccttgcccctttagctggtacctcagtggggaggcttccttaccaagaatgagttcctgaaacccagggccagagacaaggacaacttaggggaagacggggttttcggtggagccaggggcaaatcttaatgggaccagtgggggataccccagagcccatggcctgactgcacagcctgcctggaggatgggtgcgcagctctgccctccctgaggcccaggactatgccagaagcgatggggtaccgtgtaggggagccaaggccagtagtttgggggtaggagtcccctagagtctcagaagactgggctctttggagtacagggtccccggcctctcctttaagattctctccccagctggaaggccgatgactgggtggtcgggagggagacccagctctcctttctgtcccgtttgcagcactggttttgtttccttaataaatttttagttatgaaacatacctgacctcttgctgatctgtttctgggactggggagggaggcaggtccaagcctctgcacctgtgtgagggtggccctttctggctcctccacccagcgggcgcagcccatccaggtccttgtgcaggggcagaagagagcagcggggtcggggtccttggttactgctttattgctgtttggttcgagtatagaaaatggaagcggctctggaagagcctgtgtacaaggtaggaaatatacaaacgaagaggagggagctaaagagaccgcgttccagcccagcccagcctgggctcgggatggggggccgccggggcgcatgcaataaatatggtccggggccgcagggaagggaagggagggcaccgcgggagtgggagacctggtggtaggctcttcgccttccgactccagaactccccgcccttggtgactgaggaaggaagggttggccctggggctagtgccacttgtgcaaaatgaggaacttcacattatcagtcccggggtgggtgggagcgggggtgcggggggccctccggccggctcagtcccctccccactccccaactctgcccgacgctccgaccccagcggggagattcacagtgagaatgggtgtggtcgcaagggccggaggtagggctaggagtgccccgacagtgacacccctccccctctaagagcagcgcggagccgggggagggggccgacgaaccacaggaagaggcgggaggggcctggggtctcctttggtcaaagctgatatcaaaaatataaatttcccttaccccatcccacccccgtcccggggttctcccccgacccccgagctaaggcacgaagcagtgaggccaggtgaggccgccgagaggtggagccgccactgtggcgacgctgcggttgtcccgggcacagtgggccctgcgcgccgcccccgccgctccctggggtgcgggccagggccgcgcagcagcgacagagcgggctggcgaggggcgctctaggtgggagagaaacggtcgatggtccggccgtcgggcccggccgccaggtgagcgccctggctcagcacctcggccgccttgtcggggctgaggcccagctcggccgtgaacttggccagcgggtagaggctctccagcgccaccttggggtcgtgcaggaagtgcgtggtctgcgccagcagctcggccgcggccgccttgtcctgctgcttcaggctcagctgctcggccgtgaggcgagccacagcaaagacgccctcggggaagtcgagcttgcccttgccgtcggggccggggacgccggggagcccccccaagcccgccagcgccccggccgcgccggccgcgccccccacggcgtgcatcttcatgtggctgatgaggttgcgttgctgtgcgaacttgccgccgcacacctggcactcgtagggcttctcgcccgagtggatgcgcatgtgctccgtgaggcggtactggcgcgtgaaccgcatgccgcacgcgtcgcacgcgaagggcttgaggcccaggtggctgcgcatgtggcgcgtcatggtcccacgctgcgtgaacttcttcccgcagatggtgcatgggtagggccgggtcagccagtgcgtcttctcgtgctgccgcagcgtggccgggtccttgtagctcttgtcgcacgacgcgcagcggtagggccgcagcagctctcccaggccacccggagccccggcgaccttgtccccgccgcctccaaaagggggccctaggccggcggccccagcggccacttcggccgcctcggccctgccgtacagcgcttcctcctcctccacgtgagcctccacgtgcgcgttcagctgctcagagctggggaagcccttgccgcacggaatgcacacgtacaggttgtcaccgaagctctcgggctcgccataggccaggtgcgggcatgggtagccctcgaggtggccgccaggcgggctggggtcctcgctgctaccggtctcctcgctgctgctcttgtagtcgtcgccgtcgccgcccgcgccgggcccgtccaggctgccagggtagcgcggcggcggcgccaggccgagcgggggccccccgggcgagacggccgcgtccccaccacgctcttcgcagcgctcgctgggggagccgcgctcccggcccagctcgtcgccatagctacccaggcccggctcgtgcttcatccagcgatagaggagactaggcccgtcggggcggccggggggctcgggtcccgggctgccgctgccgccgcgaaatgggtcggaaggcggtgcggcctcctccagcttctggaagggcagcggcggcagcgacggcagggcgagaggcggctccttgtaggcggcggggccggcgctgggagggctgtccgggcgcgggggcagctcgcgctcagccagcggccgctctggcgccgcggagcccggcgggctcttcttggacaggtccaggccacaaagaggggagcagcggcgctccgaggcacagagtgcggcggccgggccgggtcccgacgcgtacagctcggcgcagtgcgtgttgaccgcggcctctgggcccgagggcggctccgcggcaggcggcggcggaggcccgactggggacgggtagcaggcctggatgaccggcgtggcggcccgcaggccccggcccggccgaccatagggcgcgtagccgccgccgccgccgccgccgccccgcaggtggcagtacttgccgtggcgcttgaggcgtttcttgcacagcgccacgaggtcggggatctgcaggtagctggcggcggccagcacggcgcccaggctcggctcagcccccggggccacggccgcggccgcagccgcctctgcgccgtcagccaggcggccggtgtagatgaagtccagcaccaggcggaacacggccgggctcaccatgtcatggtccaggttgagcaggttgtcatgcaccaccagggacttgaggtaggcgctgctggccgccagcacgttcttgtgcgcgcggaagagggcgttctgcaccacgatgatcacgtcgcacaagaagcccttggtgcgctggttgttgagctgcagcagcagctgcctggagtggccgggcgcctccatcgtgtccagcatcgtctgcccagcacactctcctgcggggacacacaccggccgggtgagagccgtgcggcgccctggccgcctggccccagcccggcacttctcccctccacttccccttccctcagctgagcgggggcatcagccctgcggcctgggcaccggcgaaggaccggctgccctctggagtgggagcccaggccggcccgcccggaccaggagaaggagcaggaggtgagcggccgccggtggaggggaggccagggcggcctgcacgccccagggcacctggctgggtgctggggcttccgagaagaaaactgttcaggcgcagtgacccttttggagacagttacccgatttaagtaaaatgtccgcttcaggaaaagtcattcagggcggagaactttacccaagtagggagaaagggagccgaggaaccagcgcctcccgcctcgggagaagttgccccagttgggggaagtgatacggaggaggggagcgcggtgcccgccctggcgccgccctggccgggggctgtcaaccctcggtcggggcccgggcggcggccgcgcggggagcggaggcagcggctgccgtggcgggcagagcgcgaaggccgggcccggcgcggggagggcgttatatcggggcaggaggctgaggcaggaagcaggtgggggggaggggggagccacgcagctcccaggggagggagggggcagcgccccgggcgggcacggcgcacagccggctgcggccctgacccgggcctgcgccccacccgcgtcccggcctcggcctgggccctacacgcgcgggcccggcgcctccctccgcggctcccccggccccttctcccccggaactccgccgccccaaacttggggaaaagttttccaactgcagacagggcgggaggagtgcgccggccccaggccctcggctcgcagctcttcctcgcggcccccaaatccggcggcagagcccggagccgagccctgagctcccctgcccgctgctcgcccgcccgaccccgttcccctcctggcccgcggggccccgcggcccgttacctgcggtcccggcgggccgggctcccctccccgcggcggtggcagctcttagccgatgccccacccgccgctgccaggccccgagctgtgccagggcagcgcccctgccagccccgcccgccagctccccttcccttcccttcccctcgcctctccagcccatgtgcgggcagagccggccccgggccgctgaccccgccgtgaacccggcgcggagccgcggcccggtggtcctgagtccgaaagggacgacacccggagccctgaacgccagccgccagccgcgatggggcacccgcgccagaagatgcacccgaggcggccgacgcacgaggaccgggctgtcccgggtcccccgtccctcccggtccccggctcgaggacccacctggggggcatgtcgaaagccccgggcccggctgacggcggatccaggggggacgtggctgcgctgccctccgcccgccgggcccccggtcggtctgtcctgctggtccgtcctccccgcgtcctggtcgcgtctcagccccgccgcgctttccgcacactcttatctggagcggcccgggccggcgggcgctgctgcggctatggcgccacctcgcgggcgcgcagggctctgcgcggcaggccgctgccttcctcccgcgcacctgagctggaggcgcacagatgctgagcccgcggggaggggcccaccctacccgcaggttcgccctcccacctgtacccacctgggaccccgaccccggacacgcgagtcccagaaaccctggggctttgagctgagcgctcccatgtacgtatttctaggcacacagccccagttcggaaaagtcctgcccgcgagcacgggactcgggtggtgggggagaggttatcctgcgcaggagtagccgagctctcctggaactccccgtagacattactgtacggcactgtccacttggacgcactccccaacacacccaccctcactcaggcgcatggattcggtgtgcgcggcataaactgatttgtccccagccctatccaggcactgatactaacaggcgctcatgtttccagaagcacacccgccccttcccgcagccctagcgctctgggatactccaggggcagccacgtagggccctccgggaacctgggcagaggtgttacccacacagcccgccctgaactttcgggtctcctaaaggaacccacgacgagtcatcagggcgactggaagtggctggacagcgcctccggggggtccaaagaagtaaccatggggccctagaatccccctgtacgccgttttgaagaatcccgcgtggacttcttctccaacccacccgcccgaaggaaacaacaggggcgcctgcggctgggaccccgcaaggtcccgcgccccacgtgaaggtcaggtttgtgtgggtgacgtctcttctgggagaaaggggaccccgcactgtcgcgccgctgctcgcagtactactccggaagtggccccgtgcagccccgccgcgcaccaagcctcctgcgaacgccggatctccgcggcccacgctccgcctccgccccgcacctcctgacccccgcccacacacggcgtggagcggggggggggggggtccccgagaactccgccgcttccgattggctgcgcctccctccaccgcggagcgcgaggggctggggcgctgcgttaccatggcaaccggtgaggtgcgcccagatcctgtccctccgaggccttggagagcttagcaaccgcgctcgccgccccccgcgctgtcctctggcccccatggccccgccagaggtaccggctgagtcaccgggcgaggggcagcgggcgcggctaccagcggcccccgagcgacaccaaggtctcgggcgccccccggaggctccctttgctgcgcaggcgacttcacggcttcggtgcctggcggaggcttcggtccaaacgagtccgcctgattcccgccgctgcctgagtccgccccatgttctggatccatcttacccactccctctcccatgtctccccatagcatcctcactttagaagcagtgaggtcccaaagaggaaaacggaggcctccggagctgccggtctctagggaaggcggaccccgacatctcgcccgagggacgtgctgcggcctgaggtggaagttacggagtgttgaggggaggtggagaggctcctcataagtgctcctagagctgggctttgacggatgaataggagttcttctaccgagcaggaaggcatttgtgaataacagaatccctggaacaaaggctagcggcaagaaaactggagctctagtaggccaaatccagactatgcagggcctctctgaccccatctcttttatcttttctctttttgatagagtcagatcccccacccccgacttccaaagagcccctccgccccatgtatcttgtgcagtggagtctgtgcattgctaacctgccccaggggtctgctgtgcccacagtctttattcttcagcgttcccccacatccgctccccaagttaacttactgcccctaaccccctcctcaagccctcattgcttctgtaagggagggtctcacagccctgccccgccccaggcagtctgagggccgccttgccctcctgtgcacttcactcttcgacctttctctccctgccccgctcttccggccatgccttgcacagccctccccatcctggtccagctcctcgtctgaacacactcctctcatttagacccttcctccatctcgatggagccaggctgggccaggaccatgcatttccccgctcccaaccaggggaactgccccacaagtcatgggctctccctgccaattctggtctccgggaacattaacttctccaggaaaccgtcctcctcatcccctgggggcccctcttggccaagctgctggtctccttcactctctattaccctaacgtgagctctgggagcgtccatcgtgccacaaatggtccgaaggtgggtcctggatgccaggctctggagcgtggcactgacagcctttcctctctcccttgctgaggctgcccattcctctcacccctacctctggcgcgttcccccagctccctcatagaggatcccgttgctcatcatttctggggaggttggcccaccttccccaacttctctgccgtccctcgggtctccagctcctgggtggtacctgaatccccgctgggccttccctcccaggcccaggttcctccgctaaagactcctgggctactttgggctcccctactcttcttctcccggcccccgacgccacagccctcgctgcgccccaggcccccacgggagtccagcttcctctcctgcccaccctgcaggacgagagggtggcgacaccgcagtggccttgcggggtgtgacggcagaaacgtcaggtccaggaactgaggagggggaaggggctgccacgtgaagacccccaggagccgcggggctccggaaggagagcgtgaataagctcgaagggcccgccgcgcccctccgcgccgcctccccggccccaggcccgcggttccggaaagttaaccccttgtcggctgggcaggggcgcggctccccctaccccgccgccgcttccgcgccccctcctcccctcccggtcgcctcggtccccaccccccgcctcgccactataaatagccccttttcccatttcctaaattccccgctgacgtcggcagcgcgtcagtgtgtaggagccgcggccgcatgaatgagccgccgcacgagtactacgcgcgcctataaaagccgccgcgccggccaggctgcgggaggcgaccgggcagtggcgacgcggcccgccaggtaagcgggacggaccagccgcggagggacagatgtgcggacacggacgggaggacgaggaggggacgggcaggcggcgggtggggcggcccctccggggtggggatgggggcggacggggggcaccggggtcccctcgcggctgcggagccggggccagagacgacacgagcccgcgcagcacctgccggcgcccgatggacacgcagctacttcggaggagcatcgagtggaggaccgacctcggagacccccccccggctttcttggggctcctgcgccattctcccaggaaagtgaggcgaaggtgctggcgccccaggagacgcgccccctcctctccctccctgcggcgcggtgactcagcctcgctgcccgggccggctgagcgggggtgcaggcgagagacggacgcccacccccgcttccccggccctcctgggacccccgccccgcatggcgtcgggcgccccttcccggcaggtcccgtccagcgggtcccgcggcgcccacggcttcccgcctctgcgagcggagctgtcctctcaggaccgggggggcgggcctcgccaggtcccgccccgcccccacgcccccgccggaagtgccccctctgggacatctttgacgtcacggccctctgacgtcaggggccgcgtgcctggtcgcgagcgccgggcggggcagggcgggagacgcaggggaggcggagcagcagagcccccagccggggcagccggggcgaccggggcaccccgcccggacagcgcgccggcaccttggctctagactgcttactgcccgggccgccctcagtaacagtctccagtcacggccaccgacgcctggccccgccccaggaccgcggccccggccgccgccgccgcgcccggggacccccagtccccgtccctcagggccccgcccccggcccgctgcctgcgccgccgctgtccgcggtgctgatcaacgcaggcgccgccatcgggccgccccgtccgggtccctaggggctgcgaggggcggtggcccacgcgcgctcctcagcccccgccgccccgcccgcccccccgcggccctgacgtcagcccgccccgcgccggcgccgtccgcgcgccccgcccccgcgtctccagggcaaccgtggctttcgattgttactgtgggaactggaggtaacagtctacagccatggtcgccccgcagcacgcccacgcgccgcgccacgccgcgccccgagccgcgggctggggacgcggagcagaaggaggcgggggcggcgagtcaagatcccacgtgcccgcgcgggtggcaggaggtgctgcgcagggaggcggcctcccggggccggcggctgagtccaccgaggctcgagcgcgcgcggcctgcggagtgcgtctggcggccagcctgaggccgtcctgtcctcccggccaaggtatcccagccagggctcggcgagagaaggggtcgggctgggactcgggttctttcgatttcggtgagagggaagccactgggaccaggaggcttggaaggaggtttgtctcctggggcctgaagacagtagagggaggaaagttttctgagatactccacagccccgttcttccaggaacccctagctgaagtgggcattgggcgaagagtaaactcttgaatctttccctctgagctaggaggataagaagggtccccaaccctctggaagccaatgagcttgtaaagttaacctggtccgcgaagcgtctgaacagatcagcctgctcacctcagcctatctctaggtgctggattccaatctgagacagtttctcaaattagccctaaagaggagtgaataccacaggggctgaagtcctctggtgcggatgaagtgtgaacaaggatctctaaaaatattattgtatatgt

SEQ ID NO: 555 - DNA, 4846 bp, Homo sapiens
tcctggctgcgcgcggcggtggcggagccgctacggctgtagcagcagccgcgaagatggcggaagggctggagcgtgtgcggatctccgcgtcggagctgcgcgggatcctggctactctggccccgcaggccgggagcagagaaaacatgaaggaattaaaggaggccaggccgcgcaaagataacaggcgtccagatctggaaatctataagcctggcctttctcggctaaggaacaagcccaaaatcaaggaaccccctgggagtgaggaattcaaagatgaaattgttaatgaccgagattgctctgctgttgaaaatggtacacagcccgttaaagatgtctgcaaggaactgaacaaccaagagcagaatggtcctatagacccagaaaataatcggggacaagaatcctttcctaggactgctggacaagaggatcgtagtctaaaaattatcaaaagaacaaagaaacccgacctgcagatctatcagcctggacgacgtttgcagactgttagcaaagaatccgccagtcgggtggaggaggaagaagtcctcaaccaggtagaacaactgagagtagaggaagatgagtgtaggggaaatgttgcgaaggaggaagttgcgaataaaccagacagggccgagatagaaaagagcccaggtggtgggagagtaggggctgcaaaaggagaaaaaggaaagaggatgggaaaaggggagggggtgagggaaacccacgacgacccggcccgcgggaggccgggctccgcaaagcgctactcccgctcagacaaacgaaggaatcgctaccgcacgcgcagcaccagctcagctggcagcaacaacagcgctgagggagctggcctgacggataatggatgtcgccgccgccgacaggataggaccaaggagaggccacgactgaagaagcaagtgtctgtgtcctcaaccgattccttagacgaggacagaattgatgagcctgatggattaggacccaggagaagttcagaaaggaagagacatttagaaagaaactggtctggccgtggggagggtgagcagaaaaacagtgctaaagaatatcgaggcactcttcgtgtcactttcgatgcagaagccatgaacaaagagtctcccatggtgaggtcagccagggatgatatggatagaggaaagcctgacaaaggcttgagcagtgggggcaaaggctctgagaagcaggagtccaaaaacccgaaacaagaacttcggggtcgtggtcgtggcattctgattttgcctgcccataccaccctatctgtcaattcagcaggttctccagagtccgcgcctttgggacctcggcttttgtttggatctggtagtaagggatctcggagttggggccgtggaggcaccacacgccgattgtgggacccaaacaatcctgatcagaaacctgctctaaagactcagacgccccagctacatttcttggacactgatgatgaagtcagccctacatcttggggtgactcacgccaggctcaggcatcttactataagtttcaaaactctgacaacccctattattacccccggacaccaggccctgcctcccagtatccctatacgggctataaccctctacagtacccagtgggccctacgaatggtgtgtacccagggccttactacccaggctacccgactccgtcaggacagtatgtgtgtagccctctacctaccagcaccatgagtcccgaggaggtagagcagcacatgaggaacctgcagcaacaggagctgcacaggcttctccgggtggctgacaaccaggaactgcagctcagcaacctgctctccagggaccgcatcagtccggagggcctggagaagatggcgcaactcagagctgaactgctgcagctatatgagcgctgtattctattagatattgagttctctgataatcagaatgtggatcagatcctgtggaagaatgctttctatcaggtgattgagaagttcaggcaacttgtcaaggatccgaatgttgagaacccagaacagattcggaacagacttttggagctcttggatgagggtagtgacttctttgatagtttgcttcagaagctgcaggttacttacaagttcaaactggaagactacatggatggtcttgccattcgcagcaagccattacgcaagacagtaaaatatgccttgatcagtgcccagcgatgcatgatatgccaaggagatattgctaggtaccgggagcaagccagtgatacagcgaattatgggaaagcacgcagttggtacctgaaggcccagcacattgctcccaagaatgggcgcccctataaccagttggctttgctggcagtgtatacgaggaggaagcttgacgctgtctattactatatgcgcagtttagctgccagcaaccctatcctgactgccaaggagagtctcatgagcttgtttgaagagaccaagcggaaggcagaacagatggaaaagaagcaacatgaggaatttgacctgagccctgaccagtggcggaaaggaaagaagtctactttccggcatgttggagatgacaccactcgcctggagatctggattcatccatcccatccacggtcttcccagggcactgagtctgggaaggattctgagcaagagaatgggctgggcagcctgagtcccagtgatctgaacaaaaggttcatcctcagttttctccatgcccatgggaagctgtttacccggattgggatggagacattccctgcagtggctgagaaggtcctcaaggagttccaggtgttactgcagcacagcccctctcccattggaagtacccgcatgctgcagcttatgaccatcaatatgtttgcagtacacaactcccagctgaaagactgcttctcggaggagtgccgctctgtgatccaggaacaagccgcagctctgggcttggccatgttttctctactggtccgccgctgcacctgcttacttaaggagtccgccaaagctcagctgtcctctcctgaggaccaggatgaccaagacgacatcaaggtgtcttcctttgtcccggacctgaaggagctgctccccagtgtcaaagtctggtcagattggatgctcggctacccggacacctggaatcctcctcccacatccctggatctgccctcgcatgttgctgtggatgtatggtcgacgctggctgatttctgtaacatactgactgcagtgaatcagtctgaggtgccactgtacaaggacccggatgatgacctcacccttcttatcctggaagaggatcggcttctctcgggctttgtccccttgctggctgcccctcaggacccctgctacgtggagaaaacctcggataaggttattgcagctgactgcaaaagggtcacagtgctgaagtattttctggaagccctttgtggacaagaagagcctctgctggcattcaagggtggaaagtatgtgtcagtggcacccgtcccagacaccatgggaaaggaaatgggaagccaagagggaacacgactggaagatgaggaggaggatgtggtgattgaagactttgaggaagattcagaggctgaaggcagcggaggcgaggatgacatcagggagcttcgggccaagaagctggctctggccaggaagatagctgagcagcagcgtcgccaggaaaagatccaggctgtcctggaggaccacagtcagatgaggcagatggagctcgaaatcagacctttgttcctcgtaccagacaccaacggcttcattgaccacctggccagtctggcgcggctgctggagagcaggaagtacatcctggtggtgcccctcatcgtgatcaatgagctggacggcctggccaaggggcaggagacagaccaccgggctgggggctacgcccgtgtggtacaagagaaggcccgcaagtccatcgagttcctcgagcagcgattcgagagtcgggactcttgcctgcgagccctgaccagccgtggcaatgaactcgaatccatcgccttccgcagtgaggacatcactggccagctgggtaacaacgatgatctcatcctgtcctgctgcctccactactgcaaagacaaggctaaggacttcatgcccgccagcaaagaggagccaatccggctactgcgggaggtggtgctgttgacggatgaccggaacctgcgtgtgaaggcgctcacaaggaatgttcctgtacgggacatcccagccttcctcacgtgggcccaggtgggctgagggagccacactggggcccccccccccgtggaaccgttcctgaaaggccaccaggcgcccagtgtagcacggaagatgcccacgtgcctgagccaccaatccacccagacaataaaccatcctcttccaacccacgccacggccatgctgtgggggacctgctcctcacagagcccctcccaaggatcgggcggaagctgctgggaccctcctgggctgccaggatttagcagggaggtggctggctacagcaacagcagctgggcaagccagataggccgcccatgctctcagcctttctccctcccccgtctcattccaaggctgagggagggccttctcgcctggggacgcagccactttctccagtgaagactgggctctttggagtacagggtccccggcctctcctttaagattctctccccagctggaaggccgatgactgggtggtcgggagggagacccagctctcctttctgtcccgtttgcagcactggttttgtttccttaataaatttttagttatg

SEQ ID NO: 556 - protein, 1407 aa, Homo sapiens
MAEGLERVRISASELRGILATLAPQAGSRENMKELKEARPRKDNRRPDLEIYKPGLSRLRNKPKIKEPPGSEEFKDEIVNDRDCSAVENGTQPVKDVCKELNNQEQNGPIDPENNRGQESFPRTAGQEDRSLKIIKRTKKPDLQIYQPGRRLQTVSKESASRVEEEEVLNQVEQLRVEEDECRGNVAKEEVANKPDRAEIEKSPGGGRVGAAKGEKGKRMGKGEGVRETHDDPRRPGSAKRYSRSDKRRNRYRTRSTSSAGSNNSAEGAGLTDNGCRRRRQDRTKERPRLKKQVSVSSTDSLDEDRIDEPDGLGPRRSSKRHLERNWSGRGEGEQKNSAKEYRGTLRVTFDAEAMNKESPMVRSARDDMDRGKPDKGLSSGGKGSEKQESKNPKQELRGRGRGILILPAHTTLSVNSAGSPESAPLGPRLLFGSGSKGSRSWGRGGTTRRLWDPNNPDQKPALKTQTPQLHFLDTDDEVSPTSWGDSRQAQASYYKFQNSDNPYYYPRTPGPASQYPYTGYNPLQYPVGPTNGVYPGPYYPGYPTPSGQYVCSPLPTSTMSPEEVEQHMRNLQQQELHRLLRVADNQELQLSNLLSRDRISPEGLEKMAQLRAELLQLYERCILLDIEFSDNQNVDQILWKNAFYQVIEKFRQLVKDPNVENPEQIRNRLLELLDEGSDFFDSLLQKLQVTYKFKLEDYMDGLAIRSKPLRKTVKYALISAQRCMICQGDIARYREQASDTANYGKARSWYLKAQHIAPKNGRPYNQLALLAVYTRRKLDAVYYYMRSLANPILTAKESLMSLFEETKRKAEQMEKKQHEEFDLSPDQWRKGKKSTFRHVGDDTTRLEIWIHPSHPRSSQGTESGKDSEQENGLGSLSPSDLNKRFILSFLHAHGKLFTRIGMFPAVAEKVLKEFQVLLQHSPSPIGSTRMLQLMTINMFAVHNSQLKDCFSEECRSVIQEQAAALGLAMFSLLVRRCTCLLKESAKAQLSSPEDQDDQDDIKVSSFVPDLKELLPSVKVWSDWMLGYPDTWNPPPTSLDLPSHVAVDVWSTLADFCNILTAVNQSEVPLYKDPDDDLTLLIEDRLLSGFVPLLAAPQDPCYVEKTSDKVIAADCKRVTVLKYFLEALCGQEEPLLAFKGGKYVSVAPVPDTMGKEMGSQEGTRLEDEEEDVVIEDFEEDSEAEGSGGEDDIRELRAKKLARKIAEQQRRQEKIQAVLEDHSQMRQMELEIRPLFLVPDTNGFIDHLASLARLLESRKYILVVPLIVINELDGLAKGQETDHRAGGYARVVQEKARKSIEFLEQRFESRDSCLRALTSRGNELESIAFRSEDITGQLGNNDDLILSCCLHYCKDKAKDFMPASKEEPIRLLREVVLLTDDRNLRVKALTRNVPVRDIPAFLTWAQVG

SEQ ID NO: 557 - DNA, 2618 bp, Homo sapiens
ctcctgggccgggcctgcccgccccgcctccctctcctcctcctctgcctcctccccgctcggccctcggctccggagcccccgccccttcccccagcagtaggcgctggggccgcggcggaccctcgctgccctacctctctcgcgggttagtgcggggtcgggctcggccagtcctggccagctccgggagagcctggcccgaattcctgcctccaccctctttctcgccgcgaaggtgactgttccttttgccccagccctctcagacccgccccggattcccaggcatcgggagacgcggaaaggagtggggtctggtggaggccccgggcgtatcgctctccaggccgccctccgcgggcctgccccggccaccgctttaacgtcggagagaaggaattggggagaaaggtttaagagcctgcgacttcgttgctgaacttttcccccccaagacaggcttccgaaagctgcgccactggagggatccgggacctcagactactcgggtttggccctggcatgtgtgggagcagtttttattagagagaatgctcaatttgcaagttaatttcaagtctccagccacgtcaggaaaaaaacatgaaggaattaaaggaggccaggccgcgcaaagataacaggcgtccagatctggaaatctataagcctggcctttctcggctaaggaacaagcccaaaatcaaggaaccccctgggagtgaggaattcaaagatgaaattgttaatgaccgagattgctctgctgttgaaaatggtacacagcccgttaaagatgtctgcaaggaactgaacaaccaagagcagaatggtcctatagacccagaaaataatcggggacaagaatcctttcctaggactgctggacaagaggatcgtagtctaaaaattatcaaaagaacaaagaaacccgacctgcagatctatcagcctggacgacgtttgcagactgttagcaaagaatccgccagtcgggtggaggaggaagaagtcctcaaccaggtagaacaactgagagtagaggaagatgagtgtaggggaaatgttgcgaaggaggaagttgcgaataaaccagacagggccgagatagaaaagagcccaggtggtgggagagtaggggctgcaaaaggagaaaaaggaaagaggatgggaaaaggggagggggtgagggaaacccacgacgacccggcccgcgggaggccgggctccgcaaagcgctactcccgctcagacaaacgaaggaatcgctaccgcacgcgcagcaccagctcagctggcagcaacaacagcgctgagggagctggcctgacggataatggatgtcgccgccgccgacaggataggaccaaggagaggccacgactgaagaagcaagtgtctgtgtcctcaaccgattccttagacgaggacagaattgatgagcctgatggattaggacccaggagaagttcagaaaggaagagacatttagaaagaaactggtctggccgtggggagggtgagcagaaaaacagtgctaaagaatatcgaggcactcttcgtgtcactttcgatgcagaagccatgaacaaagagtctcccatggtgaggtcagccagggatgatatggatagaggaaagcctgacaaaggcttgagcagtgggggcaaaggctctgagaagcaggagtccaaaaacccgaaacaagaacttcggggtcgtggtcgtggcattctgattttgcctgcccataccaccctatctgtcaattcagcaggttctccagagtccgcgcctttgggacctcggcctcccaaagtgctgggattacaggtgtgagccaccgcgcccggccgaagatcacattctttaacaaggacctgtccaacatgccctgcccacttctccagactttcttacagaatcaatcatctagccatgccagtctacaatgtaccacttttgagaacatcatatatgttgttccctttgcttaagacacaccaggacgtgactccctctcctctccaaaaccaactgtttcttcaaccctcacttttcaactcaaaggtcttttcctctgagaggatatctctggtgctgcttctgtatatttccacagcatcctagccttccccagtcatggcacttcataattgtctgtgttacccatagaggaaggattatctctgccttgttcacagcttgtgcactgtgctttgtacataaaatgtgcccagtaggtttttgttgaatgaataaatgtatgggtccatgtgtgaggaagtcttcaccatccctcttacgctgtgtcaacctgttgatttataagatgggtttgatggccgagcacggtatctcacgcctgtagtcccagcactttgggagcccgaggtgggcagatcacttgaggtcaggagatcgagaccatcctggtcaacacggtgaaaccccatctctactaaaagaatacaaaaaattagccaggcgtagtggcaggcgcctgtagtcccagctgctcaggaggctgaggcaggagaatggcgtgaacccgggaagcggagcttagagtgagccgagatcgcgccactgcactccagcctgggtgacagagc

SEQ ID NO: 558 - protein, 407 aa, Homo sapiens
MKELKEARPRKDNRRPDLEIYKPGLSRLRNKPKIKEPPGSEEFKDEIVNDRDCSAVENGTQPVKDVCKELNNQEQNGPIDPENNRGQESFPRTAGQEDRSLKIIKRTKKPDLQIYQPGRRLQTVSKESASRVEEEEVLNQVEQLRVEEDECRGNVAKEEVANKPDRAEIEKSPGGGRVGAAKGEKGKRMGKGEGVRETHDDPRRPGSAKRYSRSDKRRNRYRTRSTSSAGSNNSAEGAGLTDNGCRRRRQDRTKERPRLKKQVSVSSTDSLDEDRIDEPDGLGPRRSSKRHLERNWSGRGEGEQKNSAKEYRGTLRVTFDAEAMNKESPMVRSARDDMDRGKPDKGLSSGGKGSEKQESKNPKQELRGRGRGILILPAHTTLSVNSAGSPESAPLGPRPPKVLGLQV

SEQ ID NO: 559 - DNA, 5966 bp, Homo sapiens
tcctggctgcgcgcggcggtggcggagccgctacggctgtagcagcagccgcgaagatggcggaagggctggagcgtgtgcggatctccgcgtcggagctgcgcgggatcctggctactctggccccgcaggccgggagcagagaaaacatgaaggaattaaaggaggccaggccgcgcaaagataacaggcgtccagatctggaaatctataagcctggcctttctcggctaaggaacaagcccaaaatcaaggaaccccctgggagtgaggaattcaaagatgaaattgttaatgaccgagattgctctgctgttgaaaatggtacacagcccgttaaagatgtctgcaaggaactgaacaaccaagagcagaatggtcctatagacccagaaaataatcggggacaagaatcctttcctaggactgctggacaagaggatcgtagtctaaaaattatcaaaagaacaaagaaacccgacctgcagatctatcagcctggacgacgtttgcagactgttagcaaagaatccgccagtcgggtggaggaggaagaagtcctcaaccaggtagaacaactgagagtagaggaagatgagtgtaggggaaatgttgcgaaggaggaagttgcgaataaaccagacagggccgagatagaaaagagcccaggtggtgggagagtaggggctgcaaaaggagaaaaaggaaagaggatgggaaaaggggagggggtgagggaaacccacgacgacccggcccgcgggaggccgggctccgcaaagcgctactcccgctcagacaaacgaaggaatcgctaccgcacgcgcagcaccagctcagctggcagcaacaacagcgctgagggagctggcctgacggataatggatgtcgccgccgccgacaggataggaccaaggagaggccacgactgaagaagcaagtgtctgtgtcctcaaccgattccttagacgaggacagaattgatgagcctgatggattaggacccaggagaagttcagaaaggaagagacatttagaaagaaactggtctggccgtggggagggtgagcagaaaaacagtgctaaagaatatcgaggcactcttcgtgtcactttcgatgcagaagccatgaacaaagagtctcccatggtgaggtcagccagggatgatatggatagaggaaagcctgacaaaggcttgagcagtgggggcaaaggctctgagaagcaggagtccaaaaacccgaaacaagaacttcggggtcgtggtcgtggcattctgattttgcctgcccataccaccctatctgtcaattcagcaggttctccagagtccgcgcctttgggacctcggcttttgtttggatctggtagtaagggatctcggagttggggccgtggaggcaccacacgccgattgtgggacccaaacaatcctgatcagaaacctgctctaaagactcagacgccccagctacatttcttggacactgatgatgaagtcagccctacatcttggggtgactcacgccaggctcaggcatcttactataagtttcaaaactctgacaacccctattattacccccggacaccaggccctgcctcccagtatccctatacgggctataaccctctacagtacccagtgggccctacgaatggtgtgtacccagggccttactacccaggctacccgactccgtcaggacagtatgtgtgtagccctctacctaccagcaccatgagtcccgaggaggtagagcagcacatgaggaacctgcagcaacaggagctgcacaggcttctccgggtggctgacaaccaggaactgcagctcagcaacctgctctccagggaccgcatcagtccggagggcctggagaagatggcgcaactcagagctgaactgctgcagctatatgagcgctgtattctattagatattgagttctctgataatcagaatgtggatcagatcctgtggaagaatgctttctatcaggtgattgagaagttcaggcaacttgtcaaggatccgaatgttgagaacccagaacagattcggaacagacttttggagctcttggatgagggtagtgacttctttgatagtttgcttcagaagctgcaggttacttacaagttcaaactggaagactacatggatggtcttgccattcgcagcaagccattacgcaagacagtaaaatatgccttgatcagtgcccagcgatgcatgatatgccaaggagatattgctaggtaccgggagcaagccagtgatacagcgaattatgggaaagcacgcagttggtacctgaaggcccagcacattgctcccaagaatgggcgcccctataaccagttggctttgctggcagtgtatacgaggaggaagcttgacgctgtctattactatatgcgcagtttagctgccagcaaccctatcctgactgccaaggagagtctcatgagcttgtttgaagagaccaagcggaaggcagaacagatggaaaagaagcaacatgaggaatttgacctgagccctgaccagtggcggaaaggaaagaagtctactttccggcatgttggagatgacaccactcgcctggagatctggattcatccatcccatccacggtcttcccagggcactgagtctgggaaggattctgagcaagagaatgggctgggcagcctgagtcccagtgatctgaacaaaaggttcatcctcagttttctccatgcccatgggaagctgtttacccggattgggatggagacattccctgcagtggctgagaaggtcctcaaggagttccaggtgttactgcagcacagcccctctcccattggaagtacccgcatgctgcagcttatgaccatcaatatgtttgcagtacacaactcccagctgaaagactgcttctcggaggagtgccgctctgtgatccaggaacaagccgcagctctgggcttggccatgttttctctactggtccgccgctgcacctgcttacttaaggagtccgccaaagctcagctgtcctctcctgaggaccaggatgaccaagacgacatcaaggtgtcttcctttgtcccggacctgaaggagctgctccccagtgtcaaagtctggtcagattggatgctcggctacccggacacctggaatcctcctcccacatccctggatctgccctcgcatgttgctgtggatgtatggtcgacgctggctgatttctgtaacatactgactgcagtgaatcagtctgaggtgccactgtacaaggacccggatgatgacctcacccttcttatcctggaagaggatcggcttctctcgggctttgtccccttgctggctgcccctcaggacccctgctacgtggagaaaacctcggataaggttattgcagctgactgcaaaagggtcacagtgctgaagtattttctggaagccctttgtggacaagaagagcctctgctggcattcaagggtggaaagtatgtgtcagtggcacccgtcccagacaccatgggaaaggaaatgggaagccaagagggaacacgactggaagatgaggaggaggatgtggtgattgaagactttgaggaagattcagaggctgaaggcagcggaggcgaggatgacatcagggagcttcgggccaagaagctggctctggccaggaagatagctgagcagcagcgtcgccaggaaaagatccaggctgtcctggaggaccacagtcagatgaggcagatggagctcgaaatcagacctttgttcctcgtaccagacaccaacggcttcattgaccacctggccagtctggcgcggctgctggagagcaggaagtacatcctggtggtgcccctcatcgtgatcaatgagctggacggcctggccaaggggcaggagacagaccaccgggctgggggctacgcccgtgtggtacaagagaaggcccgcaagtccatcgagttcctcgagcagcgattcgagagtcgggactcttgcctgcgagccctgaccagccgtggcaatgaactcgaatccatcgccttccgcagtgaggacatcactggccagctgggtaacaacgatgatctcatcctgtcctgctgcctccactactgcaaagacaaggctaaggacttcatgcccgccagcaaagaggagccaatccggctactgcgggaggtggtgctgttgacggatgaccggaacctgcgtgtgaaggcgctcacaaggaatgttcctgtacgggacatcccagccttcctcacgtgggcccaggtgggctgagggagccacactggggcccccccccccgtggaaccgttcctgaaaggccaccaggcgcccagtgtagcacggaagatgcccacgtgcctgagccaccaatccacccagacaataaaccatcctcttccaacccacgccacggccatgctgtgggggacctgctcctcacagagcccctcccaaggatcgggcggaagctgctgggaccctcctgggctgccaggatttagcagggaggtggctggctacagcaacagcagctgggcaagccagataggccgcccatgctctcagcctttctccctcccccgtctcattccaaggctgagggagggccttctcgcctggggacgcagccactttctccagtggagacagggcaggggttcagagtttccgtcagatgcagtgaaatcacagttccctttcatcttcagaacctctgtcgtgaatgtgttcaagaggctttggttaagtcaggaagaagtgcccagggtgtgtgtccccagtctccctgaggcctggactcgcccatgaacccaagtcggcttctagacagcatgtccctaacagcagccctgggcccccacctcttctaccatccaccccagacttaccacacacccttcctgctgctcctcttcctgcccttatcaacctgggtccctcacacttcgccagttgcgtccccgtggacagtcatgagtctagaggaaaggggcatctggtctcaggcccgtgctctcgggtggcctccacctgctccctttctcctcactggcctttctttccgtctagcttcctcttcaggaaatgtcctgactctcctcagctcccccttcacccctccttgcccgcctaccctccctccagaatagcccctcacccttcttccccttctagttgatccttttcacctccctgatccccttcatttcttcaccgcggttcctcgtcataggggttctcactctgaactttccctctctactacccatggcaggaacctagtacaggtctcccacccagggccttccaccctcggctcctgtgctgggagaaacttccaggcgtggacagcccagcctgaggcattccagtgctggggcaccgtcgcctaacctggtttctagctttgccctcactccccggaaaaactgacactgacacaggggccctttccttgcccctttagctggtacctcagtggggaggcttccttaccaagaatgagttcctgaaacccagggccagagacaaggacaacttaggggaagacggggttttcggtggagccaggggcaaatcttaatgggaccagtgggggataccccagagcccatggcctgactgcacagcctgcctggaggatgggtgcgcagctctgccctccctgaggcccaggactatgccagaagcgatggggtaccgtgtaggggagccaaggccagtagtttgggggtaggagtcccctagagtctcagaagactgggctctttggagtacagggtccccggcctctcctttaagattctctccccagctggaaggccgatgactgggtggtcgggagggagacccagctctcctttctgtcccgtttgcagcactggttttgtttccttaataaatttttagttatgaaacata

SEQ ID NO: 560 - protein, 1407 aa, Homo sapiens; identical to SEQ ID NO: 556

SEQ ID NO: 561 - DNA, 3120 bp, Homo sapiens
ggacattctgcctctcagtttctccatctactaaagagctcagactgtgcacttctcactcccacagtacactttacacagctttgaccatcctccctgctgcttggattgcaaaggacagggtactcttccaaaagacagacaacctttctctctccaaacaggtagaatcctttccaggcctgttaacaccaggtcagagaccccagtagatcacagccttttgcatatcagccagcagttgtccttgtcctagagaaggaactaatagctatgacagacacaatccccaaggaaaccaatttccttctaaatggggcggaaatgaaaactgggagagggctactcctcgttgcttgtgtccatggaataggcaattcccacagaccctgtaaggaagtgctgcaggtggcctcaggatgtccacatccctgggtcctgctgtgccctggaaatccccatctccaggagtcccacatccacacatgtggcttttctccctgtcggccagaaaccatgctttcttagccacgcagcataccatgtagcccgtgctctagcagcagcaacactcctgcccgcctgtctgtgcatgtgtccgtggcacactcctgtcctgggcaggtttcctctgcacacttagcaggggtgccagtgtacctctcatcgtccaggtgaggccaaggacaattgcaagcttttcctctgtcctcttctcactccttagctcccctctcctctccattcagtggcagcagcctcacaccaagaaggaaaatcctggacccattacataattctccatagtgcaagcagtagctggggcgtaaggtcagaggtcatagtggggtcaggtggctgacacacactgtaacgacaaggtggttaaaattagaccacagagaggaaactggcagtcttgtggaaatgcagaagtttcctatgcaagtgagaggctggagatgcagggaggccactgtgcgtgctgcctgccaggctattactcatttcggctctgttctttaatgccttttagcccctgcttctgtatttctagccttcctcatcacatgtttgaatacacgcaatggaaccatgcttacctgccctgggccaagacaagcttcccttctccttcacggaggcaagcccaggaccaggcaccccaagctcaaggggctgaactttttctaagcccttctgggtagccgagaaccttctacatcaacctctcaggtgaaggtggtcaaagtacttagcttgagattccagcctataatggtaacagggccaatggtgagagaaagcagagaacactcctagaccgtgtaggaaagcggggttggctttttggtgaaggtggcagaggatgcagccacagagcacacagttgaccggtgtgtgccgcactttcctgggcagccagcctgcacagcggtgctcatttatttccactgtcttagagaacatgggtcatgcctgcttcatctgctctctgtggtacccagccgagcttccctgggctgtccgtctttactgtgagcctactgtgtgcacagcttgtccttacaattcttgccagtgacgtacgaaaacgatgagatttaggctttgccaccagaggggttgctgtccacatgagagagagaacacctgcacctgtaaaatgatcatcagtagtctccaggttattgcagctgactgcaaaagggtcacagtgctgaagtattttctggaagccctttgtggacaagaagagcctctgctggcattcaagggtggaaagtatgtgtcagtggcacccgtcccagacaccatgggaaaggaaatgggaagccaagagggaacacgactggaagatgaggaggaggatgtggtgattgaagactttgaggaagattcagaggctgaaggcagcggaggcgaggatgacatcagggagcttcgggccaagaagctggctctggccaggaagatagctgagcagcagcgtcgccaggaaaagatccaggctgtcctggaggaccacagtcagatgaggcagatggagctcgaaatcagacctttgttcctcgtaccagacaccaacggcttcattgaccacctggccagtctggcgcggctgctggagagcaggaagtacatcctggtggtgcccctcatcgtgatcaatgagctggacggcctggccaaggggcaggagacagaccaccgggctgggggctacgcccgtgtggtacaagagaaggcccgcaagtccatcgagttcctcgagcagcgattcgagagtcgggactcttgcctgcgagccctgaccagccgtggcaatgaactcgaatccatcgccttccgcagtgaggacatcactggccagctgggtaacaacgatgatctcatcctgtcctgctgcctccactactgcaaagacaaggctaaggacttcatgcccgccagcaaagaggagccaatccggctactgcgggaggtggtgctgttgacggatgaccggaacctgcgtgtgaaggcgctcacaaggaatgttcctgtacgggacatcccagccttcctcacgtgggcccaggtgggctgagggagccacactggggcccccccccccgtggaaccgttcctgaaaggccaccaggcgcccagtgtagcacggaagatgcccacgtgcctgagccaccaatccacccagacaataaaccatcctcttccaacccacgccacggccatgctgtgggggacctgctcctcacagagcccctcccaaggatcgggcggaagctgctgggaccctcctgggctgccaggatttagcagggaggtggctggctacagcaacagcagctgggcaagccagataggccgcccatgctctcagcctttctccctcccccgtctcattccaaggctgagggagggccttctcgcctggggacgcagccactttctccagtgaagactgggctctttggagtacagggtccccggcctctcctttaagattctctccccagctggaaggccgatgactgggtggtcgggagggagacccagctctcctttctgtcccgtttgcagcactggttttgtttccttaataaatttttagttatg

SEQ ID NO: 562 - protein, 326 aa, Homo sapiens
MRFRLCHQRGCCFRENTCTCKMIISSLQVIAADCKRVTVLKYFLEALCGQEEPLLAFKGGKYVSVAPVPDTMGKEMGSQEGTRLEDEEEDVVIEDFEEDSEAEGSGGEDDIRELRAKKLARKIAEQQRRQEKIQAVLEDHSQMRQMELEIRPLFLVPDTNGFIDHLASLARLLESRKYILVVPLIVINELDGLAKGQETDHRAGGYARVVQEKARKSIEFLEQRFESRDSCLRALTSRGNELESIAFRSEDITGQLGNNDDLILSCCLHYCKDKAKDFMPASKEEPIRLLREVVLLTDDRNLRVKALTRNVPVRDIPAFLTWAQVG

SEQ ID NO: 563 - DNA, 2748 bp, Homo sapiens
agcggtcctcagagcccccgcgccctcgccgcctccgcgcctctcggctcagcgccccacgcgcaaggcggagcccccgcccgccgcgctcccggcccgccgccgccgccgccgccgcagccactgcccgctcctgggccgggcctgcccgccccgcctccctctcctcctcctctgcctcctccccgctcggccctcggctccggagcccccgccccttcccccagcagtaggcgctggggccgcggcggaccctcgctgccctacctctctcgcgggttagtgcggggtcgggctcggccagtcctggccagctccgggagagcctggcccgaattcctgcctccaccctctttctcgccgcgaaggtgactgttccttttgccccagccctctcagacccgccccggattcccaggcatcgggagacgcggaaaggagtggggtctggtggaggccccgggcgtatcgctctccaggccgccctccgcgggcctgccccggccaccgctttaacgtcggagagaaggaattggggagaaaggtttaagagcctgcgacttcgttgctgaacttttcccccccaagacaggcttccgaaagctgcgccactggagggatccgggacctcagactactcgggtttggccctggcatgtgtgggagcagtttttattagagagaatgctcaatttgcaagttaatttcaagtctccagccacgtcaggaaaaaaacatgaaggaattaaaggaggccaggccgcgcaaagataacaggcgtccagatctggaaatctataagcctggcctttctcggctaaggaacaagcccaaaatcaaggaaccccctgggagtgaggaattcaaagatgaaattgttaatgaccgagattgctctgctgttgaaaatggtacacagcccgttaaagatgtctgcaaggaactgaacaaccaagagcagaatggtcctatagacccagaaaataatcggggacaagaatcctttcctaggactgctggacaagaggatcgtagtctaaaaattatcaaaagaacaaagaaacccgacctgcagatctatcagcctggacgacgtttgcagactgttagcaaagaatccgccagtcgggtggaggaggaagaagtcctcaaccaggtagaacaactgagagtagaggaagatgagtgtaggggaaatgttgcgaaggaggaagttgcgaataaaccagacagggccgagatagaaaagagcccaggtggtgggagagtaggggctgcaaaaggagaaaaaggaaagaggatgggaaaaggggagggggtgagggaaacccacgacgacccggcccgcgggaggccgggctccgcaaagcgctactcccgctcagacaaacgaaggaatcgctaccgcacgcgcagcaccagctcagctggcagcaacaacagcgctgagggagctggcctgacggataatggatgtcgccgccgccgacaggataggaccaaggagaggccacgactgaagaagcaagtgtctgtgtcctcaaccgattccttagacgaggacagaattgatgagcctgatggattaggacccaggagaagttcagaaaggaagagacatttagaaagaaactggtctggccgtggggagggtgagcagaaaaacagtgctaaagaatatcgaggcactcttcgtgtcactttcgatgcagaagccatgaacaaagagtctcccatggtgaggtcagccagggatgatatggatagaggaaagcctgacaaaggcttgagcagtgggggcaaaggctctgagaagcaggagtccaaaaacccgaaacaagaacttcggggtcgtggtcgtggcattctgattttgcctgcccataccaccctatctgtcaattcagcaggttctccagagtccgcgcctttgggacctcggcctcccaaagtgctgggattacaggtgtgagccaccgcgcccggccgaagatcacattctttaacaaggacctgtccaacatgccctgcccacttctccagactttcttacagaatcaatcatctagccatgccagtctacaatgtaccacttttgagaacatcatatatgttgttccctttgcttaagacacaccaggacgtgactccctctcctctccaaaaccaactgtttcttcaaccctcacttttcaactcaaaggtcttttcctctgagaggatatctctggtgctgcttctgtatatttccacagcatcctagccttccccagtcatggcacttcataattgtctgtgttacccatagaggaaggattatctctgccttgttcacagcttgtgcactgtgctttgtacataaaatgtgcccagtaggtttttgttgaatgaataaatgtatgggtccatgtgtgaggaagtcttcaccatccctcttacgctgtgtcaacctgttgatttataagatgggtttgatggccgagcacggtatctcacgcctgtagtcccagcactttgggagcccgaggtgggcagatcacttgaggtcaggagatcgagaccatcctggtcaacacggtgaaaccccatctctactaaaagaatacaaaaaattagccaggcgtagtggcaggcgcctgtagtcccagctgctcaggaggctgaggcaggagaatggcgtgaacccgggaagcggagcttagagtgagccgagatcgcgccactgcactccagcctgggtgacagagc

SEQ ID NO: 564 - protein, 407 aa, Homo sapiens; identical to SEQ ID NO: 558

SEQ ID NO: 565 - DNA, 4240 bp, Homo sapiens
ggacattctgcctctcagtttctccatctactaaagagctcagactgtgcacttctcactcccacagtacactttacacagctttgaccatcctccctgctgcttggattgcaaaggacagggtactcttccaaaagacagacaacctttctctctccaaacaggtagaatcctttccaggcctgttaacaccaggtcagagaccccagtagatcacagccttttgcatatcagccagcagttgtccttgtcctagagaaggaactaatagctatgacagacacaatccccaaggaaaccaatttccttctaaatggggcggaaatgaaaactgggagagggctactcctcgttgcttgtgtccatggaataggcaattcccacagaccctgtaaggaagtgctgcaggtggcctcaggatgtccacatccctgggtcctgctgtgccctggaaatccccatctccaggagtcccacatccacacatgtggcttttctccctgtcggccagaaaccatgctttcttagccacgcagcataccatgtagcccgtgctctagcagcagcaacactcctgcccgcctgtctgtgcatgtgtccgtggcacactcctgtcctgggcaggtttcctctgcacacttagcaggggtgccagtgtacctctcatcgtccaggtgaggccaaggacaattgcaagcttttcctctgtcctcttctcactccttagctcccctctcctctccattcagtggcagcagcctcacaccaagaaggaaaatcctggacccattacataattctccatagtgcaagcagtagctggggcgtaaggtcagaggtcatagtggggtcaggtggctgacacacactgtaacgacaaggtggttaaaattagaccacagagaggaaactggcagtcttgtggaaatgcagaagtttcctatgcaagtgagaggctggagatgcagggaggccactgtgcgtgctgcctgccaggctattactcatttcggctctgttctttaatgccttttagcccctgcttctgtatttctagccttcctcatcacatgtttgaatacacgcaatggaaccatgcttacctgccctgggccaagacaagcttcccttctccttcacggaggcaagcccaggaccaggcaccccaagctcaaggggctgaactttttctaagcccttctgggtagccgagaaccttctacatcaacctctcaggtgaaggtggtcaaagtacttagcttgagattccagcctataatggtaacagggccaatggtgagagaaagcagagaacactcctagaccgtgtaggaaagcggggttggctttttggtgaaggtggcagaggatgcagccacagagcacacagttgaccggtgtgtgccgcactttcctgggcagccagcctgcacagcggtgctcatttatttccactgtcttagagaacatgggtcatgcctgcttcatctgctctctgtggtacccagccgagcttccctgggctgtccgtctttactgtgagcctactgtgtgcacagcttgtccttacaattcttgccagtgacgtacgaaaacgatgagatttaggctttgccaccagaggggttgctgtccacatgagagagagaacacctgcacctgtaaaatgatcatcagtagtctccaggttattgcagctgactgcaaaagggtcacagtgctgaagtattttctggaagccctttgtggacaagaagagcctctgctggcattcaagggtggaaagtatgtgtcagtggcacccgtcccagacaccatgggaaaggaaatgggaagccaagagggaacacgactggaagatgaggaggaggatgtggtgattgaagactttgaggaagattcagaggctgaaggcagcggaggcgaggatgacatcagggagcttcgggccaagaagctggctctggccaggaagatagctgagcagcagcgtcgccaggaaaagatccaggctgtcctggaggaccacagtcagatgaggcagatggagctcgaaatcagacctttgttcctcgtaccagacaccaacggcttcattgaccacctggccagtctggcgcggctgctggagagcaggaagtacatcctggtggtgcccctcatcgtgatcaatgagctggacggcctggccaaggggcaggagacagaccaccgggctgggggctacgcccgtgtggtacaagagaaggcccgcaagtccatcgagttcctcgagcagcgattcgagagtcgggactcttgcctgcgagccctgaccagccgtggcaatgaactcgaatccatcgccttccgcagtgaggacatcactggccagctgggtaacaacgatgatctcatcctgtcctgctgcctccactactgcaaagacaaggctaaggacttcatgcccgccagcaaagaggagccaatccggctactgcgggaggtggtgctgttgacggatgaccggaacctgcgtgtgaaggcgctcacaaggaatgttcctgtacgggacatcccagccttcctcacgtgggcccaggtgggctgagggagccacactggggcccccccccccgtggaaccgttcctgaaaggccaccaggcgcccagtgtagcacggaagatgcccacgtgcctgagccaccaatccacccagacaataaaccatcctcttccaacccacgccacggccatgctgtgggggacctgctcctcacagagcccctcccaaggatcgggcggaagctgctgggaccctcctgggctgccaggatttagcagggaggtggctggctacagcaacagcagctgggcaagccagataggccgcccatgctctcagcctttctccctcccccgtctcattccaaggctgagggagggccttctcgcctggggacgcagccactttctccagtggagacagggcaggggttcagagtttccgtcagatgcagtgaaatcacagttccctttcatcttcagaacctctgtcgtgaatgtgttcaagaggctttggttaagtcaggaagaagtgcccagggtgtgtgtccccagtctccctgaggcctggactcgcccatgaacccaagtcggcttctagacagcatgtccctaacagcagccctgggcccccacctcttctaccatccaccccagacttaccacacacccttcctgctgctcctcttcctgcccttatcaacctgggtccctcacacttcgccagttgcgtccccgtggacagtcatgagtctagaggaaaggggcatctggtctcaggcccgtgctctcgggtggcctccacctgctccctttctcctcactggcctttctttccgtctagcttcctcttcaggaaatgtcctgactctcctcagctcccccttcacccctccttgcccgcctaccctccctccagaatagcccctcacccttcttccccttctagttgatccttttcacctccctgatccccttcatttcttcaccgcggttcctcgtcataggggttctcactctgaactttccctctctactacccatggcaggaacctagtacaggtctcccacccagggccttccaccctcggctcctgtgctgggagaaacttccaggcgtggacagcccagcctgaggcattccagtgctggggcaccgtcgcctaacctggtttctagctttgccctcactccccggaaaaactgacactgacacaggggccctttccttgcccctttagctggtacctcagtggggaggcttccttaccaagaatgagttcctgaaacccagggccagagacaaggacaacttaggggaagacggggttttcggtggagccaggggcaaatcttaatgggaccagtgggggataccccagagcccatggcctgactgcacagcctgcctggaggatgggtgcgcagctctgccctccctgaggcccaggactatgccagaagcgatggggtaccgtgtaggggagccaaggccagtagtttgggggtaggagtcccctagagtctcagaagactgggctctttggagtacagggtccccggcctctcctttaagattctctccccagctggaaggccgatgactgggtggtcgggagggagacccagctctcctttctgtcccgtttgcagcactggttttgtttccttaataaatttttagttatgaaacata

SEQ ID NO: 566 - protein, 326 aa, Homo sapiens; identical to SEQ ID NO: 562

SEQ ID NO: 567 - DNA, 25646 bp, Mus musculus
gctgttgtcttaaccactgaagcttctctgagaaagctgaaagggagatgccatgggcttctgctgagtgtgagggagggttggctcgtgcaccgtggcgacctgggaagctggaataacatttcctctggtgtaccactgctcttgtccccagaggcagaagccatgttagctgagccggagaagcaagctgagggctccttgactgtgtatgtgatctcggagcactcctcccttcttccccaggtagggtgagcagagccaccagtgacttgccttttctgtcaactcattctctcccaaggccaccttcctgttgctggtgaacatttggattaccttcacccttaagtgcagtgctgtgtgcacgcttgcctctggcccagggcctttttcagagactgtatttcatttgtttgttgactctgcctttcctgcttcatgccgtctcttggtttctagtccagtgttttgcgaaatttaagatttaaatgttgcctggacttggatctactgtgaaggagaaaggaatggaaatatatgagactactcatactagctcagtgttcaggaagaccaagttaatgaagcaaacaccatgaaaaaatgcaggcatcgggacacatgcctgtaaccggggggtggggtggggagtgaggcaagagaatcaggagctcaagttcctgctcagctgcagagctcaaggccagcctgggttatgcgaggccttttctcaacaaaactagcaaaaaaaggagctggagaaacgagtcagtggtaagagctcttgctgttctggcagagaacctgcctgggttcagttcccagcacccacgtggggctcacaacagtctctaactctaattccaggaggtccagtgcccttttcaggactctctgagcaccaaacgtccacatggtacacatacgcatatgtatgcaaatactcatacatataaaataaagtgaaatgagcctttatttatttcttatatctcagtttatgttttgcctgcatgtctatgcagatggaggcatcagatcccctggatctgggggaacagtcagttgagagctgccatctatgtgctaggaagggagtctgggatctctggaagagcagctagtgctcttaacagctgagctatctctccagtcctaactatatctttttttttttggtttttcgagacagggtttctctgtatagccctggctgtcctggaactcacttgcagctagccttgaactcagaaatctacctgcctctgcctcctgagtgctgggattaaaggcgtgcgccaccacacctggccagtcctaactatatctttaaaagcacagcaaaactaacaaaaaatgagagagagagagagagacagagagagacagagagagacagagacagacagagagacagagacacatgactgggcaatggtggcatacgccattaaccccaacactgaggaggcagaggcaggtggatcttttgagttcaaggccagcctggtctacagaatgagttccaggacagccagggatacacagaaaagccttgtcttgggagaaaaaaatgaaaaacagaaaaaaaaaaaaaaagctcactacaagcccagagagtggtgcaaccttttagctgatggtaataggccagattccttaagacaggaaccagaactgggcttatgtaatggtgcatgcttataattccatcatttggaaagctgaggcaggagaatctcaaattttagcctgagttatgtcaagaggctatctcaaaaaaaaaaaaaaaaaaaaaaaaaagaaagaaagaaaaagaaagaaaaagaaagaaaaagaaaagaaggatagagtgcctttatgctttcttcactgagccatggcgctccatccctctgtccccccgcacaggacatgatgagctacattgggcctgagaggacggcagttgtccgggggctgatccacagggaagccttcaacatcatcggccgtcgcatagtccaggtcgcccaggccatgtccttgacggaggatgtgcttgctgctgccttggccgaccacctgcccgaggacaagtggagctctgacaagaggcggccgctcaagtccagcttaggtagggcttgggctttgttttaggaagggagaagacgtgagtccggcggaagatttacttatttatgtgtatgagtgtgttgtctgcgtgcatgcatgtgtacggcatgcatgcttggaggtcagaagagggcgtcagatccccagggactggagtgaagatggttgtgagtcaccatgtgggtgctgggaattgaacctggatcttctgcaagaacaaatactttaaagctctaaaccatctctcctccctctgttttttctttcttttttttttttggtatttcaagacagggtttctctgtgtagccctggctgtactggaactcactttgtagcccaggctggactcgaactcagaaatctgcctgactctgcctcccaagtgctgggattaaaggcatgcgccaccatgcctggcctttttctttttttttttttttgagacagggtttccctgtgtagctctggctgtcctggaacttgctctatagatcaggctaaccttgaatttaagagatttgccaatgtctgcctctggggtgctgggattaaaggcatgcactaccaccaccagctgttttttgttgtttgtttgtttgttttctgaggcagcactagctgccctagaactatgtagattatgctggccttaaactcacagaccctcctgcctgtttctggagtgcaatgattaaaagcaggagttactctgtttggcttctccattttttttcttttttttttctttttttctttttttaaggcagtgtttctctgtgtagccctggctatatcagacctcacttcatagaccaggctgacctctaactcagatctgcctgcctctgcttccctcatgctgggatcagaggtgtgtgccagcactgcctggctccagtttttccttaaggtactcagcagtgttccttatctcactcctgtcctctctttggtccctcagtggcatccctatcccatccagatgacgtgggatgtaggctgcctctttccttgatgtacttctgaattccacgactcctcttttctgtaggctatgaaatcactttcagtttactcaacccagaccccaagtcccacgatgtccactgggacattgagggagctgtccagcgctttgtgcagcctttcctgaatcgcctcagtgttgcgggcaatttctctgtggactctcaggtaagaccaggaatgagttatggagccttttctttttctttctttctttctttctttttttttttttttttttttttttttggtttttcgagacagggtttctctgtgtagcctagatgtcctggaactcactttgtagaccaggttggcctcaaactcagaaatccgcctgcctctgcctcctgagtgctgggattaaaggcgtgcaccaccaatgcccagcacggagcctttttaaagtctatacatgtttagtgtttatatgggcatctgctctccttctctcagagcgtgatgatttgcttgtgtagctgtgtgtagggcagtgtcgtgtgagcaggtacggggatgtagcttgtaggaagcactgtgtgcacctgtttatgtccgtcagtccactgctcccttgagggcatgttccggtgtcctttccttggtgtccagctcagggagtgtcaccagagtggcttggcagagctacttcccaagtactaactcaggagttgtacctacatgttaaagccatcagccacccttaaggaagttatttttaaaaagctttctgaaatatgtgaacactgtaacgatagagccataaagcgccctgcttgctttcagtgtcacatcctgtccctgtagggaaagcgtgggggacttgatcagaccctgcaggtggcaaggaaccaatggtctgaaaagcagactcaattgggtcttgtggacccagtctttgtttgttcccctctttgactttctgggaacctggtaaaataatgtggttttctaagtatgtatttaatacattagttttaccttgattctgttatttcctttcatacatgcactttgcttgagccttgtctttgtcctgagtgtatcttcacacagtccctgcactcttagagacagtagcctctaagtccgtgtatgggatggcctgtcccccttctctccacagatcctatactatgccatgctcggcgtgaacccccgctttgacccagcctcatccagctactccttggctatgcacagcctgccccacgtcatcaacccagtggagtcccgactcggtgagctcctgagaggcctctgtcaggccagcgtggggttggggacggctgggtgctttgatggtttcgggtttggatgggactgggaaggtttagtgtctctgtctctcactctgtctctctctctgtctctctctgtctctccctgtctctctctctctctctctccctttctctccctcccttccctctcccttctccccctcccctgctcctccccctccctctccctctcttacctttcctttggttgtttgaggcaaactctcatatacctcagaaaggtagaaactttattttgttccggtttttgagacaggatctcatgtatcctaggctggctttaagcttcctgtgtagccaaggctggccttgaactcctgaccctcctgtgctgcctcccagtgctgagattataggcatgtgccgctatacctaatttaaaaaaaaaacacaaccctaatttttcttccctggtactagggatcagactcagggtcttgtgcatagcaggcaagtgtcactgggctactgctgcagctgcggcctttgaaagcagaaatgagttttctcttcttagaatttcttttttttttttaagatttatttatttatttatttatttatttatttattgtatgagtgcactgtatctatcttcagacacaccagaagagggcatcagatctcattacagatggttgtgagccaccatgtggttgctgggaattgaactcaggacctctggaagagcagtgagtgcttttaaccactgagccatctctccagccagttttctttttttctttttaaattatgtgtttatttttattccatgtgtgctgatgtttgcctgcatgtatgtctgtgcgagggtataggatgccctgggactggagtacagacagttgtgagctactatgtaggtgctgggaattgaacctgggttttctggaagagcagccctgtgctcttaactgctgagacatctttccaactccttgatttttcttttaacacttatttattcatttattttctttatccattcatttattcatctagtgggtattgtggggcctgctgtgctatgcacgtggccgtcagtgtagcacctgggagagtctgttgtcttctctctccgttatgtagatcatggggatcacatgcaggtaggtcatcgggcttggtggcagcacctttacccactgagccatctcagcagcccaaagggcagaacttgaatggacagttatgctccttgacctgggtgaacctagaagcaaggattataatccttcatctggagggaaggagcctagcgggagtgtggccaagagctgaactgggttctcctggccggtgagaggctgcgcctggattgcgatgctgagcctggaatcccccatctggtgttctgactccctctttgtccgcagggtccagcgctgcctccctgtaccctgtactccactttctgctctatgtgcctgagcttgcccactccccgctgtacattcaggacaaggacggagctccagtggccaccaatgccttccacagtccccgctggggtggcattatggtaatagtcaccctatgcaggcctcagaatccatatttattgcaagaaaactcctgttaagattatcggggtgggggtaggggtggcatctgttcccctgtggggaggagcatataccagggaggtgacagggctgtgctgtcctcctttgccagctcagctgtcaattttgttaatgctttttgtactctgaccctttggacttaccggcttgcactatagcttttagcttccctggagtacttcatgcttttacactctgggccatggctaggaatcctaaaacaggatgaccgtttgggatttcatcagacgtttgagggagcagttagaatggtgtacttaaagcttctttagtacttacgtacctaggtactcaaaaggaaaaaaagcagtttcctatgcccctgggattaataccagaagccgaacctgcctcttctgccatggcctctgggtcctaagcagagatgggcatggttctgtgtggtattgaggtaacctcattccccattttcaggtatacaatgttgatccgaagatctataatgcttctgagctgccagtgagggttgaggtggacatggtgcgggtgatggaggtattcctggctcagctgaggtaaactcctgcatgatccccttggggctgtggctacagacagtgcggccatagtctttgagtatagaccagtggcagggcaaaatgaactctcacctggcagagcgctgtaactctgcctaggtccccagtgagaccaaggaaagtgtctaagtggtcctctcctaaggaggataagcagctgcagaactcagagaaacaggagccagctctcaggtgtgcttacggtgagggggttgttttgttatcttagttttctttttgagacagggtttcactgtataaccctggttggcctagaacttgctatgtagaccaggctggccttgaactcaaagagatctgcctgactctgcctcacaagtgctagattaaaggcgtataccctcttacctggtcttgtttttttcatttttaaattttttattttattttttactttatgtgtatggatggtttgcctgcatgtatgcctggtgcccacagagaccagaagagggctttggatcccctggaactagagttacagatggttgtgagccatcaagtggatgatggaaacccaattcctctggaagaacaactagtgctcttaccactaagccatccttccagcttttttccttttttctctcttctcttctcttctcttctcttctcttctcttctcttctttctttctttctttctttcaagaaaatagctatttattctgtgctaacccctgagttaaggggtcacctgacactatgttgaagatgctaaggaggtgcctgggctaactaggagtgtattctgatgattagcagtaccttcaagcacacacaccttgtcaaaggggaactatcatgccagttccacggagcccatttgctcaaagaaaggatgcagagaggggactaaactaagttggggctcccagaaacacttcaaccacagctccttcttcagagatcttggaactccagcatgaaaatggggaagccttggtcaaggcgggttttggacctgcgtcatttgctgctcatctctctgctccctcactccccacccccactcagtaaaactgagaacacctgtctgcagcgaccttggtcttcctgtgccccccacaggctgctctttggaattgctcagccccaggtgcctcccaaatgcctgctctcaggaccaaagagtgaaggactcatgacctgggagctggaccgattgctctgggctcgctccgtggagaacctggccacggccaccaccaccctcacctccctggcccagcttctggggaagatcagcaacattgtcatcaaggatgatgtggcttctgaggtaaatgtgccaggaaggggtgggccagggtgtgtgggggcatgccatccttaaataaatatctcaggcttcctctggaagccattccagctcctagtgggagtctaggtggggacaaatgaaagtttcaagctgcccctcagaaaataaacaacagctgtgtcttgttttgttttttaaactaacttccacacacctctgtggactctaggaaacttcagagggtactaaaaggccaggcccttctccctgccccacgtctaggacatactgctaaccccatccctcaccctcctaggtatatagggctgtggctgccgtccagaaggcagcaaaggccttagcccttgggcacctgtcgtccgcctttgctgccagccaggaagccgtgacctcctccgagcgcgccttttttgacccctccctcctccacctcttgtatttccccgacgaccagaagtttgctatctacattcccctcttcctgcccatggctgtgcccatcctcctgtccctggttaagatctttcaggaaactcgcaagtcctggaaaaagcctgagaagatagactgatccgggcagcatgtcagagggagccctcctctctagccacgctgggagggtgttgggccaagagaccaaggcaaggtctgctggtgatgacatgtcttcactctcgcccgtgggctctctacggatggcactccacgatgggctcccttcccctcctagtccactggcttgctcctccatgcctacaagcctcagaaggtacccttcctgatctccatatctggctcgaacttgaaagcctttgtgtgcctacctctggacaggggtactttgtccttgcagcctgtcagcacagcatacaaacgcactgagaggtgaatttaggggagtacttgagttgaattgtagccctgtcctctccacttctgagaccacctccctccttcctcagcttcttgactggcgtcacccactggggacagcctggtctaggaggcagtggcttaggatcttctaccttgtggctaaggttcccctctaccctttcagagaggtagtgtggaacaggagaaaacatttctgacttggaacccaacaggcctgaatcagactccggcttctgcacttaacagactagagagcatcagctaagccgctcctcgctcctcacctgagcctcaggtttccattggtgggaaagcactgatgatgtcaccctcagaaaggggctggattaaatgtgataagcctgtaaaagtgttctgtatattgggctctttaaaaacatacattagactgttattaaacgttggttgaatatgagttgatatggatgaccataactcgttcttgtgtgagaagcagactgacctgttctagctcaccatgtgttcttcctgcctcccgtcctgagcatcctggggacggctcgacacctgggctgtgctgcctgcatgttgtagggtgcctgcggattgtagggtgcctgaagcagcttttagcaggagttctagtggggagtagcttgagccagtgacagccctgggatagcaactcaattcaacaaaggaaaatactgggtgggtactggctgcaaggagctgtgtggtagtgctagggtgttacgaggaacagtgtatagagcatctctgctttcatagagctgacctttgaggaggaagggtcagggaacaagcaagaatttcacttaatgtattacaaaaaaaaaagggctggttagctggaaattgagaagaagtactttagaactgggtgggttgagacctgggctgaagtcaggacaaaggtatcagggaaagaccttgaggttggaacccaggagagaaagaggagaggtattcggtaactacattgtcaaaaagaatctacattgtcaaaaagttcacaaggacccccaggattctggctcccccgctggagacgccaggcggtgggcggggtatgtgtgacccgcctcccgtgggcgtgaccaaggcgggacggcacctggggcccggccgggggtggggcggcggacgctcccccttcccctggctccagccggcgcaagcagcggcggcggtggcagcgggcgaggatctgcggccccgcgaggccatgaaggtgaagaaaggcggcggcgggaccgggtcgggggcggagcccgttccaggggcctcgaaccggagcgcggagcccacgcgggagcctggggcggaagctgagtccgggtccgagtcggagccggagccaggcccggggcccaggctggggccgctgcagggcaagcagcccatcgggccggaggatgtgctggggctgcagcggatcacgggtggtgagcaccggcgagggagcgccacccgcgggctggagggagagcgcgggagggggcccacgaggctcagagtccagcccccacccctcccccacgcagtgcccctcctctgtatccccttactctctctctctttgcctccaagcctgaaatctctgtgctctttcccttggtctcttgatgcgccccctcctctccttgaagtggcttcttttcaccccactccttctttttcaaggggcccaccccttttcccatggtggaggtggggcagcagctgcatctgtaaccctttccccagtggagtcttcggaaccctttgagggtgctcgcacagaggagtgtgcctcattgcaggctgtcttcagtggccacatcaggctaggtggaggcaaggaaaaccttcaggctccctgaccgaccgttatagccctcactctgcttccccgaggaaggctgaggccatactctgcccaggaacattgctgatacgggtgcttccgtctgttggctgtgggccctgtgatggaagcaagtgcgtgacccccctccccccaagtcaggacttgttctttttccagggctctctcatcaagggaaggctagtctccactgaaactgagtttctgagctgtgctacctggattagagtcccagagtttgcccggaaattggctgtgtgaccttggggatgtaatttcatttgcaggagcatgtttgcttttttttttttttttttttttttttcccatctgtaaaatgggaacaagaacaatgttacctccctcaaggttattgtgaaaaataaagccagtcttctgattttggacaatgtttggcatgctgtgcacgctgtcaacagggttcctttatcaacagtgttggaagctacataggactgttcagagtggctgcctgcaggcagataagtgatcgttcagggccaaggcaggcaccgctacagacagtgcacaaggactagagagtcttctggcaaaaggttggctgagccttgaggaatggaaggtatttggagagacagtggcgggttgccttggaatgggtaggtcaccagcaacctgctccggctccacttgtgagcttagacttcccttctctgggatggacacgggtgctagtgtggaaataaacccgctagcctcaggagcagcagagcccagggctcccagacagctgtggaggggaccaggatgacaggcctgagcttgtgcatctgggtccccaggggcctccctcctccttccagggctagacagcggcattcttggctagacttccccagcacttgcttccttggccaggcagccctcagtggagggaggggccttgaccaggctgatgtggaagcccgtgggctgctgccttttgcaacaggagaccttacagcttagcttggccctgtgcgttggagggcaggttcactggcctctggcctggataactggaggcttattttgcaatggaggaagcttccaggtgaagtcacagcatgtgtctcccagtctggaggaaatggcatagcatgtggaggatgagttaagacaagtgcctctttaagagcccttttctgtgcaggatttgaaaacagggttccaggcctctccaccttgcctgcatcttgtgaccctaatcacacagggctgaggtttgctgtttctggattaccaggccttgaatccagattaggaagctatttctgtccacaaggacgagagcaggtgggttctgagccactctgctcattactctggcctgaccttgggtcctaggcctcgtctttttcttggctgaggagaggaagtggctgccttcctaggcagcccctgatcctcgctccttgtaagggcagagaggcccacaagttgagtttgcagtgtaagagactgagtgcagagtgtgagaaatccttcccagtgagaggagagggttccaggctgggcctgctgtaagaaaggaggcttttcctgggagttgggcaactaggcctctgcttccagttctgcccccccttctccctctgccctgcagcatctttctatagctttatctcagacctcagctccaacgagctagagagctgtcaggagggcttcctggagggggctgtccccggcttggggaggagacaggccgaaggatgagagaatagctttatattcacttcctttttcaaccacagagggatagggggtggcccagggacctgggggtgacttccgggcctctgtaggtcagcggagaggatgtggtaccggaggctggcagtacccaagtctccacagcaattttctgccccttcctaattcttgccagggcctcccctaagacttggtgtaaggttttaggaagcaggaagatcgggagttcaaggccagcatctgccacatagtgaatttgaggttagcctaggctacatggaaccctgacttaaaaacagcaacagaagagtggtaacggttaagaccatgagcgcccctgggcaatgcttggctctcttggtttccttctgagcccaggactcttcttgcctcctctttaccctgctgtacctgctgtgtccaccacaccctttctgccttggcctctgttcttttctctaaagaccagaaaacacttttattcctgaatatggcgcagggccaaagctggaaatatgacctctaagggttccctctatttgctaagacttcctcccattgggagatcagcagaggatctgttgagcaaagtcggccccttctgtcccagtagcctgggcttcctggcttgagttagcagagctcccataagctgcttaagagagctgggctagcataagctgcttacggtgggaggaggggccaggggcaagagaacagggaaggggtaccaacctgcccccatacagtccatgcaaagagaagtcctctcaagaccagccttgcctgatgaatgtagatgtcatgccacagggtgtgtgtggtgggagtggggcgcactcaagggaaaactgtaactctcctcccccaagaggcagagctccctgctcccttgagagtgaagtccctctcaggctgggagcttccagtaggcaggaggtctagttgtccaaaggatgcacgccaccttcacaaagcagaggttgaagttaaggattgccaagagggtgggagggttggtatggtggaggtgacttcccttgcctgatcctgtgaggaggcacctggatggggccgttcatctctgatgaggtccccatgacaacatgctgtcccctgcactgtaggtacttttcaagataggggcacagttctctttctggagggaagtggtcagagggatcattggagcgggccacggggtcccactgaaactgaagtgacaatgggcgttttggggtccctgtgtgctcagctgcttgtctcccgtagactacctgtgctcccctgaggaaaatatctacaagattgacttcgtcaggttcaagatccgtgacatggactcagggactgtcctttttgaaatcaagaagccccctgtttcgggtgagtgggattggtacaccgttgagaggatgaggtgggcaggcgcagtggagtgggctgtctaggttctttgagccacaggaaggtcagagcagagtccaggcttggactctagcatactcaggtgtctgtgcacagacaggcctcttctttttctgtcactgtttctcagggtggacatcttgtgagccctgtcctgtttaagtactggtcagcctgccctctgctggcctacctaggaactgcaattccctaagacctcccataatcctatgcacatctcagggaaccccagaaaattggtgactttgttgacctagaaccctgtaggtaccactcttctacaaaagtgtaccagaaccttctgcagagtttagaaaagtttaaacagaggtccctgggggagggcggagtaggcaaaggccccagcctgaagcccactgagcccagctgggtacattgcagaacggttgcccatcaaccggcgggacctggaccccaatgcagggcgctttgttcgctaccagttcacacctgccttcctccgcctaaggcaggtgggagccacgtgagtcactgggctggggtgagggctggggggggggcgagtgtgagggtgggaacagcccttccagagcctctcggtagtggtctgcctggagccttggaacctggagtcccttggctggctgactggctggctggctggttggcgtggtggctactctcagccctgcccacttctcttaactcagggtggagttcacagtgggagacaagccggtcaacaacttccgcatgatcgagaggcactactttcgaaaccagctcctcaaaagcttcgacttccactttggcttctgcatccccagcagcaagaacacctgtgagcacatctatgacttccctcctctctccgaggagctaagtgagtgggggatgtgtagaacccaagctgctcaggggcagggagggggccacgggtggggtgggggtggtacctatgcatctgaccccccccctcgcacctatcctggatcactttcctacccggcaccaggagggaaacaggctcagagaggctcaggagctctctgaagtggttcctctgtccctgcctccctctctcccagttctgaagtccctacagggtctggctcagggtcctgacctttgccctggatgggcctctcttgcagtcagtgagatgattcgtcacccgtatgagacccagtctgacagcttctacttcgtggatgaccggctggtgatgcataacaaagcagactattcctacagtgggacaccctgacccctaatgctgcccctgaggctctggcctagaccctgtgctgtaacctctccgacatcatctccacttggggatggatccggtggctctggaccctgagtcagtctcgagaggaaaggtgtccagcatccctaggcaaacctctggagctagtgggaggggcagcagggggaggctggctgtccccatgttcaggaaggcctcctgcaagaggaggactcctggatgcctcgctaggtccactgggcctgagtttcagagtagtgcccccttcttgaccgtgactagatcaggttagggaccatttcctgtcccttgcccaccacctccaggctatttatagttgtcggttcacagacaaagatccacagtgggtaccctgctctgagccctggcctcctccatcaggggccaagaaactacccgaggtgtgagaggggcgggtccagatcgcagcctgtaagacctggacaaactgtatatagttttcaataaaccttttctgttcttgggtgcggccagcctgtgtgtctatagggaaggtaaggggtggagtggagtgagaggggtttgtcttagttgctttttatcatgacgaaagtacatgagaaaatcaacttaaaagaggcaagattttcccttcagttcagaggtttcagtccatggccaccgagtgggcctctggtgaggcagagcatcatgggaaagtgtgcagaggtagaaactgctcacctggaagcagaagtggggggggtgtattaagggggggagagggagaggaacaagatactccttgcaaacatttgttcgtctccctcatccaagccctcatggtcacctcagtattgccactggctggggacctaagcctttggggcaatgcttatgtccagccatactgatcaagagaataaaaccccccatgtcccagggcctctggccagtggcttttcctggcctcagattctcaacatctaagtgagtatttagggcatggttcaagataggactcctcctatgatggagacccagggtctgggacgggaagctttggtataaaggtaatggcttggcagagcagaggctgcagcaaagaccatcagctcaggatggggaaggaagagatacagggaggtggctttgtttttcacttcctctgacccccagaggccactcctaagtgtgctctcagccctcatcagagaagggcaaggactttggccaggcctagagccatctccctgcacttagctgccttgcaacacccttagcctggccagtcctgtgcatagtacttatgttagcctctaacccctcccaggcccctcttttagtggagggaattcaagaactgaaggaggaaaaagaggaggaggaggaagaagagggggaagagggggaggaggctagcttagggttagcagcctgatgttgcaggttctcttttccacatacttaatgctagccttccctccagactgagcaaccccagccctgagaggcccagaatgccaggctgtggagctctggctcagggccaggatctctactgaactttgggaattctatttgtatgtgtatgtttctccatgtgtaggcgggatgcgtgtctgtaaaggacaaaggtcaaccaacactttatgtcttcctcagtcattctttacctgactctgcccccccagaccccacccccacccccaactcaccactctagaattacagatgcactctacattacctagcacctacatggcagcttacaaactgcctgactccatttccagagcatccaatgttctctgggatacacatgcagacaaaaacacccatacacattacataaataagttaaaaaacaaacaaacaaacaaacaaaaaacccaacaacttgggtcctcttgcttgagtggcaaacactgtactgactgagctgtctccagacccttccactgagaccctgagaactattttgtatgcatatatgtgttgtgtgtgttcatatgtgggtatgtgatatgcatgtgtgtggaagacagaggctgacaacaggtgtcttcctcagttgctttccactttccttactgaatgagggcctctgggtgagccaagagcttgctgatttgactatctatctagccagcttgccttggagaccccctgtctccatgtcccacaaagtgggaggctgatgcttagcttttgttttgtgttttttttttttttaaagacagggtttccctgtgtagccctggctgtcctggaactcactctgtagaccaggctggtctcgaactcagaaatccgcctgcctttgcctcccaagtactgggattaaaggcatgcgtcaacactgcccggccagtgtactgtttttaaagaataaataactctttaaaaaataaaaataaaaaatcacagaaagaggaatgtggtttcattttcatccatggctggggatgtggggctgcttcagcttgtcggtagcggctgactaggatttgcctcctgctctaataggcctgtggttttgccagccgcagatagtttctcaattgtgtgacatttgaattcaggggactttgtagggtatataaatggtagggccccaagaggtggggtgggttgttggttggttggttgctgttggttgtggtgtgttaagtagttgtgcacaaagaagaaacaacaagaagaaactagatgtcctgacagtaggcgaggatcaaacttgccccaaggaactagacgaatcattagaaagtggtctagcaatgacatggcccctctccagtccctgactgtactcaggggtctcttttctctccatcccttttccctctctctctttttttaaatatatatttatttattatatgtaagtacactgtagctgtcttcagacaccccggaagagggcatcagatctcattacggatggttgtgagccaccatgtggtttctgggatttgaactcgggacctctggaagagcagtcagtgctcttaaccactgagccatctctccagcccccttttccctctcttatctagtgttgagggattgaaagcatggaagaaaaggggtggagaaggggagaagaaagaagaacccacagagtagcaaagatcagcaacagggaaggggatagataccaaatgaagtcactgtcccttgtcccctaactgaggtctctaaatgaaagtgagaccctgggtatcctggtcctggctagatttatgtcagcctgacacaagctagaaccatgtgaaaagagggaagctcaattgagaaaatgcctccgtaagatctggctgtagacattttcttaattagtgatgggtggggaagggcccagcccattgtgagtagtgcaatacctgaactggtggtcctgggttctatgaggaagaaagctgagcaagccatggggaacaagccagtaagcagcatccctccatggcctctgcatcagctcctagtctccaggttcctgccctgttttgagttcctgttcggtgtggaagtgtaagactcagataaaccctctcctctccaagttgctttgaccatggtgtttcatcacagcgttaataactctacctaggacactggcaggggtcaggattgagaacagagtaggaagggaactcaccgtggggagagtagctgcctgatttgagttggacccagagccttgggtatcctgggcaagtgctccaccactgagctgtatcttcagagggaggtgtggcacatggaatccagatctcagaaacccttagtggctacaaaagtcccggcgaaggcatgtggcaagaatctacaattagtctgggcatggtggcatatacctttaatcccaacactcaggaagtcagccagagctacaaaaacacaacaaaacaaaacaacaacgacaaaagcaaactgtaatttatgtggaggggtttttgtcaatgaggtggcacaggtacacaaacttgtccttgtggtcattttagtttgtggggctgcaagtcttccgaaaatcacagcgaggcgggactttatatacttgggtcagatagaagacctcctccctggtatgaatgatagtaaaggacacctccaaccccctagcctcctcaaccctcccacatgcctcccatcccccaacccgagctgcacaccccaggggaggcaagtaatggggggggggggcttgcacttctgtgttcagaccacaagggagctctatattctgcacacttcatcccggtagctgggttccttccaggttgcctctttccatcccttgggcctggaggagggaaggctggaaggaagaaagagggcgggggagagaggaaaggaagaaaggaagaaaggaaggaaggaagggaggaagggaggaaggaaggaagaagagaagataagagaaaaggaagagaagagaagagaaaaggaagagaagagaaaaggaagagaagagaaaaggaagagaggaaggaaggaagaaagggggagggagggcagttaggcaggccttggctgctttctcctgtagtcttcatactgtagactctcaccctggttgggctgccagtgatgtgacctgctgctgagtcttgtggccccaccccctggaaagaggaaggaagtgaggagtttagagctgttgagttgttcattttgaagggacagtactcagagtctccccagctcacaggtaatctcacggaagtgaaccagtcctctttagttttgagtctttagggatgtgatgaggattctactactggacagagcaggaaacccagacattgcagggaacctcacactagtcacccacctgggctggcttcagggtttatgttgggactgccagcccaggtgttagaacatggagacggcttatccagcaggtgaagaacagatgtcctgaggctccactgctgccccccaacctagcctctccccaagtgtcaccgtccctaaccaccaccttgtagctcctaaaacctcttatgctttgtttatttaaacacacacacagaaacacagacatagatagatatcgtgaactcacagagatcctcctgcctctgcttcctgagtgctgggattaaaggcatacacagcaacacctggcttatttaaaatattctatattgtaattttattttacattatatgagtatatactgagggcatcagatccctggaactggagttatgaacagctgtgagctaccatgtagacgctggaatctaaacccagattctctgcaagagcaactgatgttcccaactgttgagacatctctactatttaatgtattgtggacccctttgttatcatatgttaaagactctgggctatatggatttatttttaaccagcatacatgttacaatcctacaagtgttttttttaaatatttatttattttatgtatatgagtacactgtagctgtcttcagacacaccagaagagggcatcagatcccattacagatggttgtgagccaccatgtggttgctgggaattgaactcaggacctctggaagagcagtcagtgctcttaaccactgtgctatctctccagcacccaaatgtttgttttttttgttttttttttttatatttatttatttattcatatgtaagtacactttagctgtcttcagacactccagaagagggagtcagatttcgttacagatggttgtgagccaccatgtggttgctgggatttgaactcgggacctttggaagagcagtcggcactcttaaccactgagccatctcaccagccccaaatgtttgtttttaaaatgacatgtttgtgtgtgtgttacaatgcttataatattttatgaagatatatgattctttttttatccttttttctttttgtagaactggaacttggaatccaggtcttcacaagcacgaggcaaaaactcaaccattgtcttccagccctggctgtcctggaactactctctctggagaccaggttggccttgaattcagagatccacctgcctctgcctcctgagtgctgggatttgggctctcttctgttttaagagacagcatctcattatggcagccaggctggctttgaaatcctagctcaagtcaccatcctccttcagcctctgagtgcccgggtgagcctgcagtagctcatcgggcatggcttctttggtaaagtctaagcttgcaatctgtcatcagctttgctaagtttcaagtaaagatcaaaacgatgaaactttgtgtctgtatgagtgtgaatgcggtgtgctgtgtgtaattgcttatgtgtggatgtatgtgcctatacacacacacatgccagagggccctgctttttgtcttactcctttgagactgatcagagccattgggcagtaagcccgacgatcctctgtctctgtcccttatctcctattgctagacggtcaggcacgtgtggctttttgtgtgggtgctgggatctgaagtcatctccaatgctcttacccactggctcatctttccagcccttgatgatgtatatttttttcttccaagcttatgggcctttgaattattttcttgaactggctatgtagctgaaacttgacctcatggggctggagagatggctcagcggttaagagcactgactgttcttccagagatcctgaattcaattccaagcaaccacatggtggatcacaaccatctgtaatgggatccaatgccctcttctggtgtgtctgaaacagctacagtgtactcacactcataaaatatacttacatacataaaataaatacatctttaaaaaaaaaagaaaagaaacttgacctcatgctcccaattctcctgcatccacactccaagagcctagattacacatgtgcacttctatgacccagtagtttgagaatttttgtggaatccctaaacaaaagggctaattcctccccaaaagtaaaggatttacaaattctctggccagtcccagcttaaccagggtctggccagcagggggcagcataggagcaagcgtgtgggctttgttttcaaaatggagttggtccagttttaaaatctgatgtgcaatctagggacaattatacccaaaatccgatctgtttgccacccactgtccttgctcaggcagccagctcacacatgacgtgcccatagggacagatttgatggaaggcctcctggagattccttgtctcctagtttaaggtatattggggtagtgggatgcttgtctgcgcctctaggtcccaagtgtcaagaacaaaggaggtgggtccaagaacagttttaggaatcacttgtcctgtgcctgagggcctgagtgtcaagatgcatgccagccctggccaaagctggcaccacacactctgggatttggcagacaactgtatccctctcccagtgaggcaaacagtttgttttttggggtgtgccagctggccatgcctctcccatgtcctaccctaccccatcccagctccttcctagagccttaggagggaggtaggcactaatgtggggtgagcttctgctctgggattctttgtagagccctgtaggtgttggctgggctctgggcctgacccctagactaacttaagtcaaagacccacatgtgactgatctagactcatgtgtgtgcttctggaggggggagctatagagctgccccttactcttacagtcaccgctacctatggggtgggctggaaggactcctgaccttcctgagttcatcttccaccagcagcagcacaggcagcatcaagttatgccccatcttgtcacccatggaacccagggccccaaacagacttagcatctctcccaggtagtgacaagaagatacaccctagaaagggaagtggccctttcttttctttaaaagaaagaaagaaagaaagaaagaaagaaagaaagaaagaaaggaaggaaggaaggaaggaaggaagaaaggaagaaaggaagaaaggaagaaaggaagaaaggaagaaagaaatgtatgcctacatgagagtgcagagcccttagaggccagagggcagaagcatcaggtctcctggacctggaattacagaggttataaggtgctgggaatggaactcaggccccctggaagagcagtgagtgctcttaaccactgagtcatctctccagccacaacagtgaccctgtcttgtgcgatttgggtcagtcacggcagcatcggacaggtgtcagaagaagagtcattgaaagaagtcagctcctttctctggacagctaagcccagatccccatttttcaagttcctctgagaagaggccttgcctggctgctcactctgcttggtctagagcagtggttctcaaccttcctaatgttgtgactccccccccaccccaccccccatgtagctcctcgtgctgtggtgacccctgactgtaaaattacttcattgctatttcataatggtaattttactactgttatgaaccaaaatataaatatcatctgctatggagtctatgatatatgactcatgtgaaagggccatttgatttggcccaaaggggcttcaacccacaagttgaggaccactggtctagatgccttactaaggtaggagagatgctcagacagttaagagtgcttgctgctctgctagagatcctaagtttggttcccagcatccacccagaggctcacaactgcttgtaactccagctccagggaatctgatgccttttggggggcagcacacatatgcacaaacatacacagcacacattttccaatgcacacacacccactccatatatatgatctatctatagctacatctacatctatatctttagagtccttgtagacaccctgcttggggactgaaggtcccaaaaaacgaaggctcagtagttgcaaccatcaggcgcttactttattgttccaggacaggggacaatggtagatgactgagggatccgcccaccctcgtgtgagcttggggacaacctatggaggttctggttgccctcaggccctgggaaagctggggatcccatttggtgggtcatggtgggcatctgagtcacagctcagctccacggacattctgccggctccctgggagccccaagtctgctatgcaggtgtgtgtatgtgtgtgtgtgtgtgggggggtatcacacacacacacacacacacacacacacacatcatcctgtagcgggttgcaaaccctagttactcaggatgcttaagacagttgaccgcatccaataggctggggcttgaactatatgaacctctcattgagaaagagtgagacttggcaacctgaagggggcctttcctgtggctgagactaagagagggggttcaagtttctgaggacaagtttttttttttttttccaaacatgttgtgttggatttgggctcagtttggtcccagggtagatgctgccccttctgtgtgtcaccttggagatggccaaccagagtatatactgaagatgtatagataaattctatgaagtagttgtctccctaaggggttcacaggtcatacgggaggagcccctgtaggctttaagggtgtaagatgggagaataaatagagatttctgggagagggccaagtctgtagagcacatggggattgggatgaggtttggaggggtgatctttgacctgtcacactggccctgagctttgctaactaaagcttttagctctcagctgccccagaaatcaaatcagactctgtgacccaaggcttcctctgagtgtaaggcacatgatgagcaggtgtgtagagcttgagttcacgctcgagagctgaagttcgagtgagctggcgctagggggcgcgctgttgcttcttttccgacactttccttgctgggggccccgtgtgagatgcgggtccaccaggtagcatcctagatggatgcccccaacttctggctaacaaataagttggctgagtggcataggagacaggtagtgttttccttctttgacctttaaggtgagcccaatatggggcagccagctaggcaaaggccgcagctgatgttgggcatagctcaagccagagccaatggctttgagccgggactgaggtacacggcagggccggcagctgctgaggagggcgtggactccagttccacaaaggcggagtagagagtgctgaggtgcatgtctcccagagcaccggagccgccgctgcctggaggtgccagttcacctgcctcattgcctgtttctgccagacaaggccctggggggaagcaatgggctgctggtgggggtggcaacatggaggatgacgtcggcgacgaggtcaccaatacgagggggtccagggccaagctgtcatccttcagctgctcccacagatttcctagtcggggagagggaagaagcctcatcattggcaggccatagagagttaagcccagtctgtctcccacccaagtacctcagaagcc

SEQ ID NO: 568 - DNA, 1231 bp, Mus musculus
tggcagcgggcgaggatctgcggccccgcgaggccatgaaggtgaagaaaggcggcggcgggaccgggtcgggggcggagcccgttccaggggcctcgaaccggagcgcggagcccacgcgggagcctggggcggaagctgagtccgggtccgagtcggagccggagccaggcccggggcccaggctggggccgctgcagggcaagcagcccatcgggccggaggatgtgctggggctgcagcggatcacgggtgactacctgtgctcccctgaggaaaatatctacaagattgacttcgtcaggttcaagatccgtgacatggactcagggactgtcctttttgaaatcaagaagccccctgtttcggaacggttgcccatcaaccggcgggacctggaccccaatgcagggcgctttgttcgctaccagttcacacctgccttcctccgcctaaggcaggtgggagccacggtggagttcacagtgggagacaagccggtcaacaacttccgcatgatcgagaggcactactttcgaaaccagctcctcaaaagcttcgacttccactttggcttctgcatccccagcagcaagaacaccttcagtgagatgattcgtcacccgtatgagacccagtctgacagcttctacttcgtggatgaccggctggtgatgcataacaaagcagactattcctacagtgggacaccctgacccctaatgctgcccctgaggctctggcctagaccctgtgctgtaacctctccgacatcatctccacttggggatggatccggtggctctggaccctgagtcagtctcgagaggaaaggtgtccagcatccctaggcaaacctctggagctagtgggaggggcagcagggggaggctggctgtccccatgttcaggaaggcctcctgcaagaggaggactcctggatgcctcgctaggtccactgggcctgagtttcagagtagtgcccccttcttgaccgtgactagatcaggttagggaccatttcctgtcccttgcccaccacctccaggctatttatagttgtcggttcacagacaaagatccacagtgggtaccctgctctgagccctggcctcctccatcaggggccaagaaactacccgaggtgtgagaggggcgggtccagatcgcagcctgtaagacctggacaaactgtatatagttttcaataaaccttttctgttcttgggtg

SEQ ID NO: 569 - protein, 222 aa, Mus musculus
MKVKKGGGGTGSGAEPVPGNRSAEPTREPGAEAESGSESEPEPGPGPRLGPLQGKQPIGPEDVLGLQRITGDYLCSPEENIYKIDFVRFKIRDMDSGTVLFEIKKPPVSLPINRRDLDPNAGRFVRYQFTPAFLRLRQVGATVEFTVGDKPVNNFRMIERHYFRNQLLKSFDFHFGFCIPSSKNTFSEMIRHPYETQSDSFYFVDDRLVMHNKADYSYSGTP

SEQ ID NO: 570 - DNA, 1292 bp, Mus musculus
gcgcaagcagcggcggcggtggcagcgggcgaggatctgcggccccgcgaggccatgaaggtgaagaaaggcggcggcgggaccgggtcgggggcggagcccgttccaggggcctcgaaccggagcgcggagcccacgcgggagcctggggcggaagctgagtccgggtccgagtcggagccggagccaggcccggggcccaggctggggccgctgcagggcaagcagcccatcgggccggaggatgtgctggggctgcagcggatcacgggtgactacctgtgctcccctgaggaaaatatctacaagattgacttcgtcaggttcaagatccgtgacatggactcagggactgtcctttttgaaatcaagaagccccctgtttcggaacggttgcccatcaaccggcgggacctggaccccaatgcagggcgctttgttcgctaccagttcacacctgccttcctccgcctaaggcaggtgggagccacggtggagttcacagtgggagacaagccggtcaacaacttccgcatgatcgagaggcactactttcgaaaccagctcctcaaaagcttcgacttccactttggcttctgcatccccagcagcaagaacacctgtgagcacatctatgacttccctcctctctccgaggagctaatcagtgagatgattcgtcacccgtatgagacccagtctgacagcttctacttcgtggatgaccggctggtgatgcataacaaagcagactattcctacagtgggacaccctgacccctaatgctgcccctgaggctctggcctagaccctgtgctgtaacctctccgacatcatctccacttggggatggatccggtggctctggaccctgagtcagtctcgagaggaaaggtgtccagcatccctaggcaaacctctggagctagtgggaggggcagcagggggaggctggctgtccccatgttcaggaaggcctcctgcaagaggaggactcctggatgcctcgctaggtccactgggcctgagtttcagagtagtgcccccttcttgaccgtgactagatcaggttagggaccatttcctgtcccttgcccaccacctccaggctatttatagttgtcggttcacagacaaagatccacagtgggtaccctgctctgagccctggcctcctccatcaggggccaagaaactacccgaggtgtgagaggggcgggtccagatcgcagcctgtaagacctggacaaactgtatatagttttcaataaaccttttctgttcttgggtg

SEQ ID NO: 571 - protein, 236 aa, Mus musculus
MKVKKGGGGTGSGAEPVPGNRSAEPTREPGAEAESGSESEPEPGPGPRLGPLQGKQPIGPEDVLGLQRITGDYLCSPEENIYKIDFVRFKIRDMDSGTVLFEIKKPPVSLPINRRDLDPNAGRFVRYQFTPAFLRLRQVGATVEFTVGDKPVNNFRMIERHYFRNQLLKSFDFHFGFCIPSSKNTCEHIYDFPPLSEELISEMIRHPYETQSDSFYFVDDRLVMHNKADYSYSGTP

SEQ ID NO: 572 - DNA, 25923 bp, Homo sapiens
ccccatttctactaaaaatacaaaaattagccgggcgtggtggtgggtgcctgtagtcccagctactcgagaggctgaggcaggagaatcacttgaacccaggaggtggaggttgcaatgagccaagatagtgccactgcactccagcctgggcgacagagtgagactctgtctcaaaaagaaaatttataatcaaatatttaatttttataaaagcactaaagaaaatgttaatgaacgtccccatccccacccccagctcacaaactgcagtgcagtagcacggtgtgtacttccatggttatactccattcccttttggcccaaggcaaccagattttgtgtttgtaattttcttgcttttccttagagtttgatcacatatgctgtatctctgtaaacaatgtatttaattttacatttttgaatttatataaatggtggcttataacacatgttcctctgccacttttattttattcccttcatgtggcagagcctggtgagagaatcatccataattatgtagttgaatctatgtatcattgtataaacataaacataatttacccattctattgctaatggacatttggattatttctaggttttactgttagaaataatgctattatgaatacttgtttctttgccatgtgccatttttatatcagactctccagttgtctgtttattccgcttttcttgctcagcatgccatctctgagtttccatttcaccattttaccagcccctgaagagttagatgctgcctggacccatgtcaactgggaaaaagaagagaacggagacaaatgaaaatactcaatatatactcatagctcagaaatgctgagttaatagctcatgaatctcaagagaggtgcaaacctgttggtcattggcaaaggggcagattcggaacagtaggagccagggtgctttttggctttcttttctgagccatgggcattctgtctcttgctcacccccacaggacatgatgagctacattgggcccaagaggacagcagtggtgcgggggataatgcaccgggaggcctttaacatcattggccgccgcatagtccaggtggcccaggccatgtctttgactgaggatgtgcttgctgctgctctggctgaccaccttccagaggacaagtggagcgctgagaagaggcggcctctcaagtccagcttgggtagggcaccaggctctgccacatgaagggagaggaaatgaattacatggggcaggagggaaatctgcatgccaacttctttctcctttcttctctagtctcaatttttttcttatttattttatgttattattattattattattttttttagttatttattttgagacggagtctcactctgttgcctgggctgagtgcagtggcactatctcggctcactgcaagctccgcctcccgggttcacgccattctcctgcctcagcctcccaagtagctgggaccacaggtgcccgccaccactcctggctaatttttttgtatttttagtagagacggggtttcactgtgttagccaggatggtctcgatctcctgacctcgtgatctgcccgcctcggcttcccaaagtgctgggattacaagtgtgagccaccacacctggcctatttattttattttattttttgagacagagtcttgctctgttgcccagactggagtgcagtggcgtgatcttggctcaccacaacctctgcttcccacgttcaagtgattctcactcctcagtttcctgagtaggattacaggtgcatgccaccatgtctggctaattcttgtatttttatttttattttatttttttttgagacggagcctcctgtcgtccaggctggagtgcagtgacgtgatcttgtctcactgcaacctccgcatcccaggttcaagcgattcccctgccccagcctcctgaatagttgggattacaggcgcccaccaccatgcctagctaatttttgtatttttagtagagacggggtttcaccatgttgaccaggctggtcttgaaatcccaacctcaaatgatctgcctgcctcggcctcccaaagtgctgggattacagcgtgagccaccacacccggccgatatttgtattttcagtagagatggggtttctccatgatggccaggctggtcttgaagtgctggcctcaagtgatccgtctgcctcagtctcccaaagtgctgggattacagacatgagccacagcgcccggcagctttttcttactcagtgttcctcatcccagttttgtcctccttttggttccatgatggaaagcagccccattccagaggagaaacaagttcagctcagctgggagtacaggctgcccctcttctttgatccacaagagcctctgacttccctgactcctgtttctgtaggctatgagatcaccttcagtttactcaacccagaccccaagtcccatgatgtctactgggacattgagggggctgtccggcgctatgtgcaacctttcctgaatgccctcggtgccgctggcaacttctctgtggactctcaggtgagaccgggagcaagttgaggagtccttttcaatgtctatacatatttacaagtgcagtctgttcctccatctcttagagcttgctgatttgctaggaatttcctgtgtgtatatgtatgtgagtgtcataagggtgggtactgggggtgcgtgtgtgcccttgtctgtgtccatccatccattgagggcagattctggtgtctttacttccttggcatcctattgagagagtttgtcagtgcttgttaacaaaccaccttcctatagctccctctagacctgtactcaccaattgtgcttagatgttaatgccatgacccatctttttttttttttttttttttttgagacagagtcttgttctattaccaggctggagtgcagtggtgtgatcccagctcactgcaacctccgcctcccaggttcaagcgattctcctgactcagcctcctgagtagctgggattacaggtgcgtgccaccatgcccagctgatttttgtattttagtagagacgggttttcaccacattggccaggatggtcttgatctttgcccagctgatttttgtattttagtagagatggggtttcaccacgttggccaggatggtctcgatcttttgacctcgtgatccacctgccttggcctcccaaagtgctgggattacaggtgtgagtgatggagcccagcagagccattcttaaggaatttagtttttagaaaaatgcttcctgaaatttgttattgtagtaacaataaagatgtgaagggccaggtgcggcggctcacgcctgtaatcccagcactttgggaggctgaggcaggcggatcacgaggttaggagatcaagaccatcctggccaacatggtgaaaccccatctctacaaagataaaaattagctgggcatggtggcgcgtacctttagtcccagctactcgggaggctgaggcaggagaattgcttgaacccgggaggtggagtttgcagtgagccaagattgtgccactgcactccagcctggcaacagagtgagactccatctcaaaaaaaaaagatgtgaagaatgtagctttctgtatcacgctgtctccttgtagggaaaacacgtgggagaaatttttatcaggtcttcctagtgggagtaattgcttctgaataactggcttgatttgatcttgtagacactgaattatgctgttctttgtttctctctttgtgtagactgttaggaaacctggtaaaatacgtgatttttaaagcacgtatttagtttattcagtttacccttggctttgctattttcttctgcaattattttctctcagccctgattttgtctcttatatgttgccttgtcctgattgtgtcttttttaaggcacctcaaatcttttttgggagaaagtagaatataaatctaaacaaagtaaccactccctgtttgctctacagattctttactatgcaatgttgggggtgaatccccgctttgactcagcttcctccagctactatttggacatgcacagcctcccccatgtcatcaacccagtggagtcccggctgggtgagcacctaaggatgagggtctttcttttctgccaggctagggagggaccctgacggctcagctgggtaggggacaggagttggaggtggattatatacagtgatggttcccaggttgggttggtccgaggagactgtggagattgaggctcctttttttctttttttgagacaaggccttgctctgttgcccagtctaaagtgcagtggcacagtcatagctcactgcagcctccaactcctggactcaagtggtcttcccacctcagcctctcgagtagctagaactataggtatgtgccactacacttggctaattttcaaaattttttttagagacaggatctcattatgttgcccatgctggtcttgaactcccctcaagtgatcttcccaccccagccccctaaaatgctgggattataggcgtgagccactatgcctgagccctaggttcctttttcatgatgctctgttgatatctccatcttcacacctatcatatccaaaagcatttattaaacgtgattcctagcactttttacaaatgaatgactaggctgggtctatctccctaaaagccatctaggagagaggctgtcacacacataggaaagacaacagcaaaagtacttgagggcagaatttgaattgacagttctgctgattgaggttgaataaccttgaagctagtattagagtttttcatttttcgggtggaaactaggaagaggaggtgtgactaagaactgtaacacaggcaaaccaaagtgagtatatctaattgtggaatctcagataccagaggcaggctagtgtggcccaaggattgtgagggggtggcatgtgaggccttagaaaattcctccgttcatttattcattcagcaaacattgactgagggactaccttatgacagtgctgagtagagaaaagaagggcatttcaggcaaagggaactgtgagcttagatgcagacaagtgagagagcttaggcattcaggaagctcagagtagtttagtgtggctgaaatgtgagtgagtgaccaaagatgaagccggttaggcaggcaggagccaggtcataaaggaccatgttaaggagtttgaactttaacctgatatgggtggctagtgattgagggatattaagcagggaactgacataaggtcagatttctggtttgcataaaactatctgtagtaatatgggtacattgtgggagtggccaagaaagctgtcgtagacagtcaaggggcctttgaggagggagaattcgggggtgttttggagctaaggactatgtttccatcggtatggcacatctcgggagaacattctgaagccctttactagagacaccctggacaggaggatatcctaatgattgttagttggggaatcagtcccagagtgagtgaccagcaagttagaggccgacctgggactaaggtccaggtccagcatgttttgatattctgctttccctttataccacaggatccagtgctgcctccttgtaccctgtgctcaactttctactctacgtgcctgagcttgcacactcaccgctgtacattcaggacaaggatggcgctccagtggccaccaatgccttccatagtccccgctggggtggcattatggtaatagtcacactacgcagaccccagagcccatgcttctgggacaggcaggtgtccctgaaactgtgttccttctgttttccttctggtgtcctccatggcccagcctgtgggaggggcaggcaccaggaaggtgagggtgctatgtgctcatgcccctcttctgccggccccacttttgtttccgccagtgttttctatactgtgaccctttgcccttacctaggatcattctgtgtccatcttagatcttcgccttatttgtgggagtcttgcaaggttgggagccttgtctcccttgttagactggaagtttctcatgggggagaattctaaaatgggataagaaaaaaatatgttctacaggactttcaagggggtaattgggataatgtatttaatgctctccgtagtaggtactcaaaaaatattagctataccatgaggtttatagcttctaaagagcacagaatatgttttccttttctctccagagtgcctagggcagagctgtgcaagggcctggtatgatgttgtggcaatctcattccccctttcaggtatataatgttgactccaaaacctataatgcctcagtgctgccagtgagagtcgaggtggacatggtgcgagtgatggaggtgttcctggcacagttgcggtgaggtcctggatgatccacttggggacatagtctccttggctgtagaggggagttgcaaagtggaatcaagtcttacctggcagggatatcttggctgtgcctagagccccagggaaaccaagaaaagtttctaaggatcccatcatccttctaagaaggactagtaggtgacaaaatcatttatttttttttttgagacggagtcttgctctgttgcccaggccggagtgcagtggtgccattttggctcactgcaacctccacctcccgggttcaagcaattctctgcctcagcctcccgagtagctgggactacaggtgcccgccaccacaactggctaattttttgtaattttagtagaaacggggtttcaccatcttggccaggctggtcttgaactcctgacctcgtgatccacccgcttaggcctcccaaagtgctgggattacaggcgtgagccactgtgcccagccagcaaaaccagttttaagaaaaatagactcatgaatgtcaggtccatggagtgtgattagggctgcttaagaaaatagctgttaattcttatgctgcctgatggattgagagtggctgcctgaggctctgtgttgaggattctaaggctgtatctgggctcattaggaaagagtattcttctgattgactagcagtgtctctcacggatgcaggcttagagaagcacagcacatgtgccttggcaaaggcagtcctggatcatcccttaatgctaagtcccattggccccatttgttcaaagagagggtagaaaaggtgaaaggattaaactgagttggtgttatcagaagtattttagccatggaacctttttttaaaaaacaagatcttggaaatctaatgtagaaacaggtaaaagcagaaacacctgttgaagcagcgtttggggccaacttgtttggtgttgccccttatgcccccaagaccctgaggtacttccctttaacccctatggttctgggtaagattgaaaatcactggctcaggacagatatttgagaaatcttagccatgatctcccgccttgtggtctcagccaccttgatcttactccgatgttcctacaggttgctctttgggattgctcagccccagctgcctccaaaatgcctgctttcagggcctacgagtgaagggctaatgacctgggagctagaccggctgctctgggctcggtcagtggagaacctggccacagccaccaccacccttacctccctggcgcagcttctgggcaagatcagcaacattgtcattaaggacgacgtggcatctgaggtaagcaggcaggggatggattctgcagcttgggactggagtagccagagagggccagagtgtggtgagaccagagagcctgtgaggtccatggtatgtgtgggcttgccatctttagtgtcccagccttcctctagacggcagtaccagcccccaagcaggagtgcagatgagagtgcgaggtttcaagctgaccctaggaaaataaaccatatccctgtagaaagacttccatagatcctggatgaactccaggcatcttccttggtagatggaaggcacagtaaggcccagcaccctttccaccaatgcctaggacttactggtataccctcttgtcccttctccttcctaggtgtacaaggctgtagctgccgtccagaagtcggcagaagagttggcgtctgggcacctggcatctgcctttgtcgccagccaggaagctgtgacatcctctgagcttgccttctttgacccgtcactcctccacctcctttatttccctgatgaccagaagtttgccatctacatcccactcttcctgcctatggctgtgcccatcctcctgtccctggtcaagatcttcctggagacccgcaagtcctggagaaagcctgagaagacagactgagcagggcagcacctccataggaagccttcctttctggccaaggtgggcggtgttagattgtgaggcacgtacatggggcctgccggaatgacttaaatatttgtctccagtctccactgttggctctccagcaaccaaagtacaacactccaagatgggttcatcttttcttcctttcccattcacctggctcaatcctcctccaccaccaggggcctcaaaaggcacatcatccgggtctccttatcttgtttgataaggctgctgcctgtctccctctgtggcaaggactgtttgttcttttgccccatttctcaacatagcacacttgtgcactgagaggagggagcattatgggaaagtccctgccttccacacctctctctagtccctgtgggacagccctagcccctgctgtcatgaaggggccaggcattggtcacctgtgggaccttctccctcactcccctccctcctagttggctttgtctgtcaggtgcagtctggcgggagtccaggaggcagcagctcaggacatggtgctgtgtgtgtgtgtgtgtgtgtgtgtgtgtgtgtgtgtgtcagaggttccagaaagttccagatttggaatcaaacagtcctgaattcaaatccttgtttttgcacttattgtctggagagctttggataaggtattgaatctctctgagcctcagtttttcatttgttcaaatggcactgatgatgtctcccttacaagatggttgtgaggagtaaatgtgatcagcatgtaaagtgtctggcgtgtagtaggctcttaataaacactggctgaatatgaattggaatgatacaaagtctgagctctactctttctgcattcacgcgtaagtaacagtttcctggtgtttgtcctcctgtgcccacaggtccactttgcttccacgtggccatgtgcccttcctagctggattgcccaaggctgttagcatctgctttttacctgagatactaattcatcaggtcaaaaaaaaaaaaaaaaaaaaaaaaaaagtcttgagcaccagctgcagggagccttctgctaggtacaggggtcctacagagaacaaagtaggcaggaccagtgctttcacagagctgagctttcagggggaagagtcagcggacaaataaaaataatttcacataatgcattagaaagacaaaaacaggctggtcagatggtgactgagggggaaggacttcagactgggtgtgagggaggccctttgagcagatgacatttgagctgtgactaggagaaaagaggccatctggggaagaccatccaagcagagaccctgagcctggaactcacgggcagaaaggctggaacacaatgagtaagcggagaggtagtcaggaccccactagtaccagtacaagaaagtgttagaaaaacagaatgaagcccagggcaggataccccgactcccatcccccgcgcccgtcgcatttcgggagggttgggccgggcggcgggcgggatcagcgcagggcccaccccaggggcggggccggggcggggcagtacctggggccccggccgggggcggggctgcggatgctcccacttcccccggctccagccggcgcaggcagcggcggcagcagcaggcgagcctcggccccgcaaggccatgaaggtgaagaagggcggcggtggggccgggacggcgacggagtccgctccggggccctcgggccagagcgtggcccccataccacagccgcctgcggaatccgaatctgggtccgagtcggagccggacgcaggcccagggcccaggccggggccgctgcagaggaagcagccgatcgggccggaggacgtgctggggctgcagcggatcaccggtggtgagcacccgcgagggagcgccgcccgcgggtgggaaggggagagggtgcgaggggccctcccggcgcgccaagccctggcccccgccccctttcccgcctcccctcccccaccgagtcccctctcctgtgtcccctgctctcccttctgccgccaggtctgagatctctgtgtacccccttcccttgatctctctctgtgcctccttcttctccctttcgagatttattccttccttttccaggggcccgtccccttttcccagcgtggaggtacgtgcggcagcagctgcaaccatagccctgtagctgtggagtctccagagcgctttgaggcccgtccctgcactaatgaagagaggggctgagtgcagcctgtcctcagcccccacgctggaggctaggtggaggctgagttacttgggaggcattcagactcttcatgtctccccaaccattaataccctcaccctgatcctccaggaagacttgggccattttcttccccgggaaagaaactgagcaggcagctttagtgtgttggctgtggttcctctcatggggagtggcataatgtccctccaagcctggactagcacctgtcctcttctgggggctctgtcatcaagggaggcttggtctccactgtggttaagagtttctgagctggactgcctgggttggagttccaactctgccatataattgtctgtgtgaccttgggcaagtaacctcacctctctgagcatgtcttttcatctgtaaaatggggataatgatacctttctcgtaagattattgtgaagataagtcctctgattctgtacagtgcctggcatctatgcatgctgtgtacattgggctctttgatcagtagtatttttgggccctacagggctgctcatagctgctgcctggagtcaaacaacttggctttcagggcaggggagggggtcatcataggcagggaacgagggctaggaaacctcatagcagaggctttggatgagcctcaaaggatgaaaggtgcatggagagacagtggctctccaccttggccacattcaccagcaacctgccctggccccctttgtgagaataactgttggggggggcctctctgtgggtatggggggcatgtattggagtggacctgagccctagagcttccaaagcagcagaacaccggactcccagacagagctgtggaggggagacagccttgagcctgtgctcctgggtccctgggggccaattcctctctccttactgagctaggcagcagccattcttagctgggcccccagagtactgagctcccttgcccaagcaggcatcaatggagagagggaggctggaccaggctgatgttgaagccagttgggctacaatttgcaatagcagcatttaggattcagcttagctctggggcagaactttctcagactgactgagtcctgagtaactttgggggtttattttgcaactagagggagcttccagctcatgtaccaccatttgtctcctaatttggaggaaattcatagcccttagagatggggcatctgtgaagggtaagtagaggaaagggcttcatgagaaccccttcctgtgcaggaattgagaacagagttccagggatttccaccctggcaccccttgcctggtctcttctgaccctaatcatgcaggtctgaggtttgctgttcccagattactgggccctgaatccagcttaggaagctatttgtggctgagaggaatagagcagttgtgttctgagcccttggccactctgccccttattctgacctgaccctgggtcccaggcctcatcctttctagaagagaaggagtggccgtggtgttctgagccatagatatccgtgttcctcacttcttctaaggacagagaggttgatagattgagtttgcagtagaagagactgaggttagactgcaggaagttgttcccaaatgagagaggctccaaaagttggagaatgggagaagagaaggccttacagggatctgggagttgggcactgggatcctgctccccactctgccacctccgttccctatgctctgtaccttctttctatgtctttatactggtgcttactttctgtgaaaatagggtgaatggggtgagataggggttgcccacttccattctctccccaccccacatgtgggctgtagtagactcagggccctgcctcttccccaagctgtataaagtccatgctgggccccagggtaccagatggctgccaggagggcttcctggaggggacagcgtcaggcttggggaagaagcagacctggggaagagaaaatgactttatattcacttcctgttcctgccccagaggaataggaggtggcccaggggcctggagggtgatttccaggcctctgtgggccaccaggggaggatgtgatgctgtgcaggctgacagcacgagtccctccctgcacctctcagctctttttgttgccagggcctccctgagcacttgaagttgctgctgcaagagctgtgagggttagatcaggccctgtagctccctgagcttcctcaggcagggcctcccactgttcttggttcccttcctgggcctgaggactccccttaccccttccacacccactgctgcacctgccacaccctcctcctggcctagcctgtgttcttctctatgggggtccaggactactttctccatggtggtggctcatagccagggctgcgtaaatgacctctaagggggttctctctgcttgctaagacttcctcccatttggagatcaacaaaggatgagagcaaagttggcctcctcccacctgccatatcccaggctctgggcttgagtcagcagagctttggttaagctgcttaagggagctgggctggtgtaagcttcttactgagaggagggggtttggaggagaggaggaatagggaaggggttgttcacctgccccagccccacccatatcagggaaagtccccttaacatcagcctcacctgatacatctagatgtcatgccaggggcagctgtggggtgagggtaggagtatcctccagagaaggacagtgactctcccaagacagagctgtgtggccccctttacaggtggttctcaaaggcagggtaccagagaagttgatacactgagttgcagtagaagagacaggtcagactgcaggaagttgttcccatatgagaagagaggctcccaccaggctggatacctaattctcccaaagtcatctagccagccttggcagagcggaggccagaatgaggaccctcaactccagagtgggagagagagtgttcaggaggtggccttgtcctctacccttctctgccctgcccttccctggcccccagagaccagtaggatggcactccttatcccctgttagatccccatggcggagttatgtctcttccacactgggggtgtaccccaagggcagggactgaggtccctctttccagagggcagtgatcccagggatgagaagatggtagctactctggggtcccacacaagctgacctggcagcaggggctttgcggccccttccttgctcagctgcctgtttcccctagactacctctgctcccctgaggagaatatctacaagatcgactttgtcaggtttaagattcgggacatggactcaggcactgtcctctttgaaatcaagaagcccccagtctcaggtgagtgggctgggtgggccattgatggggaggcagataggagctgcggagtgggctgcccagggaatccttgggccacagaggagtccacagagctggggcttggaccccagcattctcaggagtctgcaggcaggggggccctttcttttccttcccatatgtttctgaggctggacatcttgcgaggtcagccctaccccttcggtccctgccaacctgccctctgcagggctctctgggaactgcagtcctacgggtcccaggcctcagcatcctgtggcccggggaagcacagtggcgattgggaacatgcagacctagaacccctaggtggcactatttggccaatggtctgagccctcagtgtgccccggaatttcttggggagtttaaaaaaaatcagatagatggggacccaagggtagaaccctgggtggacaagggcccagcctgaagcccactgagccccagctggggtacattgcagaacggttgcccatcaaccggcgggacctggaccccaatgctgggcgctttgtccgctaccagttcacgcctgccttcctccgcctgaggcaggtgggagccacgtgagtcgctgggctatgggtggtggtgggggtgagggagagggtgtgagtgggcccttctcagcctctcgtaggggtggcctgtcctgagcctggctggctagttgacttcaaggacagacttagccctgcctccttttcttgctcagggtggagttcacagtgggagacaagcctgtcaacaacttccgcatgatcgagaggcactacttccgcaaccagctactcaaaagcttcgacttccactttggcttctgcatccccagcagcaagaacacctgcgagcacatttacgacttcccccctctctccgaggagctgagtgcgcgggcagggtcttctgggagtggggaagtgggggcgtctagagactgagctgcgggagggagagggacttgtgggtctgatcccatttctccccaccctggggctcttctgtgtctgccaccattcccatatcatccgtagagaaagaggctggggatatttcaggctgtttggctgtccctgtaccccagtcctgaagcccctgcagtggcgggactcaagctcctgacctttgcccggcctggctgggcctctcttgcagtcagcgagatgatccgccacccgtatgagacccagtctgacagcttctacttcgtggatgaccggctggtgatgcacaataaagcagactattcctacagcgggacaccctgaccccacggctgccctgaccccaggaggctccagttctgggctgggagctgtgacctccccaacgctcacccctcaaccccaagtcctctgcttggggagttctccaggagctccggaccctgagtcaatgttgggaggaagggtacctggtgtccccagtcaagcccatgaagcccatgcggcctgctacatggggtggggtcgtagggaggctgtttgcctccacgtctaggaaggcctgtgagaggagcagtcaggacttccggacaacttagctgggccctacttgggcccaagtttcagaatagtgttcccctatcaaggctgtgactagatcaggcagggatccattccctgtcccctgcccactaccttcaggccatttagagttgtaaatttacaaagatccacggtgggctccagctgccaagccacccaagggagtctgggccctaggcctagccccatccctccccatgaggggccaagacactgcctaaggtgtgggagggactggctgagattgcagcccatggtaggagctggaccaactgtatatagttttcaataaactttttccttttctgttctctggtgtggccagcctctgtgtgtatgggcaaagaagggagcagggataggcaggaatgtgcttaaggcagtaaaaatttctcctacctcccacattccagtgcactctcaccccttagtcttcctgtcccctgattctctgtaccctgacaccatatagagtcagcatttagaacatgatggagctggagagggtctttcttgtgatgaaggagacccagaccctgagaggggaagctttggcccaaagtcagagccaaccctggcagaacagaggccgaaacaaaggccctgaactccagggtgcaaggggaaggtgtggggggtgggggtttggccttgtcctccacgctaccttccctgaaccccagaggccactaggaccactgggttgtgtttttagccctcatgatagacggtggcagggctttggctaaggcctggagccatctccttgccctcagctgccttggggagcccccatgcctgggtagccctgcacataacactgccctcagcctccacccccaccccagactcagaggagggggctgcttaatggaggaaattcaggaactgaggtgggcagagagcacaccctacagtttcaggccctccttcagatatgcccagagctgacgcaccctctgggctgaggagctctggccctaggaggcccagaagtgctggcattcagcttgattctgtgaagcccttgctgggggaagtggggtggagctaggatctgcactgaattctgggaattctgaaatgagtgagacacaaggaacacatactcgtccctagggaaaaaaaaaggactggggacacggagagcaagaatcagagtcgttctgtgtggagggttctggggaggatttttagaggaggtagcactggagcaggtgcttgtgatggaaattgatggggaagagtgcttaggcacagggaacagcataaacaaaggctcagaggcaagatttgtcaggtgtttgtttgtttgtttacttatttatttgagatggggtctccctctcaaactcctgggctcaagggattttcctgccttggcctcccaaagtgccaggattatgggcataagcctaggtgtgttcaagagtcaatatgatgtgaaaagaagacagattggcagagccttaggagcagggcttctgagaagtggggagcccctgtggaggattaagtgggcatgacctggtcagattatctctggctgctgagtgaatggtggattggaaagaatgacactaatagccaagatttactgagtgccaggctgggtgctctacatgtgttaactcataaacatggtcatttctgaggaaggcactattatgatgcccattttacagaaaatgtaggtccagagaggttaatgtacccagccaacgttgcacagctatgaagtggcagagccaggacttgaatccaggcagtccggctccatgcactaccatactaaaggcaggggggcagtgaggatgaggagggtgctgcaggaatctggtgagagagaaagagaaactgaattaggtcagtatcctcaaagatggagagaaacaggtgaaactgatatttttaagaggtgagatcctcaggagtggtggctgattggatgagtgggttggagagagggaggaggtgaggctgactgcctggtttgtggcctgggtgctggggtagctacaggtgccatcactgggtttgggaatgcaggttggatcaaggtggatgccagcaggagagggtgacttcagactgggacatgctgtggcatggaggaaattaccagaagacaggaaaggtgggccctaagaccaggaggggaataagggctggaggtggtgattgtcgaggccatcggccacaaggtgatttctgaagctatgatggtggctgagatcatggggtcctccactgacactcttgttatttaggaatgccaaatgtcctgcaattactgggattctcccaaacaatgctattataatacaaatccccatcccctaattgagggtgcctgaacgagaatgtatcaccttagggaaggccagtgtttgagagcagggcggaaggaaaggaaacaatggagacaggaggagtgagcctccagggaggtgggagcagagccatgttttggaggaaagaatttcatcacaaagcaagtgggcaggaactatcagttgccacaaaggtaaagaaggagaatgaggacaagaatgtggaagggagggatttgtttgcagatgaggctgtacaggtatgaaagaaaggccagtataggggtgattttgctgttgtagtttatggggttacaagtctgcagagaaggtatagcaaggaagaggaccttttcccaataccctgataatagttctactcactgcagctgctaagtaaaactgggttgaggttctagattgggcctgctgcacttccatcttcagagagagaggagggtccctattctgaggttctcatctctgaagtaggcacccagttggcactcaccttgaaaagaggcctgcgttccttgggcttggaggagcctaggttgggaaaagccttggccccatgccttcttttaagtcttcatgcctctggcactagtcctattgcaaatggtacatcttgctgcatttagttcctggcactgtccctaggaacctagaggctgcctgggaggaagacagggtggaggtggggctagtcttggctctgatgttgatgagctgttgaccttgaaggggcaattcccttttgtctctgaaatgggccagtcatttttgctttgactctttttttttttttttttttttttgagaaggagtcacgctctgtcgcccagggtgaagtgcaatggcatgatctccagggtgcagtgcaatggcatgatctcggctcactgcaacctctgcctcccgggttcaagtgattcttctgccccagcctcccaagtagctggacccattacaggcaccagccatcatgcccggctgatttttgtattgttgtagagacggggtttcaccatgtcggccaggctggtcttgaacccctgacctaggtgatttgcccgcctcggcctcccaaagtgctgggattacaggcctgagccaccgtgcctggcctgctttgactctttaggggtgtcatgaggatcctgcccctgggtagagaaggaaagcccaagtaccacagggaaacccacagctcgtgccctcctgggctggccggcaaggtgctcactgggactgccaaaccagtggttaaaatactaagatcttcccttccagctgttaaaaagctgctgtcccaggccgccctagcctggcccctcccctaagagtcaccctccacttccccaccatctggcaactaaagcaaggacattacccttttttttttttttgagtcagggtctcgctctgttgtccaggccagagtccagtggcacaatcatggctcactgcagcctcaaactcctgggcctaagcaatcctcctacctcgtctcccaagtagctgagactacacaagctacatgtgccaccatacccagctaattttttgtagagatagggttttgccatgttgcccagtctggtctcgaactcctgtgcttaagcaatccttctgcctttgcctctcaaactactgggattacaggcccagccccttgctttacttttctatgtgtcacagactctcttgttgtcagtctgctaaagcctatggacaataaaaaggattttaggaacataaaatatattgttatcctatttatttatttatttatttatttatttatttatttattgggatagagtctcgctctgttgccaggctggagtacagtggcacaatctcggctcactgcaacctccgcctcccaggttcaagcgattctcttgcttcagcctcccgagtaactgggactacaggtgcatgccaccacacccagctaatttttgtatttttagtagaggtggggtttcaccatgttggccaggatggccttgatctcttgacctcatgatcctcctgccttggcctcccaaagtgctgggattacaggcgtaagccaccctgccaggcctatcctatttattttatgtattaaaaactatatacaattggccataggttccgcatctgtgaattcagccaactgtgcatcagaaatgtctgtactgaatatgtgcagacatttgtcttgtcattagtccttaaatagtacagtataacaatgattgacaaaggatttacattgtattaagtattataagtaatctagagatgatttaaagtatacgggaggatgtgtgtaggttatatgcaaatactccatcattttatatcagggacttacttgcacattcatggattttggaatttgtgggaggccctggaaccactgtgagatgactgtgtgtgtgtgtgtgtgtatctacaatcatgcactagatatcgatgtgtctgtcatgacagactacatatatgtcgacagtcacataagattataatactgtatatatatatatatatatatatatatatatatgttttttaagacggagtcttgatctgtctctcaggccggagggcagtggcacaatcttggctcactgcaacctctgcctcctgggttcaagagattctcctgtcttggccttctgagtagctgggattacaggcgtgtgttaccacgcctggctaattttttgtatttttagtaaagatgaggtttcgccttggtggccaggctggtgttgaactcctgacctcaagtgatgtgcccgccttggcctcccaaagtgttgggattacaggtgtgatccaccgtgcccggccaatactgtattttttactgtaccttttctatgtgttgtagaaacacacataggcattgtgttacaattgcctacagaattcagcacactaatatgccacacaggtttgtagcctagtagcaataggctatcccatagagcctctaggtgtgcagtatgctctaccatctaggttcgtgtgagtaaactctatgatgtttgcacaatgacaaaattgcctaaggacacatttctcagaacgtatgtctgttgttaagcgacaaattactttatgtgtgtgtatatgtgtgtgcatgtgtatatatttgtacatattttgtactatctataatacaattacaaaatatctgtgatttctattgacaaagtcacaggtattgccaatgctagtgtgatttgttgctgacattcacaatagagggaaattctagatttcaggtaaggatgagagaaaatgaagatgtaactttttcatgcaagttcctgacctgggaattctaatccatttgagatctctcacatttagaatccctgagcaaaaggattaattccctccaaataacggacttgaagacgctgcatccattcagacaaattgttgctcaccctggccaggtgtggtagctcatgcctgtaatcctagcacttagggaggccaaggaggtggcgttgtttgagcctaggaatttgaaaccagcctgggcaacatagtgagaccctacctctacaaaaaatacaaacattaggtgggtgcggtggcccacgcctgtaatcccagcacctaacagaggctgaagtgggaggatcacttgagctcaggagttcaaaactagcctgggtaacatcgcgagaccccatatttacttagaaaaataaaattaaaaagatggttgctcactctaataatggctatatgcttggtatggggtggccagcagggggcagcatatgagtgggagtgtggggctcatttcagggtggaactgaggcccagttaaaaaaagtctgagggcctggttacactctctctctctctctctctctctctctctcacacacacacacacacacacacacacacacacaaaactagacccaagtcctacctgcttgctacctgtcttcttgcattaggggccagttcacacacaggtgtgctgaatgtgcccactggccagagttttgacagagggtctcctggaggagatggcctagcctgggtatataaggcaggtttgtctgagctctcagagtctcaggacccgaggcaagcaaatgggtcccaataggattctcccaggaaacatttgccctgtgtttgggggcctggatgtcatcaagacacaggcccagggttggacagagctggtgtgcaacatcgcctgaggtcttggcaaagagcctgcacctgcttcctacacagccagggccaggctggggcaggtgggccttcctcttgggtgcacccgctggccatgccttccccactccctatcctacctcagcccaccagccctgcatctagccttccagcctctgctggggcgggtgctggggtaggtggggttctattatggggtcttttgcagacctatcctctcagaggtaggtgttggctggccccctgggcccagccccaagaagagctttgttttttttatgagacagagtctcactctgtcacccaggctggagtgcagtggcacaatctcagctcactgcaacttccacctcccaggttcaagtgattctcctgcctcagcctcctgagtaactgggattaaaggtgcccaccagcacactcagctaatttttgtatttttagcagaggcagggtttcaccatgttgctcaggctggtctcgaactcctgatatcaagtgatccacccatctcggcctcccaaagtgctgggattacaggcatgagccactgtgcctagccatccaagaagtgctttcttttcttttttttgagacagagtctcactctgttgcccaggctggtgtgcagtggtccaatctcggctcactgcaacctctgcctcccgggttcaagcgattctcctgcctcagcctccctcctgagtacctgggattacaggcgtccaccaccacgcccagctaatttttgtatttttagtagagatgaggtttcaccattttggccaggctggtcttgaactcccaacctcaggtaatctgcctgcctgggcctcccaaagtgctgggattacaggcgtgagccaccgtgcccagccttcatccaagaagagctttctaagcagagacaccacttgtggctgctctgggacctggggatcatgtatgtgcttttggctcccacatctgccccatctctcttgagacagtgctgcggtgacaccaaccccacctggaggtgacacctagggggtgagtctgaagtgggactgagtgagcccctgaccatccagagaccactctccaggaccagcagtgcacacagcaccagggcatgctccattttgtcacctgtggaactcagggccccaaaccacttggcatctctttcagccagggacagatggaagcagaaaggcacagtttggacagggcagcaactccttcttgtgtgaggagatgggggtgcaaagagggagtggcagacctcagaggcaaggggtctgggggagggcatcccctccattcctctggccagggcagcctcttccctgcatctctttggaagttctcctgggaagaggccctgctcacctgctcctcagcctccccagtgggtcaagaagttttcctagatgcctcactctttggattagaaacttcctagttctgggtgagggtgacagggacgtcacaggcccagggcatctgccatcagtgtggcctggccattttgcttagggagaggggccagaaatgaaagcttggtagtgagaccacaaggcacttgctttattgttccaggacaggggacaatgacaagccatcgcgggatctgcttatgcctcctataagcctggggccaacctgtggaagttcttgtcacccccaggcccagggtgggctgaggttccccctcgatggggtcaggctcatggcaggcacctgggccacaccccgcagggccaagggtatcccttgtgcttcccgggcaccctaggtctgccaagcagtcaaagcgggggtgctttgcatgggtgcttccctgtcaccctgtgccaggcttttctcctgaatgcccaggttgcctgagacagttggaagtaactaacaggtgctcctcaacttatgatggggctacatccggagaaacccatcgtgagtgggaaacatcgtaagtcgaaagtggtttttgactttcggtggtttcaatttacaatgggtttatcggacataaccgcatcctaagtcgaggaacatactgaatgtgtattgcttttgcaccatcttaaagttgaaaaagtgtaagttgaaccatcataagtagagttaagccaggacctaaactatgtgaacttttctttctggaggaggagtgagattgtggtgacctggagggggcccttcctgcacccgggactggggaaaaaggacatgttcaagtttccgagggcaagggcttttccaaacactgcttcggaattgggctcagtttggtgcccgggtagatgttgccccttctgtatgtcaccctggggaaagctggacagagcatgtactaaggatgggtagagaatggctgagtgggtgctgccaattagcagctcctgggggggtccacagacaacccagggaggagctctctgtctcctccttcttgctgggctgttgggatgaagatgggggaataaatacagggcgcttctgggaaagaaaatgacgagggggccaggactgcagagcatgtggatgtcagaatgggggtctggggggatctttggcctggcacagggccctgagcttttggtaagcaaagcgctcagctctcagttgccccagaaacgaagtcgggctctcagtgatggagtgctggttcctctggctgtaagatatgtgggtgggtgtacatctgaataatttgtgtgtgtgcacgagggcttaagtgtggatgagtgtgagctagggacagggcattttcctcttgcccagacgcttgctctttgggggccctgggtgaggagctgggccaccacgtggcagaaatgtgtgagaggcagcaccccaggtgatgtcctctgcgcccccagctaccagctgacacacacgttggcttagtggcataggggacaggtagtattttccttccttgacctttaaggtgagcccgatgtgggcggccggccaggacttccagaccaggcaaacgctggagctgacgaagctgggcacagctcatgccagggccacgggcttggagctggggctgaggtacacagaggggcctgcaggggccgtggggggcgtgggctccagctccataaaggcagagtagagggtggtgaggtgcaggtcacccagtgccccggagccaccactgcccggggctgccaagtcacctgccccactgcctgtctctgtcagacagggcccaggggggaagcagtgaggtggtggctggggtggtggcatcgaagatgatgtcggggatgaggtcaccagtaccagggggtcgagggccaagctatcatccttcaactgttcccacaggtttcctagatggggaaggagagaacaggtgtcactgggaggcaccggaggagccctgtctggcccctcctacctgtcaatcttcacatgctgcagagagcaggggtcagggtgacatgtgctgggaacagagcctggcactagcttgtgaccccaggcagttgctgaacctctcagcctcagattcctcctcccgtgtagcacaatctgaaagccgtcgatctagatgacctctgtggttctttttggggggtgggcattggggaggggttgatgcctgctgacaggctgacagcatggatgccaatgttgtgcacttgggagtgaaccctggctcatgcccagtctcccaaggaaggtagatttgcagcccagatcaagcagcttccggcagtgtactctggacctaatgggatgga

SEQ ID NO: 573 - DNA, 1394 bp, Homo sapiens
gccggcgcaggcagcggcggcagcagcaggcgagcctcggccccgcaaggccatgaaggtgaagaagggcggcggtggggccgggacggcgacggagtccgctccggggccctcgggccagagcgtggcccccataccacagccgcctgcggaatccgaatctgggtccgagtcggagccggacgcaggcccagggcccaggccggggccgctgcagaggaagcagccgatcgggccggaggacgtgctggggctgcagcggatcaccggtggggcccgtccccttttcccagcgtggagactacctctgctcccctgaggagaatatctacaagatcgactttgtcaggtttaagattcgggacatggactcaggcactgtcctctttgaaatcaagaagcccccagtctcagaacggttgcccatcaaccggcgggacctggaccccaatgctgggcgctttgtccgctaccagttcacgcctgccttcctccgcctgaggcaggtgggagccacggtggagttcacagtgggagacaagcctgtcaacaacttccgcatgatcgagaggcactacttccgcaaccagctactcaaaagcttcgacttccactttggcttctgcatccccagcagcaagaacacctgcgagcacatttacgacttcccccctctctccgaggagctgatcagcgagatgatccgccacccgtatgagacccagtctgacagcttctacttcgtggatgaccggctggtgatgcacaataaagcagactattcctacagcgggacaccctgaccccacggctgccctgaccccaggaggctccagttctgggctgggagctgtgacctccccaacgctcacccctcaaccccaagtcctctgcttggggagttctccaggagctccggaccctgagtcaatgttgggaggaagggtacctggtgtccccagtcaagcccatgaagcccatgcggcctgctacatggggtggggtcgtagggaggctgtttgcctccacgtctaggaaggcctgtgagaggagcagtcaggacttccggacaacttagctgggccctacttgggcccaagtttcagaatagtgttcccctatcaaggctgtgactagatcaggcagggatccattccctgtcccctgcccactaccttcaggccatttagagttgtaaatttacaaagatccacggtgggctccagctgccaagccacccaagggagtctgggccctaggcctagccccatccctccccatgaggggccaagacactgcctaaggtgtgggagggactggctgagattgcagcccatggtaggagctggaccaactgtatatagttttcaataaactttttccttttctgttct

SEQ ID NO: 574 - protein, 143 aa, Homo sapiens
MDSGTVLFEIKKPPVSLPINRRDLDPNAGRFVRYQFTPAFLRLRQVGATVEFTVGDKPVNNFRMIERHYFRNQLLKSFDFHFGFCIPSSKNTCEHIYDFPPLSEELISEMIRHPYETQSDSFYFVDDRLVMHNKADYSYSGTP

SEQ ID NO: 575 - DNA, 1345 bp, Homo sapiens
gccggcgcaggcagcggcggcagcagcaggcgagcctcggccccgcaaggccatgaaggtgaagaagggcggcggtggggccgggacggcgacggagtccgctccggggccctcgggccagagcgtggcccccataccacagccgcctgcggaatccgaatctgggtccgagtcggagccggacgcaggcccagggcccaggccggggccgctgcagaggaagcagccgatcgggccggaggacgtgctggggctgcagcggatcaccggtggggcccgtccccttttcccagcgtggaggtttaagattcgggacatggactcaggcactgtcctctttgaaatcaagaagcccccagtctcagaacggttgcccatcaaccggcgggacctggaccccaatgctgggcgctttgtccgctaccagttcacgcctgccttcctccgcctgaggcaggtgggagccacggtggagttcacagtgggagacaagcctgtcaacaacttccgcatgatcgagaggcactacttccgcaaccagctactcaaaagcttcgacttccactttggcttctgcatccccagcagcaagaacacctgcgagcacatttacgacttcccccctctctccgaggagctgatcagcgagatgatccgccacccgtatgagacccagtctgacagcttctacttcgtggatgaccggctggtgatgcacaataaagcagactattcctacagcgggacaccctgaccccacggctgccctgaccccaggaggctccagttctgggctgggagctgtgacctccccaacgctcacccctcaaccccaagtcctctgcttggggagttctccaggagctccggaccctgagtcaatgttgggaggaagggtacctggtgtccccagtcaagcccatgaagcccatgcggcctgctacatggggtggggtcgtagggaggctgtttgcctccacgtctaggaaggcctgtgagaggagcagtcaggacttccggacaacttagctgggccctacttgggcccaagtttcagaatagtgttcccctatcaaggctgtgactagatcaggcagggatccattccctgtcccctgcccactaccttcaggccatttagagttgtaaatttacaaagatccacggtgggctccagctgccaagccacccaagggagtctgggccctaggcctagccccatccctccccatgaggggccaagacactgcctaaggtgtgggagggactggctgagattgcagcccatggtaggagctggaccaactgtatatagttttcaataaactttttccttttctgttct

SEQ ID NO: 576 - protein, 231 aa, Homo sapiens
MKVKKGGGGAGTATESAPGPSGQSVAPIPQPPAESESGSESEPDAGPGPRPGPLQRKQPIGPEDVLGLQRITGGARPLFPAWRFKIRDMDSGTVLFEIKKPPVSLPINRRDLDPNAGRFVRYQFTPAFLRLRQVGATVEFTVGDKPVNNFRMIERHYFRNQLLKSFDFHFGFCIPSSKNTCEHIYDFPPLSEELISEMIRHPYETQSDSFYFVDDRLVMHNKADYSYSGTP

SEQ ID NO: 577 - DNA, 1251 bp, Homo sapiens
ccggcgcaggcagcggcggcagcagcaggcgagcctcggccccgcaaggccatgaaggtgaagaagggcggcggtggggccgggacggcgacggagtccgctccggggccctcgggccagagcgtggcccccataccacagccgcctgcggaatccgaatctgggtccgagtcggagccggacgcaggcccagggcccaggccggggccgctgcagaggaagcagccgatcgggccggaggacgtgctggggctgcagcggatcaccggtgaacggttgcccatcaaccggcgggacctggaccccaatgctgggcgctttgtccgctaccagttcacgcctgccttcctccgcctgaggcaggtgggagccacggtggagttcacagtgggagacaagcctgtcaacaacttccgcatgatcgagaggcactacttccgcaaccagctactcaaaagcttcgacttccactttggcttctgcatccccagcagcaagaacacctgcgagcacatttacgacttcccccctctctccgaggagctgatcagcgagatgatccgccacccgtatgagacccagtctgacagcttctacttcgtggatgaccggctggtgatgcacaataaagcagactattcctacagcgggacaccctgaccccacggctgccctgaccccaggaggctccagttctgggctgggagctgtgacctccccaacgctcacccctcaaccccaagtcctctgcttggggagttctccaggagctccggaccctgagtcaatgttgggaggaagggtacctggtgtccccagtcaagcccatgaagcccatgcggcctgctacatggggtggggtcgtagggaggctgtttgcctccacgtctaggaaggcctgtgagaggagcagtcaggacttccggacaacttagctgggccctacttgggcccaagtttcagaatagtgttcccctatcaaggctgtgactagatcaggcagggatccattccctgtcccctgcccactaccttcaggccatttagagttgtaaatttacaaagatccacggtgggctccagctgccaagccacccaagggagtctgggccctaggcctagccccatccctccccatgaggggccaagacactgcctaaggtgtgggagggactggctgagattgcagcccatggtaggagctggaccaactgtatatagttttcaataaactttttccttttctgttct

SEQ ID NO: 578 - protein, 202 aa, Homo sapiens
MKVKKGGGGAGTATESAPGPSGQSVAPIPQPPAESESGSESEPDAGPGPRPGPLQRKQPIGPEDVLGLQRITGERLPINRRDLDPNAGRFVRYQFTPAFLRLRQVGATVEFTVGDKPVNNFRMIERHYFRNQLLKSFDFHFGFCIPSSKNTCEHIYDFPPLSEELISEMIRHPYETQSDSFYFVDDRLVMHNKADYSYSGTP

SEQ ID NO: 579 - DNA, 1385 bp, Homo sapiens
cccacttcccccggctccagccggcgcaggcagcggcggcagcagcaggcgagcctcggccccgcaaggccatgaaggtgaagaagggcggcggtggggccgggacggcgacggagtccgctccggggccctcgggccagagcgtggcccccataccacagccgcctgcggaatccgaatctgggtccgagtcggagccggacgcaggcccagggcccaggccggggccgctgcagaggaagcagccgatcgggccggaggacgtgctggggctgcagcggatcaccggtgactacctctgctcccctgaggagaatatctacaagatcgactttgtcaggtttaagattcgggacatggactcaggcactgtcctctttgaaatcaagaagcccccagtctcagaacggttgcccatcaaccggcgggacctggaccccaatgctgggcgctttgtccgctaccagttcacgcctgccttcctccgcctgaggcaggtgggagccacggtggagttcacagtgggagacaagcctgtcaacaacttccgcatgatcgagaggcactacttccgcaaccagctactcaaaagcttcgacttccactttggcttctgcatccccagcagcaagaacacctgcgagcacatttacgacttcccccctctctccgaggagctgatcagcgagatgatccgccacccgtatgagacccagtctgacagcttctacttcgtggatgaccggctggtgatgcacaataaagcagactattcctacagcgggacaccctgaccccacggctgccctgaccccaggaggctccagttctgggctgggagctgtgacctccccaacgctcacccctcaaccccaagtcctctgcttggggagttctccaggagctccggaccctgagtcaatgttgggaggaagggtacctggtgtccccagtcaagcccatgaagcccatgcggcctgctacatggggtggggtcgtagggaggctgtttgcctccacgtctaggaaggcctgtgagaggagcagtcaggacttccggacaacttagctgggccctacttgggcccaagtttcagaatagtgttcccctatcaaggctgtgactagatcaggcagggatccattccctgtcccctgcccactaccttcaggccatttagagttgtaaatttacaaagatccacggtgggctccagctgccaagccacccaagggagtctgggccctaggcctagccccatccctccccatgaggggccaagacactgcctaaggtgtgggagggactggctgagattgcagcccatggtaggagctggaccaactgtatatagttttcaataaactttttccttttctgttct

SEQ ID NO: 580 - protein, 238 aa, Homo sapiens
MKVKKGGGGAGTATESAPGPSGQSVAPIPQPPAESESGSESEPDAGPGPRPGPLQRKQPIGPEDVLGLQRITGDYLCSPEENIYKIDFVRFKIRDMDSGTVLFEIKKPPVSLPINRRDLDPNAGRFVRYQFTPAFLRLRQVGATVEFTVGDKPVNNFRMIERHYFRNQLLKSFDFHFGFCIPSSKNTCEHIYDFPPLSEELISEMIRHPYETQSDSFYFVDDRLVMHNKADYSYSGTP

SEQ ID NO: 581 - DNA, 1650 bp, Homo sapiens
cccacttcccccggctccagccggcgcaggcagcggcggcagcagcaggcgagcctcggccccgcaaggccatgaaggtgaagaagggcggcggtggggccgggacggcgacggagtccgctccggggccctcgggccagagcgtggcccccataccacagccgcctgcggaatccgaatctgggtccgagtcggagccggacgcaggcccagggcccaggccggggccgctgcagaggaagcagccgatcgggccggaggacgtgctggggctgcagcggatcaccggtgactacctctgctcccctgaggagaatatctacaagatcgactttgtcaggtttaagattcgggacatggactcaggcactgtcctctttgaaatcaagaagcccccagtctcagaacggttgcccatcaaccggcgggacctggaccccaatgctgggcgctttgtccgctaccagttcacgcctgccttcctccgcctgaggcaggtgggagccacggtggagttcacagtgggagacaagcctgtcaacaacttccgcatgatcgagaggcactacttccgcaaccagctactcaaaagcttcgacttccactttggcttctgcatccccagcagcaagaacacctgcgagcacatttacgacttcccccctctctccgaggagctgagtgcgcgggcagggtcttctgggagtggggaagtgggggcgtctagagactgagctgcgggagggagagggacttgtgggtctgatcccatttctccccaccctggggctcttctgtgtctgccaccattcccatatcatccgtagagaaagaggctggggatatttcaggctgtttggctgtccctgtaccccagtcctgaagcccctgcagtggcgggactcaagctcctgacctttgcccggcctggctgggcctctcttgcagtcagcgagatgatccgccacccgtatgagacccagtctgacagcttctacttcgtggatgaccggctggtgatgcacaataaagcagactattcctacagcgggacaccctgaccccacggctgccctgaccccaggaggctccagttctgggctgggagctgtgacctccccaacgctcacccctcaaccccaagtcctctgcttggggagttctccaggagctccggaccctgagtcaatgttgggaggaagggtacctggtgtccccagtcaagcccatgaagcccatgcggcctgctacatggggtggggtcgtagggaggctgtttgcctccacgtctaggaaggcctgtgagaggagcagtcaggacttccggacaacttagctgggccctacttgggcccaagtttcagaatagtgttcccctatcaaggctgtgactagatcaggcagggatccattccctgtcccctgcccactaccttcaggccatttagagttgtaaatttacaaagatccacggtgggctccagctgccaagccacccaagggagtctgggccctaggcctagccccatccctccccatgaggggccaagacactgcctaaggtgtgggagggactggctgagattgcagcccatggtaggagctggaccaactgtatatagttttcaataaactttttccttttctgtt

SEQ ID NO: 582 - protein, 218 aa, Homo sapiens
MKVKKGGGGAGTATESAPGPSGQSVAPIPQPPAESESGSESEPDAGPGPRPGPLQRKQPIGPEDVLGLQRITGDYLCSPEENIYKIDFVRFKIRDMDSGTVLFEIKKPPVSLPINRRDLDPNAGRFVRYQFTPAFLRLRQVGATVEFTVGDKPVNNFRMIERHYFRNQLLKSFDFHFGFCIPSSKNTCEHIYDFPPLSEELSARAGSSGSGEVGASRD

SEQ ID NO: 583 - DNA, 33913 bp, Mus musculus
  misc_feature (1)...(33913): n = A, C, G or T/U
acattggttaattttgcttttcatttttctcagttacccccagtcctccctctctgttgaaatgttgaagatttagctgtcagaggcaactgtgatcctgccttagggactggagaagtggagggacttgctcagtatggtgttctaatgttcagaaccaagcagtctccttacttactattttaagatgtgtgtagtttgactttagaagaagttcaaattccatccactttgatagcatcaatctgtaattggcattcagaatgcccttggcatgccagtctgtgaaggcattaaagacctgttaaaacacttgagcccaactttattaaccaaaactgataccaccacctttatcttctgaataaagtccgctttatttttattttcaacattttgctgcttcgttctttgtttcagatgtcactgctgtgtcagtgaggtgtggtttggaagaagctggagagagtgtgtatatgtgtgtgtgtgcaccctgctggcaaactgaggaggatgtggggcggttgtcctctgcctaagaccccagtgtcagtgcccacccaaacttcctgtttagcctgcaacaacggccagtttctctttcctgaaccttgtatttaactggatcttttcctccctccttttgactaacagtgatacctgctgacttaactgtcctcttttaaagtaacttgcatgtggccctccatactgcatactccatacggaagctctgacacctagcctgtatatactactctctccagatgtcataatcaaaagtagaaatgggaatgactgtgtgcaggaggaacagctgtgtcttatgattgtggagattactgtatgagagcaatttgtcacaagccacagccattggccacaaaccaggtgtgctttcagttgagactgctgtcaaggaagttcttgactacagtgtgacagtcacttgaatggtccccactcaacctgaaatgaaaaccagcatcctgactgtcacagcaaccttcctgtcttctcagtgtaaggagcagagtaaggttgctagactaaggtgacagggaaccagagtgtgggaccaccctgaagacttctacctgcatcacagctgtttagctgctttttcccaagcaccatctaaatgtgtcttaaacttgtttactcattggtggttggcttttttccactatcatgtaagtttgctaatgtagtttgttttatatttttctactttctctgtagattggaactcactttgtagaaacaggcaggtcttgaacccagaagagtcacctgcctctgtctcccaagtgctgggatcaaaggtgtgtgctaatattaatgtgcccacccctctgaatagcctcttaaacttgagtaaagtgaagcaatgacagcggggttggtcagtgttcaggcatcaccagtatggctaattgttgtactcatttgcatttaatgcactcctaagtcaaaagactcaactcttccacatataatcattccagtttcaactttagattatacatgtcataaaatgtcaggcccaaaactgcctcgcagacactacatgtcattcatgttgtaatgaaggtactattttaatcccattttacagctgagaacacaggagctaagaactttgtcagcttccccttgccccccagaatctgtgtactgagtatgggtatttttcaaatccagtcccaaggctttttatagtcttaactctgcagtgagaattattttatacctttgagaactgctttttgtgttagggcaacaagatgtctcagtggggtaaaggcacttgctacattaaacctgacagcctgagttcattcagctagatgccgtgatagaaggatagaatccattcctctgacctgcgcgcacacacacacacacacagtcagataatacagtaagatcataatgttgtctaagttgttaatggtgtgatacaggacctactacattgctgggttgatctcaagcttgagattttggcatctggagtgctatgattacagatgtgtgttatcatgagcggaaaactacaaatgtgggtctcttttattaagacttggggctggagagatggctgtttttttccagaggacctgggttgaattctcaagcacctgaacggtggctcacaatcatctgtaactcaattctcagaagctcggatgccctcttggcaccaggtgcacacttgtaggcaaaacgctcatataaaactttaaagataaatattctcttgctgcatatgtaagtgcatacctttaacccctgaactcaggaggcagagagacaaatctatgagttcaactctacatagttctaagacagccagggtgacctagtgaggtgcagtcttctagaagcaaaaagatgatctctatgtgtacatgtgtcaggctgcatgtatttatgtgcaccacaagcatgcagatacacattgagatacctttaggaagctagagaacatcatatcccctgtaagtagtttcagaggattgtgggtggctaatactgccttgggaactggctatcatcctgcctcaagccaggcaatgagctattgtacactgttgtataactgccaaactcaattcactaggggtgccaaaggggggtcaactttcttactatttgaagtctgaactaaaccatctctacttctgctccacttcccctctgaggcagaagcgtcttgaaatagtctatggtgcctggtaggcaggaaggccagagggctgctgagtaagtggcacttcgtaactcccagccccgtctgcgggttctgcacagtgcagcccagatgggaaacctgtgaggcctgcctgggcaacctttcttttccaagtgctccttggccacatgtatcccgaagctgagctgtcttcatgcatttcagctctccctaccggcctgaggtctggatgcagacagggagataacctgtcctaatcctggggatgagagactcagactctgggtaacttctccatagcagtggcagtccgtgttctttactgagtaccaccctctagtgagacagtcagacctttaaaaaatatatttatatgagtacaggcacaccagaagagggcatcagatctcagtacagatgggtatgagccaacgtgtggatgccaggagttaacttaggacctctggaagagcaatcagtgctcttaaccactgagccatctccccagttccccaattagctctttttattcctcagtttctttgtaaaacatttcattgaaagagaaggcataggaattttacaagacttagaacataaattagatagccaatcaatcgaatgatgaatatcagaccctaaaggcactgaggatacatagtaagctgagctaagcccccagatctatttcctgttgggctcatattaatgggcaattaacacaggtattcaataacttaataaaactttctttttggtttttccaggccgggtttctctatgtagccctagctgtcctggaactcactcttactctagaccaggctggccttgactttacagagagccatctgcctctgtctcctgagtactgggattaaagccctgcactgccactacccagcttagctatctctcatttaaaatttttctttttaaaaaattgaagtatttttaacttaagtatgttcatgttttgcctgtgtgtgtgtctgtatacaaaatgcttctctgttgcccaaggaggccataagagagcattggcttcctgaaactggagttacagatagttgtgaaccactgggtgagtccagggaatgaaatctggggttggtttgtttgtttgtttgtttttaagatttaattatttcatgtatatgagtacactgtgtcttcaggcacaccagaagagggcatcagatcccattaccgacggttgagagccaccgtgtagttgctgggaattgaactcaggacctctggaagagcaggcagtgctcttaactactgagtcatttctccagcccaaaacctggatcttttttgggggggggggttgttttggttttgttttttcgagacagggtttctctgtatagccctgactgtcctggaactctctttgtagaccaggctggcctcgaactctgaaatctgcctgcctctgcctcccaagtgctaggattaaaggtgtgcgccaccaagcctggcaaaacctggatcttaatggaagaacaagtgttcctaatcactgattcatctctctaaccctgccttttacttttagatttttattgcatgtatgtgtgtgtgtgtgtgtgtgtgtgtgtgtgtatgtgtgtgtatgtatgtatgtatgtatgtgtgtgtgtgtatgtatgtgtgcatgtgtaccacatgattatttttacgtgtaccatatacatggttggtgctgggaaaagccagaagagggtgttggattccctggaactggagttagaagcaccatgtgagtactggaaactggtcctggtcctctgaagaacagccagtgctcttaatgaacaagccatcttccagcccctatctgtgcacggtccctattttcatttaatttaacaagcccaggctcatttgaatctttgttatgtaatccaggcatgtttttatttcttcaagatgtatttatgtatgtattttatagataggaatgtcttgcctgtatgtatatctgcacaccagaagagggcattggatcctatgggactgtagttacagatggttgtgagccatcatgtgggtgctaggaattgaacacaggacctctggaagagcaacagtgcttttaatggcctctgcgtctctcgaaatcctgccaggcaggttttcaactcttttcttgccttagcctcctgactgttggattatagatactataatctagtatgtccagatttatttttttgttatttcagaggtaacaagggtgtctgtcagtcgggggctggagagatggctcagtggttaagagcactgactgctctactacaggtcctgagttcaaatcccagcaaccacatggtgactcacaaccatctgtaatggtgatctgatgccctcttctggtgtgtctgaagacaggtacagtatactcaaataaaataaatcaatcataaaaagaagaatcggtgtcagccacccagcctgggcttgaattcataatcctccagtctcagcctcccaagtagttggggctagtagcacataccactggggtaattttgtttgggatgctggggatgtgctcagtggtcaggcagttgcctagcatgcacaaatgcccaggtgtgtccccgcaacatggacatgaataactttgactttggataaaaataaacattgtttttgagaaaatgagacagttgtgaaacggctctacaacataccacatctcccccaaaagcccagccccagaggctgtggctgctctgtggtgctgcacaatctctgaggaaaagagtgtgaagtcagtgcaggaatgacttcccccactgcctcacctctgtccacaggacccagcagctacccatgatggcccgtgatggttccacagtgtccctgacttcctgaggcctggaagtgtggcgtcaaaggtggcactgtcacatacatctaatcaattttacccgccagcgatttgagtcatctggttttgattcagcctaatgccgcttcttcctccgtttcaggcaagaatgggacaggaaagacaaaagtttctgcagagcaagaggcgtgggagtgggagaaaggctctcctcatggcttccaggagggttacttgccagagctctgcttcagcagtgtctccctctcttgccatacccgagaaggccagttaggaaggtttcagactgactagtgcccaacacagctccctcttctatcttagctgcccccccttaccctttccactccactgattctctcctgtcccctccagaagaggagcctagctggtttcatggttcttagaaggacttagagcaaacccagctctctcagagaagtgaagtaactgaagtctcgcagttttgttcctctattcactcagttcttcagaacatgccttctaatcctccaggatttacctccaaggccatgtcatctgtggctcttcctagacaaccctgaagccatgccttgcttactcctcccttgccccagcaccttacattcacactcaggaagagccctgtcactgactgctctcttagcccttgctttttgagactttaccacctagcccagcgactcccaatatgagatttacagacggaggtcatcaccctcaacttcctttaatctgactgctgctgcttcccaggtgctgggatcaaaagtaagcaccgtcatacccagcctccagctttttatttttatttttccaagacagggtttctctgtgtagcccaggccatcctggaactcactctgtagctcaggctggccttgtactcagagacctacctacttctgtctcccaaatgctaggattacaggcctgtacctggccaacttgttttaattataaattcctttttttttttgtatttgttctaccagattttaagttccatgagagcaaaaaagagcacacttcttattttcagtgtccagtatgtcatggatgtttgagagatttttgttaaaagtcagacaatcctctcgctgaagaagtaagctgaaacaggaagactgcttctcacttgatgccacagagtgaagctatgtctcaaaacacgcccccaaataattttattttattgaacaatgtagtgaccatggtctgggatgagctcttgtcctcagaactgtctgacatgaacaagaactagaaacagaatatgctggaatcagggccagggcaagttttcaggtttcatctaattctttggggcttttgcccccagccacctagagcctaggctctagggcaccaggtgactcactgaggcctgcattgtaagcagctgccggcaggggctgactcatccgggagagtgtactcagaggtccctcgacccactcactgtcttttccagcaagggaggacttgccatggccatgtctgtgctctcgggaattgtggagacaactccacacctggcctggcctccagtcttgcatggctcctgagaaattctggggcctgaaggaaaaggacacctaccttgtccttgggtctactgagcgggacgacctgtgttccaatcagcttgccttcatatctacaggatagatgggtcatcctatacggtctaagaaagttcgtgcctgcttggctagcaaatagctgaccggcctctgtgttctggactataaaagggagcaggccagcaggagtccaagccagtgagaaccccctcctttgatgagtgtccaagactggggccggtcatcctgggaggaacagcttacccagcctagcatgtttctccacagtggagaagatgacaactgcccttgtttctcaaagctcccccggaacaagagacctttttctttcatccttcccttttcagaagcactctgctagaagccagaaaggtggactcagcttccatggaatcttcctagctaagtactgacccccaccagagccccttccctagcctatgcctggcctgcagagtttgcatctccctccctcacaaggcaagggccctcgagctttgctctggcgatctcccagcagagtcaggctggctttgcctctgtccacggttcttaatccaccagggaacgaaaatgactcattaacatctccccggcacttgcagggcaccttggcgtctgatctctattctttcccccttggggtggcctgtccggaacgatctcctgtctaagtcagaggtgaagtaacttgcccaaggtcacacacagtgggaacgtggcaaaaagacttatcttctgcctggcagtttggcaggtgctcaaatctttgtgtaaagggcgaggtatggtgtttcttcatctttctggcctctgggagtgtctttaaagggcttggaagggatgtccgtcttcccaaatgaacattttatctccttagttcacgctcactttcaaagttagatttaactctaatgtctctgtgttcaaatagatagattacttcgatgccccttcctacgagagcaaagagtacatagtctagtgatgtttcttctccgaagaccaataaaaaaataaaaatatttcccccaaataaacagctccacttctttccaaaatgtgcaaccccaagtcctgccccgaggcgccccagcacacggtccgcagacactgcgccggtcggcggggaggggaggccgcacggcggggagctggtgggcgcccggcgcgctgccagcctcagccggaccgcaccgcgggggccgccgcccctcgccacgtggtggtggcaaccgcggggtcccgggcgccggtccagctggagagacccggagcagccggggaggaggaggcggaggagacggcggcggcggcggcggaggaggagcggggcgggcgagcnnnnnnnnnnnnnnnnnnnnnnnnnnnnnnnnnnnnnnnnnnnnnnnnnnnnnnnnnnnnnnnnnnnnnnnnnnnnnnnnnnnnnnnnnnnnnnnnnnnnnnnnnnnnnnnnnnnnnnnnnnnnnnnnnnnnnnnnnnnnnnnnnnnnnnnnnnnnnnnnnnnnnnnnnnnnnnnnnnnnnnnnnnnnnnnnnnnnnnnnnnnnnnnnnnnnnnnnnnnnnnnnnnnnnnnnnnnnnnnnnnnnnnnnnnnnnnnnnnnnnnnnnnnnnnnnnnnnnnnnnnnnnnnnnnnnnnnnnnnnnnnnnnnnnnnnnnnnnnnnnnnnnnnnnnnnnnnnnnnnnnnnnnnnnnnnnnnnnnnnnnnnnnnnnnnnnnnnnnnnnnnnnnnnnnnnnnnggcgacagtttctgtccgccgagcccgaggggtttaaagagccgctcttaaagggccgccggaggggccaggcggggacgggcgccccctccccagtagcctgcgcgggcgctcggcgcgcggccccaggatgcggaggaaggcagctcgggtcgcacggccggggtgtgtggggacacggagtcctcgagagtgggggtgatggccggagatcgtgggcagggatgggggtggggtgtgtagtgagctctggtcggcagagtagggggaggggtggcgtgggcaagagagggttaaaggtggggccagcccttcaaacacgcgcacacgctccttactcagacctgtcacacgcgtctgtcgctccggcacttagccgaggctgggggatgggggacccgaggcctgcactgtcggaactcgcgccttcggaccgagccccctcgccggagcgcacacacgctccagcgcgcgcacacacctcggacattcccatagtgcctcacgtgacactcggcccgaacgtgcccaccctacccacacgctcacgcacgcgtgctcacacgcgcgcgcgcgcacacacacgtacacacacacacatacacaacctctggtcactcccgaactccgcgctgaccccggtcctccgccccgcaaaagcactcattgacggcggcacacctacactcattcacagacacacactcccccccacatggcagccacagccacacattcataaacaagggcccggagatgtacacacgcaccccctcgctgcctactcgttttgggagccctgagtcattcctgcccccctcccagggctccccatttccctgagtgcaggcacaataggacaagctggagtctcccttaatggtctcggttctcctaggcccccttgcccagtttgctgcctctgacactcagccaaggacttcctgtaggtctgcgcctggacggttgccacagccccggcgcacttggggaggcacttccttttcctgaactctgggatcctgcgggaggaagttgggcgggggccacagaggccaggctgcctagcgggactagccttccttaggagcaggcgacagaggcctgggatgggaatcttggcggctgtcgaggtacttggggaaaagggaggtctggggaggagaccaagccgagtagtctaggcaggttctgggctgtgccaatgctgggacagcagccctccctcccatctgtccacaggtctctcctccctgcccctgatccttggtcctgtttatcagttgtcccccactccactcatgacgtctatctggttccatttccttctataagcagtcacagcaggggatagggcagaaacttgagagagaagagagagagagagttagttgtgagatctgtctcttggctgaagctccccagctaccacaggttcctcagaccagcatggaagagttgggaacaaagagcaggtggtcctctttactctgttcctgcactctcaggaggcccagggtgggctgaagcccttaccatggagtccatgtttgaagatgacatcagcatcctgacccaagaggccttggggcccagtgaggtgtggctggatggtcctggagacccgtccctgggaggggacatgtgttctgcctcccactttgccctcatcacagcctacggagacatcaaggaaaggctaggaggcctggagagggagaatgccaccctccgccgtcgcctcaaagtctatgagatcaaggtcagaacctagatgtgatggcgagctgagcttgtagttgcctgcaagggcaggagggtcccaagaggtggccagcactggaggctgcctggtccctgaagaagtggctgccttggggatgaggagctctgctcctgcagccaatctcaggggtggaggaggagcccagctttggagtggtgggtcccattggagggggcggggagaggcgcctgtgaagctggcagtggggttgggggacagagcggtcctgggatgggaagccaggcttctcagaggacgaccctcccacagtatccgctgatcactgattttggagaggagcatggcttccctctgtatgaactcaaggatggctccctgctggaggtggagaaggtcagtctgcagcaacgactcaaccaattccaacacgaggtaagcccttgcttcgcttcccagccaaccccactcccttagcctcctgcttccctcactttgccctcaaccccgccctgcccccgccttccctaaatcagcttcagcgcttcctgtttctattgggaatagggttggggaggttgggagccccctctgctccctgtcaaggctggtcctgaccctggcacacctctccgggcctacccagttgcagaagagtaaggagcaggaggagcagctcggggagatgatccaggcttacgagaaactgtgcgtggagaaaagcgacttggagacagagctgggggagatggtgaggcccagagagcgggtgtgtgtgtgtgtgtgtgtgtgtgaggtatctgacgtgatgtgattctctacgtgcattccaacccgatgagtgtgtgctgcctgtgtgtcacacacactctgctgcgtgcacactccctgtatccactcgtccctgtctgtgaatgcctgctttgccgtgtgaatgagacagtatcatccgggtcatgggtgactctgtaccttgggctaggatgctgtgtgtgtgtgtgtgtgtgtgtgtgtgtgtgtgtatttggctctcacactgcatcaaccctgtacctatagtatagtatagtgtctgggagagggtataagtgacaagagaggtgccagagctctccatagtcccagcacaagcgtgatgagagttgccatgtggccgtttgtgtgtgggcaggtggcagtatcaggagataaggtctctgccaactcctgtgctgtgaccttgatcaagttatttagctctcacccctcatctgaaaagcagagaaaaacggtaagccatctcactaagctgctgtgacggcaacgggacatttgtgtaaaacggttttccttttatagtcaggaacgtttgcttggtagtcgcagcgtgccaggcactgttcatatccctctacacacatttactcattttagctctcacaacaatcaaagaggtaggcgtggtactgctatccccattttatacaggaggtagacaaagcttagaagtgcttaagtcctgtatgcaaatgcaagtcacatccctgagggtttggggtgactggacctggagcccagtgttggcataaatgtctctgtgtgataagacccagaggaggtttggctctgaccttgccggcaccagtagccagaaacatctgcattgcaggagctgtgagaggagccttcatacctgtgaccacttgtcgtgtgagtgtaggacactccagctgtctgtgctccagtctggagagtgatgactgcccagcctgggggactcttgggtttgggagaccacagggctccctggcgctctgtagacccttggccgtctgtcttccctgcagcgggccctggtagagactcatctacggcagatctgtggtctggagaaacagctgcagcaacagcagggcctccgggacgcagctttctccagcctgagccccccagctgtccccgcctcagcctgtcctgacttggacctgcactatctggctctgagagggggacctgccttgggtcatggtgagatcttagtgactcctaccttcctgctctccatgtctctgtttaactcccatttcagtgtgactgggcacctctggcttgccgaaaaccccattgcaatatgcttcttttttttccttttctttctggttttttcctttctttttttctatttgtttgtttgtttgtttaaagatacatagcccaattggtctggtatttactgtgtacgctaggctatccctgaacttggagtaatactccttattctgtctctccagtgctgggattacaatcatataatatcacaccaggctggtgtcttcagtatcttaaatttattcataattattcccttctcctctccaaccgttcctcctccccagctacttttcacaagttctcccactgatatcccttggccgttcagatcgtgcaattctcgggtgtgccagcagagggcgtccccactcagtccccctaggctgtcatgagtagaggcccctgaggatgttcccgactgctggttctaatctgagacaccttcctgagcccattcttgtttctcctccggcctccctgattgaatctacaacaagcccattcttagtccccttggaatagtatctgctccttccttcgttgtttgtctttctggctcctctcagtccctgcccataccggtttcactttgtgcggatctgggagtcagttggggcagctagagcctacccgacatcatcttgtctcctgacagcaggttggcctggccctacgagtgtaagtgtgagcgagctggagaggaggcgcctggaagaggccctggaggctgcgcagggggaggctcggggggctcagctccgggaggagcaactccaggcggaatgcgagagacttcagggagagctgaagcaactgcaggagacccgggcccaggtaaagggtgctttggagctgcacagagtagccgaggagggaggggtctgggcagaagtgaagctggctctgacttcttgcttctctcctcaggatctggcctccaaccagtcggaatgtgacatggcttgggtcaagagagttggggatgatcagtaagtcacatctagcccttgccctctcgaccccatatgctaggggactatcccagggctccatcgtttgccctccgtctgtccacatgatttcagtgacctctcttcctagctcttggggtgtggcgcctgggttgcttaccactctgcccctgtcacaggaaacggggagggactctgaagtagtctgaatctggaccaggcccatctcctctcaccctgtggggtgggagatgtactcagtggcactgcgccccgttctgtgttctctatactgagtttgtatactagaaacaaaacttcgtgggtcaggttacccactctgacttgtgaggagggaggtagtctccctcatttaggatctgacctgccttgtctgtttatttaaagggaggagtgcttgagatgggtagaggggagctagctgtgtctgtggggccttgggatgtgctgagcagcacgggaggtgagtgctcacggagcccggtgactttcaaggcctgccgccccactctgagaaactgcttaaacttccttgtgcttagttcctctctgggagatgaggcaggtgatacaggttccacacattccttaccagagaacactgaggctcagagagggaggagctagccttccctcacacagcataaccagttcccaggatcccaagggccctccctcccttccaacaggtttcctcagtatcctctctgctcctggccagccaggggtaccccttgcttcctcccccttgcagggtgagggcctgggtggagctgtgacaaccagagagggtgagaacccagtgtgtgggactgatgagggagacccctccctcagctaggcttctgtgggggttgggagggagcttggtggaaagggtccaccctagcttgtgactggggctcggggaccactgaggcccctatgttcaaacctggaacacacacataccgacatagtgtaaatacttgctcatcccagaagttatgccaaaggcactactaggagtcagtggttccagccccttctcatagtgaaagttacacacacacacacacacacacacacacacacacacacacacacacacgaatgcatgcttaatggaattcacagggctgacataccagctttgatcccaagaactcggtctgggttggggaaaggcctggcctttgtctctctggaccctgggcagtcagtcattcctgtcagatgtgagaggggagggtgaagtagaacttgggaaggggcagggaggggaggatcctcagggaacagggatgcgtgtgcaagggacgagggatggataacaccatctcagaaggtgtttccaaagttctgtcagtcacattgcttgttctggacaaactagtcccttccctcccgacctgagggagctggctgaggcaattctcccatggtgtggtgggctccccttaggcttgtgtgtggcttctttgatcatagccccctggatctctgtcagcctagcaggccctgcctgctcattccttcccttcagcctatgtgcttctggacagccccagcgtgacaggatcaattctcaaaggaagtccttactctcctggtagctttattttcttattaattcagtctttttggtactaggtaattccctggggctcccgcccatcctcccacctaaagatggctcagtcacctctttcagctcccaggatcagcaaccctcctcttccatttacttccgctgactccatatcaagtgggaattttattgatgggctttcctgggagtgaaatgctggtaccaaattacctagagaaggggggcagctcctgagttcagcctgtctctcggtataaatcttcctatcttgaaaggtaccttccttctcagcttgttcgctggggcagccaaggtgatcacagtgatcctccttccaccaatgcctgtaggaaccccgtcctggggctgtctgtgcttaggagtaggccgtggacatggcaggcagttccttgttctcagctcctggcccacaaactctaaccaccagtggttcccagcaagcaggactgacgccaggccagacacaccaggctggcatcctctggcctgcgggtaagattctagtggagagcttgctgcctggtggtcatagcccagcccagggagccaaatggccacagaggaaggcagggaggcagggaggagggggcagtggagttcactgaatttgtgaggattttcagggagggaaggacccagggaggtcccagtcaagatggcaggtggaggatgccccgtctcctcccctccgagcctgtggattcctgggtggggctgctgaaaggatggcaaatgctggggaacacaggcattttagggagggctccaagtagatcgcgtctctggaagtcaggtgaggtcttggtggtgaggggcccagtgaaaagatgaagttcactatgggtcatgagggggaaatagtgaattacagccctttctttcttcctaatgtggggggctcaaggttgcaacctggggccttttccgcccactcctcccacccctctctctccacccacaagcctctgcgtgggctgtggttagtggtggggaagtgtgaactcagaagagagaggatggaaactctgcacagaggtcaagggcagtgtggggtgggtcaggacggaagtcggagacccccatgtaccctgagcttagcctcctgcccccagagccagtaagcccagggccccctcctccagacttctccccctccctacttcctttcctttaagtctccttaggcctggtacccagagcacaaagaattaacctcttagcacttgcagccacagggcaccctgagggtgggcaggggctctgctggtctggcggactgtgggtttggaaggcatttccaccctgtgcacagctgccggctgggcccagagctgagggcggcccctgtcatccttctccctgtagagacatgcacaccttatcgcttatcactgagcggtttttgttgttctttgtcagagagttttggtttggtttttgttttttaagacagaggttcacatagttttgaacttgttagagagctgaggatgcccttctaatccttgctcccccaggtctccctcccaagctcaaacgttacagagtgtgctaccaactgaggtttttatttattttattttattcatttatttattttgagacagggtcatactatgtatctctggcagtactggaactcactatgtagactaggctggactggaactctcagagatgtgcctgcctctgctgggattaaaggcgtgtgctactatagccagcgcttttgtctttttttttttttttttttttgagacagtatgtcaccatgtagccttggctggcctttaactaatggtggtcctcctttttcttcttcccaagtgctcggattatagacatgagctactacatccagcatactaaatcttaatccagtaccttaaaggccaaagctttgacgtggcctttctcacccacacctgtctgtctagactggacccgaggtgaggtgctatctctacaaagctttatcttactctcataaacatgaggcactaagacattgaggagccagggatgggcagtccaggcaggtcccagcttagagtgaccaggctcactgttgactgctcgggtggttctgcaggtaggaggacttttataagagggtgaccatgtgatttgttgaccaaattgcatcacttttgaaagtgaaaggggacattgttaattatgcaactagtgtgaacagggacaggcctgggcaaactaggaagcctggctcctgccacactgtgagctactcagtcccacggtatcagggaaacttttgggcacctagccacctcactctgcctgggagagagaggctgccctgaagagctcaggtctggggaccacaagtcttagctggtcgaggagcatgagggctcaaggctctggaaaggaagtggtggagcactggcttgttgcaaagcgacttcctcctccgccagcccacaacctcaagtccgctccacggcctggtgcctgtggtcccctccctgagggtctggcaggcgggaagactgatgctgggtgtgcctgtgggtgggtggaaagtttggcccctaaattcccctgctgggcggggtggctggggcgtcgaggggcagccatgggtaaagatggaagggttgggagggccgggaatgctgtttctcacaggcctgcatccagggatggttctgaccacatggcagacctttctctggcgtccctctcctcacacacctgattctgtccccagcccttacactgtactgtgcctgatttttacccctatttcttatcctgaccctcaactgtacccatagccatgaccacagaagaactaccagccccatatgtagctggaccctcatggtggctgtcattccgtctttaacccagtctcatgacttggctgcattctggccctacggaatccaccctgtactgagtcaggaggctgagggagtctgtgtggctcagaagctgctctgaggcagagaggtttgggagtgggcgctcagatcttaggtcttctggtttgcaggtgcttcattagtggctgtgaagacaaatgccctcggggggggggggttgagatttccccggactactggagggaaggatgaatgacatgttaaaaaagagtgggagcccccctcctgccggctctgctgctggtgcgccggcttctctaaagactccagggctgaggtgcccagagcaagtgtttgagccactgctctgcgggcaccaggatctgccccgtccttgtgtgcctgtcagcctccttcactcttcccagggtacagcacttctctcaacacctgggcctcttcctcctcctgttcccttctgctttctcccttcatttctctcacttccatgaggtttgggagccatataagtaatgtctatagcctggacttaggaatctgggagactggtgctcctatccgagctttaaggacacggccaagtgactttacctctgtgtacctcttttcttacctgtgaggtggattggcttagagtaggttgtgaagacaagtgaagttcccagcatggagcctggctccctatcagtgatcatcacccagggcttcgtgtgctgttgctcacatgacctgtttctcccccaagccatgactgtgaaaagcctctcaggtgtggccaggaagtcaggaagcggggtgtgtattcagacgcacgtgtgaggctctgtgttgtgttgtcaagttgagttttttttttccactgaattggcagtgttttcagtgagtcactctagtatgcaaccatcagtgtgtgaggagagagaagccaaagaaagggcatgccccacaggcctgtggggtgtcaggaggaggccagagcatgtcagtctgtccagggtctcagaagtctttgtgaggctgggctggggctcttagaggatgtatcagcttgctctgggcccagtgtcatctcggagagggtttgagctctctgagccaggggcttcttcagtttcttgtagctccaattgttttccactccaaggagaatgccaggcgctaggctgtggaaactagggtggctcctgacaagggagccagcaggggagcaaggggccttgggaactgaatgtgacaggtgagatctcccaggcagggtgtgaaggagccgacctgtatctgtcacctgagatgcagcagggaaggtggctgaggatagcaactgctttctgagcagacctgacactccacaactgtactgtcctgagccccctggctcccctgctgtgtgtgaagcatgatcctgccccccccaagcccccagtctgactaggaacacacagctcctgccctcggattgctttcagtctaaaaactgagacttccctggaggagtccccagtctggtgtgggacacacctggacttcctggcctgacaggaagacatcacgccttcgtagacttgtgagatgaagcagaagatgcgtcttacaaacatgggacctgagatatggtgggttggtggccatggagcctgaaactgggctcccaagatgacgggcagtgaggccttgttttccctaagaagtgggcttaactcccagagttcttactgtaattggattcaaagtagtgttacaccatatccccagattacagagagtgccagtctcggagcccagtctgagcagcctaaccctgaacttgatctgtaacccaggctgtctgtcagttcttctactcccgcatctgcctcctgagcagcagagatcctgtcaccaggggcctgtgctgatatgtgtgttgtgtgaattcagtatggctttcttaggaactgcaatttctgcaacaattagaaaaacgttcacacatacctgtctgagctatggtcagcccccaaatgggattcagttcagggaccccttggtatctctctattccacatccttgccctaggcagggctccctagaagagatggctgtggccgtgggtcttaaagcacagtggatccctgcagctgggctaggtgtgaacgctgtatggccgaacaggttcttttctacagccaaggctgaagaaccacatcccttttcttcctcaccccttgccctctgacctcagggtgaacttggcgctggcctacacagaactgacagaggagctgggtcggcttcgggagctgagttccctgcaggggaggatcttgaggactttgctgcaggaacaggcccgcaacgcaggtgagctgggcaggtccctggtgtgggaacaggagtgctgggccctggagtcatcttccactccctgggtgggcattgccattgtaagccctctggctcgcctcttcacgcagtctgtcctgctttgtcttgcccaggccaaaggcactcaccgctgtcgcaacgtcactccccggcccctgcgtgcccctcaccctccccgcctgcccgaccgccgccctgtgccccgtgccagtcccccgctgcacagcgccgttcgcccgtgcccccgtgcccttcgccccagcagcgccgctcgcccgcctcgccgtcctgcccgtccccagtcccacagcgccgctcgcccgtgccgccgtcgtgccagtcgcccagtcctcagcgccgctcgcctgtgccacccagctgcccggccccgcagccccggccgccgccaccaccgggggagaggacgctggccgagcgtgtctacgccaagccgcccagccaccacgccaaggccggcttccagggccgccgcagctactcggagctggcggagggggcggcctacgctggtgcctcccccgcctggctacaggccgaggctgccacacttcccaagccccgcgcctatggcggcgagctctacggcaggccgctcagcccgcgccgagcctttgagggcatccgcctgcgctttgagaagcagccatctgaagaagaggagtgggctatgccggccagcccgcccagtcccgaagcgggcaccatccgctgcgcttcattctgtgcgggcttccccatcccagagtcgcctgcggccaccgcctatgcccacgctgagcacgcacagtcctggccatccatcaacgtgagtagtgtactgcttccctcagcctgggtaattgagatgcagagcagagagtctgccctctctctggggtcgcacctcattgcttatcttcacacacagtaggcagggacgaccctgcaaacacatcctagtttagcctttccctccctccttttccggttggtaggaatgagtccccacccccacctgtactattaaaagtgtggtgacagtactggctttgattccgactccactgcatagtgtctgaaggacccccttcaagttctctccggttgtctcctcggtaaaaggaagatgctgctgttattgtcttaggtttttaggaagaggcaatggacctaaagtactactcagcctgtgtgtctcaagcacactattgttggtgagcgaaggatgggcttctaaaagggacagaagaacatggacccccttagggacaggcctaccagttccctcctccaagcctcagagcctgggctcctttctgtctgtcggcatggtaacccatttcagggcccgagactttcactaaatcagtgagtttcctgagtgtctcagctaccccttgccacttggaaggactaaaatcggggttgtatgtggcttaagttgactgtgtttcagtcattccagaagcatgcccaggtcttggttcccctccttactgatgtgcctgaggtaacagagcagtgactcttatctgctttcccagccctgtgggcagggcagtaaccgctgagctgctgacttgcagtggatgctgaggatggcgctggagaaaggatagccagactcctccatgcctgcctccatgcctgccgcaaccctccctgatagccgcagctctccctgatagctgcagccctccttgataggagtcctaggaaagggcaggtggtatgtgagaccgaatctaagtgccttcattttcttcccacagctactgatggagacggtgggctctgatatccgcagctgccccctctgccagctgggtttccctgttgggtacccagatgatgctctcatcaaacacatagactcccaccttgagaacagcaagatctagggcacctctcccacaattggctgtttctctgttctctctctcatcgcccccccaaacactcactttgaatgctgcatgaatctcgtggggggcccctgccccttgcggtccccagatacctccactagctaccgagtcaatgtgtgtgccgtcttccctggtccaggcaccactcagctctggctctttcctggaggtcgaccaaggctctccccatcttcctggtttccactggggagcggggatctggtctgggatgaggaggatataccctccacctctctctgcctttctgttcttcaacagggttgtctccaagaggaagtctagtgctcaggggagggagaggaggaggtgtcaagagctctgggagccccttcccaaatgtctgtctttcctgggctgtgttcttccaggaaagacctcttgatagggtctcagagcctgccctgcacactgatgccagcccttctgtctcatgaccgaccagcttggggctcgtggtactggggaaggaggcatcttatttcttgttagtcactgcaggccagctctgttctccccctctgctcaccctgggaaaccaggtggcagaggggtgggaggaccctgcaggccttggatgatccagcccaaaggggctgccttgaggctgggactcctgggccattaccctcaatccagggaactgtctgccagcctcacaggcctgggctcttcaggagcccctggcactaaggtgcagatcaccaaggcagatgcctccccccatcacccccactgcagctcctgacaccacaggttccccagagcccaagtgtgactcagcctgtgtttgctgggtaggtgtcatcagcccctgccttccaggccagaacctgagattgggcccagggtgctgtggagattaatttcaaaagagctaacccccttcccatacctacccacccacccctatattccctctgtgaaatctacctcagagtcctcccctcagaaagacaggggagtgggaggctggggccccaggctgaggtgggagcctcccgagggagtctgctgcccactatgaatccacccctcgctttgagcctccctggggcctcggccagccgatggcagtgaacgccactgtccatcgaatgtgccattctgatccaaatcttccaggccccctccccacacccctccttcctctgtgaagggggtgaggggtatgtcagcagggaaggggccaaggactccagagacatgtcattgtaccctgagtgttccccagggaggggacatggggaagggggcctgtagaggggagagagggccaagtgctctctgaacaagttgaaagtccaaataaaacttacctgttccatctgtgtgcgctcaggctgtgcttccgtgggcgggaccggggtcttggccctcactcggaaggtcttggaaaccactggggagctggggctggcgagcacggtcagatctggggctggctggtggtcacaggtgacccatgtcctcactgaggacaggtttgaagcagctgcccatccctgaccagctgcaggggctcttgagtttttcccctcagcatgtctggctagcagaagttctagagctctgggccaccttaatggatcagtagtagcccttatttttctcagataacttctgaatgctaggaggcaagctggaacagcacagaaggaagctgtgttccaggtcctcatgagtctaaggctatgaggacagggcaaggctttaggctcaactgctacctcaaacaccccaaaccgggaggtcagagctgggtcacaaactcatgacttttgccccagccttggctgtgccctctgtgtggaataaaaaaaaaaaaaaaaagtctgagttttttatgagttatttttcattaactctatcatctctacatgactttttttctttttttttttccaaatgaccatttctaaatagaaaacggacttgggaagggctgtaggtataacttagtggtgtggcttttgcccagcatgtacaaaagccctaggttgaatctctggaactggggagaaattacaggacatggaggtctacattcatcagtgacttgaggttcagctctagccatggtggctatccctccacattccgcaggacagccaacctctccaacctctgtgtggaattaagcagctgctgcctgaggcctgagcgccagggaaggcagagcggcttgcggatgtggctcacagccctgagaaaggagattctagaacaccttagtggtcccctggctctggaagcactggctcgtgcaacacagagacttagggatggtccaggaacacagaaggcaagggaaaccctgagccttgaggaaagaggcctggagcggttagagactgagaatgagcacgggcagacggggtgaccgaagtgggagtgggcccaggtgtcctgcctggacactctcctgtcatcggggtaaagagagcgaggggacattggatgcagactctggcagcttgtctccctgatttctagggactggggaaaggctcaggtacagggcagaatgttgctgggggctggaagagaaggcaggcagaggagggaaaaggcagcacatctccatctgtctccatctaggtcccctccatagcacaggcttccacctgacactcctgaaaggaaggggctgggagcccctgcgaccctcgtccctcccacctctcaggcaggactgtgatcacaggacgtttactatggattgttccagagcccagagggcaatggggactgagaattgcaggcttcagggaccaggaggttggcatttctaggctcctggaaatgaggtggaaggttggaacaactttctcttgaggagggtagagcggagacccctgagaggctagaagcgactcccgtggatccacttgctctccccagcacaggccgagcctctcagggcatctctctggctccatcccccaaatttccccatctggaggtctcgggtcatgcagactcttgcctctgtcctaggtccatgtgttggctatgtcaggtgatctgctgaggagggtgccagttctttgtggcttctgctgagaagaaactgataggtaataaagggaggggtgtatggatgagtgggctgtgttaatgagaaacacctcacccagctgatgaaggcagggggcggagttcttactccctgacatctttataaggcagggagccaggacctctctctttcagcaagaatgaaaacagagcaactttggtcaccacagagagaatggaggtcaccgatgagacattaagagcaaaggaagggcggagggcaaagggcaaatgtgagaagtgggacaaggtgactagccagggacagagaatggggagacaggaaacctcccagcattccattctttttcctgcctctgtgtccactcctgtgacttgtgagattttcagtgatccagagagctagctgctcctggccacccatgagttcccaccagatctaattccatccgccaggagagttctaagccagttctgagtgttagaaagccactggccctgcccaggagcagcctgagaaggacgctctggcttgaggtactggtccgtggcacacactagagtctatgcaatggccaggacacagctctccgttcatggccctgagtcccggcagggctgagggcaggcagggtaggcacagtgaaggacttgggtgtccactctgtgcccacactgtcttcaaggcaaaactctctctctctctctctctctctctctctctctctctctctctctctctctctctttctctctctctctctctctctttctctctctctctctctctctctctctctctctctctctctctctctctctctctctctctctagctgcaacctcttcctacagctttggccactcacccggccactttggccaagggcagagccactaggtgctcttcatagatgctccagactgctatgtgaatgtaggcacaggggaaggcagggaggagctggggggcaggacaggatgggtgtcaccagcacctccagcgcctcttcatttgcatttccaccgacaccctacttgaccaagaaaatggagccagaaataacagggagggggagtgggtcccttgggggatgactgagggggctcaactctcccacggtgcgggagacaggaggtcagcattacagctggccctggggagaagtgtgcccactgttgctcatccaccctcagactcagcagacaccccatcccagcctctccatgctctcagccccacactccctagcactaccctattcctgaggctactccacatccctacccagtgaaccctgtctctgaaatccctcttgctactgtgaagaccccagccctaccagctgggaagtggcccctgtccatgttccccagtgcggagcctgcctcctccatcagactgaatctttcccagatcctgagcctggacttcatgtctgtccatgagcaaagcaagagaccattccacacaggaaacaaatcggccaatatcagcagaacacatgcttagaacctatggcaggtgatagagaaaccagagaccagtgtgaagtctcagcgcctaggacagtgtagtaccctcacagaggaatctttcctccaggggctcccagttcaaaaggagcctgtctttatttaaataagttctccatgttgagccatagagggaaggatcagggccactcctgttagccttgcacatggtaggaagaactctactaccaaactcctgacccagccagccatttttctttcctcaacttagagactgtggcttaaatcctcaccaacacattcgatgctcaaactgtccacattaagtttacttctgccctcatagggcagcctcagcagagggtgggagcacaggagatagtggttaggtagggtgggccacagccagtaagtcctcttcccagcaaggggtcctgggactccggatggtgaaaaggggaggggggagggcacaggcagggaaatgaggtcgtgagagacagcagggagagctgtgaactcgcggtggggagttaacagtgagctgagaactcccttcactccccccccacaagagatgctattttggggggagagaatatatgcagtgcaggggcagtgggggaggctgccagcttccccaggggtcagccagctgcgtgctgcttctaactctcccagccatctttcttggcctcagtacattcccttaagtcttcttgttcctgacttgagatggggagaaatgggctaagagattcggagctagccttctttgactaccttccttggaaagcctctcttattcttgtatcctccgttgaacatgtagagggtactggggaacagaagcaaagcaaagtgcatcagactgaatgctctgggttatcctaatgtcttccaaaggcaccctggagccctcttccctcttggcatcaaacataggccttgggtgggtgttcagggaggctactgtctagaagccacagccctccctggggaagccaatcttgttcctaggcctcccgggagctagatggagtgtgctatcaagaagcaaagccactgcttggcacaaaggggaaattcttgcaccccagctcagctctcaagggccctgactcattttgggatgaaggctctaatgccctgtgggtttctgtggtggcttggggcaaagggaggaaaaagcaagcagatagagtgtggctggagacttttgttttcatttttagagtttggttgtttatctcctcaaaggtatggatttacccgaagaaggttggctggggatggtgagttaggagatggaaagcccatctcctaactcaggaccaattgcaatagaaggaactcgggggtagactttaggaagaataaaagaatacagacagcaaccagaaggatgctagccctcacccagatgggctgcagtggcttgtttcctccctctaaggctggcctggcacctgcatggtcaggcacagagggaacacagcaggcagcagagtctgaaggctctaacaggagggatgatggtgagtccagcacagcgatgtccccaggccctaccacaagtaagggacattagttagaaggccatgggaccagaagatctcctgttatcgcaggtcctcccatgctgggttcttgtcttcaggcctttcctcttctagctatgcagtcccaagtgatggagacagtggctccttggtgctctggagcaagagggtctgcagggctatttggcagccagatagcgctctaaagataggacctgatgatggatccatgcaccccagaaaagaagctaaggagctcaattggccaagactcctgctttaagcccattgaaggaggagcactaccccccccccttcctggagcccttgacctgtgggtgtgacagaagctgatctctccttcccccacagatagcaaaagcaactgtggatgggaggtgagggggaggatgaggagatggtgtgaaggagatagccttccccagcatgggtgagggcaagagaggctagtgccccctgtgctggtctttgtggcatgtcctgcgcacaggctctgtttcatattcggaacaccagcaccccttgcctgcctcggtaccacccctgcctcccagagaccccagtgtatgcagctctccaggagttctctgtgctcagaaactccctccccctatcccccaccgtgtgtgtgtgtgtgtgtgtgtgtgtgtgtgtgtgtgtgtgtgtgnnnnnnnnnnnnnnnnnnnnaatttgtattacatttatttatttttgttaaggagcttgtgtgccgccgtgtatgtgtgggactgagagaacaacctgaaagagttggttctctccttccactacacaggtccagggtctcaatctcagatcaccggttttagcggcaagcacctttatctgacgggcagcctcgcccatccttgtttattctctaacaattggatacatgtgtgtgtgtgtgtgtgtgtgtgtgtgtgtattctgttacccagggccatactatcatctaaagcgcctcaattatggttgaacagtgagtattcccctaactcacacatacattcacacgtgcactcatgcactggggcactccttccaggacacccacatgcaagacacatttcctcttgtgcatgtggcgtacacacagcctctcacccaactggatcactgcgacacatgggtatacctcaagtatcacaggaacaccagaaagagtgcatgcacacgaacatgtgtggcactcttggatttgaggctggtcccatcatccagtggtatgtcgataaacatttaataatcagctctccatctgacccatgactcagatggtgggaagagtcacacatctgtgttcttgctgtgtgagggccacctgcagtcaccactccagtgtccttaagagaagccacatgactatgggagctggaagcccctgagagtgctgaacctgggcagcagtggcttatcagggccagcttttcctgggagttggggttacccccttcgcaggcttcttttatcccctattctatgaacctcactctcctattgtttctcttcttctcctgcaccccttgggccaccagggatagctgatattcatacgtgcctcttttaccttgcttccttctaccatggcccaggccaccagtgaccccaggacggcttccagcagaaaggctctggggtgctgtttgttgccaaacctctatgtctgggctgcaactgtctctcaagcacctcattccttctcactcatcttctaggtcacggggccacatgtctggcctgccctggaaagctgagggagtggggagagaaccttcatttggcagaatggtctgagggtgaggctgtccctgctggggtgtgacagagccgtgtctcagcctccctcgcagcacggagagaggaagaaactggactaggtgatgctgatctattttccagagccgacatactgacattctgcacttctagatttttctagactctgttcaggaggaaattttcttagaattctatctctttccctgtaggccataaggaggtaacaaaagtgtttagggagcattgagaattcctgacaagatggtgggagaggagaatgaaggagaaagagaagacagtgggaatgaagaaacgaacacaaaaagagaaaagagaagaaaggagagaacggaaaaggaaaatgtaagggggaagggaagaaagaagaggagggggaggggtgttggctcttccagcattcagaaaatagagttttcagatgtatgggaaggggagcaggggataggagggaaagttttgctaaagtcacagcccatcctgactgtgtgatcttgagctggggacactcttcagtactgagcctcagttgcatcatcagggacacagcccactcctctgccgaaggacaagcgcttcactctgccttctgaaaactgaaaccacaaaattggcttgtggttgagtgcatatcagtcaacgctattcagcttggcttcccaagatgactaaaggggttaagaacccctctggttagacccccaaatcttcaggtttcctctggggcatttaagagatcctgagatcctgacaccacctggctgttggtagcaacattcctaacttcctagtcctgtagcttagagtagggagggatgtggccagagaatatcagggtcctgagagaagggcaaatctccacctgcctgtctgtctctgctgcagttctcaaggatcggtccctgatgggggcagggccggatagggtggattctctgcctagggcccaagtactaggcaagcaccaggctagcgctgaagtttaggaccaggcccttagggtggaattcccctaagcctctgtagctagctgtgttacctggacagactcttcctctctcttgggaagttctgctgatggtctttcaggtaggaggggtgcaggcggcagaagccagggccctcatgcccagtccccacagcagttgaagccctgtgagtggtccaaagttctgagtttccagggctacctgtctgcaagctgatcctgagttcaggggaggtgggtggagagacagagacactctccttttttcttttggaactcttggcctcttttctggcctcctttgggtgcaatgctgggagcatgaaggaaggaagtaacatttctgtattctgtaaggacatcttttagtaaggttgccatttccattgaaaagagacatctaaaagcacgacttaacactggctaagcaaacacagccagcagacgaatccagaccccagccgggattaggagggctctccaggccttgctgacagagtgcctgccctgcccctgaggaggctccctgcagcagttgattctagttgatctgaaggggctccacccagattccgggggtcctctgagccagcctagttcccatatccccttcttgatataaagagcttctgatgactctgtctgtcttgctaggaagaagcgggttttgccttcccctggaacccgagcccacagtcccctccagcgccctgggctctgccttcccctggaacccaagcccacagtcccctccagcgccccggggctgttctctttttgactgtccaccggtctcagtttcccattctcactctactttcctgctttcattctttctccatctttctttctatttcagcctccttacgctaaaactcaggcctccctagcaggacccctgcttcttcccttaggagtgagatactccagactttcatgccctcatctagggcctggggtctgcctctgacgcttgggagtgatgtatggagccttggaacaacgggaaggtccgcaggatataacctgtgacttgcacccttccgtttaagtgctggtgccccgccccctcactccacatccccgcccccctcctgttgggaagaagagtcagaattctgagttgggaagtacccacttctcatcaacccctgcagcctggcacctgggaggcaggacaatcaggcgttcaagcccagcctctgttacacagcatgttcgagtccagctggagctacgtgagatttgtctcaacaaaacaaattgccttccaaatttctccctccggagtgagtgagttaggaggtggcggacacttttaacatccctatacaagggggaggggcgctcctcgtattgggagggattttatggatgtaggaagggacccggaacctatgtatgaacctatgttttgcgtcactcgttgacactcgtagtgtgttagttccctcttccgctccgccctccttaccggagctcctcccccacagccagactcctgtagttaatggcgcaaaggcaccgggctcttagaagggggtgggtagctacgctgaggagggggcaggagagggacaggaaggcaggtaggcccacccccgccagtgcccatgccccccgagtcccgcctccccctggctgacttttcccagcttcgaggaaacacctccttttagcggaaagcgagatggtgtggggaagcactgactctcgggcacaggcgtgagcctgattttccagtccgggcggggcggagagagatggcactggggacgcccgggccagggggttgactcaaagccagaaccacagaactccttcactgtactgtcgtcggagaacaagaagccaccaggtttataagaaactgcgattcatctctgtcctcttccacccctctctaagtaatgaattaaagctagactcgaggaagaacctgtagtccgtgggcaagaaaaagactctgtctcaggatcttgctcgaagtcttgtgtattaaaggaaaacggcatgttaaggctatctggagccaaagggtggtgacccttgacctccccatatgttgtcaatcccccaaacaacagttctctcttttaaaaatttatttatgtatgtatatgagtgctctgtcttcctgtttatctgcatgcagaggagggcatagatcccatgagatcattgtgagccaccatgtggttgctgggatttgaacacaggaactctggaagaccaaccaacgctcttaaccaccgagccatctctctagccccctaacaatagttcttaagttccagtttgtccgcattctgcttctgctgcttcagtggggacattcagacccctctatagcagaatagcactcagtcctttggcagagagagaaacagagcagctggttcagcttcttaattgttggctc

SEQ ID NO: 584 - DNA, 2976 bp, Mus musculus
ggggccacagaggccaggctgcctagcgggactagccttccttaggagcaggcgacagaggcctgggatgggaatcttggcggctgtcgaggaggcccagggtgggctgaagcccttaccatggagtccatgtttgaagatgacatcagcatcctgacccaagaggccttggggcccagtgaggtgtggctggatggtcctggagacccgtccctgggaggggacatgtgttctgcctcccactttgccctcatcacagcctacggagacatcaaggaaaggctaggaggcctggagagggagaatgccaccctccgccgtcgcctcaaagtctatgagatcaagtatccgctgatcactgattttggagaggagcatggcttccctctgtatgaactcaaggatggctccctgctggaggtggagaaggtcagtctgcagcaacgactcaaccaattccaacacgagttgcagaagagtaaggagcaggaggagcagctcggggagatgatccaggcttacgagaaactgtgcgtggagaaaagcgacttggagacagagctgggggagatgcgggccctggtagagactcatctacggcagatctgtggtctggagaaacagctgcagcaacagcagggcctccgggacgcagctttctccagcctgagccccccagctgtccccgcctcagcctgtcctgacttggacctgcactatctggctctgagagggggacctgccttgggtcatgcaggttggcctggccctacgagtgtaagtgtgagcgagctggagaggaggcgcctggaagaggccctggaggctgcgcagggggaggctcggggggctcagctccgggaggagcaactccaggcggaatgcgagagacttcagggagagctgaagcaactgcaggagacccgggcccaggatctggcctccaaccagtcggaatgtgacatggcttgggtcaagagagttggggatgatcaggtgaacttggcgctggcctacacagaactgacagaggagctgggtcggcttcgggagctgagttccctgcaggggaggatcttgaggactttgctgcaggaacaggcccgcaacgcaggtgagctgggcaggtccctggtgtgggaacaggagtgctgggccctggagtcatcttccactccctgggtgggcattgccattgccgaggctgccacacttcccaagccccgcgcctatggcggcgagctctacggcaggccgctcagcccgcgccgagcctttgagggcatccgcctgcgctttgagaagcagccatctgaagaagaggagtgggctatgccggccagcccgcccagtcccgaagcgggcaccatccgctgcgcttcattctgtgcgggcttccccatcccagagtcgcctgcggccaccgcctatgcccacgctgagcacgcacagtcctggccatccatcaacctactgatggagacggtgggctctgatatccgcagctgccccctctgccagctgggtttccctgttgggtacccagatgatgctctcatcaaacacatagactcccaccttgagaacagcaagatctagggcacctctcccacaattggctgtttctctgttctctctctcatcgcccccccaaacactcactttgaatgctgcatgaatctcgtggggggcccctgccccttgcggtccccagatacctccactagctaccgagtcaatgtgtgtgccgtcttccctggtccaggcaccactcagctctggctctttcctggaggtcgaccaaggctctccccatcttcctggtttccactggggagcggggatctggtctgggatgaggaggatataccctccacctctctctgcctttctgttcttcaacagggttgtctccaagaggaagtctagtgctcaggggagggagaggaggaggtgtcaagagctctgggagccccttcccaaatgtctgtctttcctgggctgtgttcttccaggaaagacctcttgatagggtctcagagcctgccctgcacactgatgccagcccttctgtctcatgaccgaccagcttggggctcgtggtactggggaaggaggcatcttatttcttgttagtcactgcaggccagctctgttctccccctctgctcaccctgggaaaccaggtggcagaggggtgggaggaccctgcaggccttggatgatccagcccaaaggggctgccttgaggctgggactcctgggccattaccctcaatccagggaactgtctgccagcctcacaggcctgggctcttcaggagcccctggcactaaggtgcagatcaccaaggcagatgcctccccccatcacccccactgcagctcctgacaccacaggttccccagagcccaagtgtgactcagcctgtgtttgctgggtaggtgtcatcagcccctgccttccaggccagaacctgagattgggcccagggtgctgtggagattaatttcaaaagagctaacccccttcccatacctacccacccacccctatattccctctgtgaaatctacctcagagtcctcccctcagaaagacaggggagtgggaggctggggccccaggctgaggtgggagcctcccgagggagtctgctgcccactatgaatccacccctcgctttgagcctccctggggcctcggccagccgatggcagtgaacgccactgtccatcgaatgtgccattctgatccaaatcttccaggccccctccccacacccctccttcctctgtgaagggggtgaggggtatgtcagcagggaaggggccaaggactccagagacatgtcattgtaccctgagtgttccccagggaggggacatggggaagggggcctgtagaggggagagagggccaagtgctctctgaacaagttgaaagtccaaataaaacttacctgttccatctgt

SEQ ID NO: 585 - protein, 482 aa, Mus musculus
MESMFEDDISILTQEALGPSEVWLDGPGDPSLGGDMCSASHFALITAYGDIKERLGGLERENATLRRRLKVYEIKYPLITDFGEEHGFPLYELKDGSLLEVEKVSLQQRLNQFQHELQKSKEQEEQLGEMIQAYEKLCVEKSDLETELGEMRALVETHLRQICGLEKQLQQQQGLRDAAFSSLSPPAVPASACPDLDLHYLALRGGPALGHAGWPGPTSVSVSELERRRLEEALEAAQGERAQLREEQLQAECERLQGELKQLQETRAQDLNQSECDMAWVKRVGDDQVNLAYTELTEELGRLRELSSLQGRILRTLLQEQARNAGELGRSLVWEQECWALESSSTPWVGIAIAEAATLPKPRAYGGELYGRPLSPRRAFEGIRLRFEKQPSEEEEWAMPDPSPEAGTIRCASFCAGFPIPESPAATAYAHAEHAQSWPSINLLMVGSDIRSCPLCQLGFPVGYPDDALIKHIDSHLENSKI

SEQ ID NO: 586 - DNA, 2206 bp, Mus musculus
ggggccacagaggccaggctgcctagcgggactagccttccttaggagcaggcgacagaggcctgggatgggaatcttggcggctgtcgaggaggcccagggtgggctgaagcccttaccatggagtccatgtttgaagatgacatcagcatcctgacccaagaggccttggggcccagtgaggtgtggctggatggtcctggagacccgtccctgggaggggacatgtgttctgcctcccactttgccctcatcacagcctacggagacatcaaggaaaggctaggaggcctggagagggagaatgccaccctccgccgtcgcctcaaagtctatgagatcaagtatccgctgatcactgattttggagaggagcatggcttccctctgtatgaactcaaggatggctccctgctggaggtggagaaggtcagtctgcagcaacgactcaaccaattccaacacgagttgcagaagagtaaggagcaggaggagcagctcggggagatgatccaggcttacgagaaactgtgcgtggagaaaagcgacttggagacagagctgggggagatggagctgtgagaggagccttcatacctgtgaccacttgtcgtcgggccctggtagagactcatctacggcagatctgtggtctggagaaacagctgcagcaacagcagggcctccgggacgcagctttctccagcctgagccccccagctgtccccgcctcagcctgtcctgacttggacctgcactatctggctctgagagggggacctgccttgggtcatgcaggttggcctggccctacgagtgtaagtgtgagcgagctggagaggaggcgcctggaagaggccctggaggctgcgcagggggaggctcggggggctcagctccgggaggagcaactccaggcggaatgcgagagacttcagggagagctgaagcaactgcaggagacccgggcccaggatctggcctccaaccagtcggaatgtgacatggcttgggtcaagagagttggggatgatcatgctcggattatagacatgagctactacatccagcatactaaatcttaatccagtaccttaaaggccaaagctttgacgtggcctttctcacccacacctgtctgtctagactggacccgagggtgaacttggcgctggcctacacagaactgacagaggagctgggtcggcttcgggagctgagttccctgcaggggaggatcttgaggactttgctgcaggaacaggcccgcaacgcaggccaaaggcactcaccgctgtcgcaacgtcactccccggcccctgcgtgcccctcaccctccccgcctgcccgaccgccgccctgtgccccgtgccagtcccccgctgcacagcgccgttcgcccgtgcccccgtgcccttcgccccagcagcgccgctcgcccgcctcgccgtcctgcccgtccccagtcccacagcgccgctcgcccgtgccgccgtcgtgccagtcgcccagtcctcagcgccgctcgcctgtgccacccagctgcccggccccgcagccccggccgccgccaccaccgggggagaggacgctggccgagcgtgtctacgccaagccgcccagccaccacgccaaggccggcttccagggccgccgcagctactcggagctggcggagggggcggcctacgctggtgcctcccccgcctggctacaggccgaggctgccacacttcccaagccccgcgcctatggcggcgagctctacggcaggccgctcagcccgcgccgagcctttgagggcatccgcctgcgctttgagaagcagccatctgaagaagaggagtgggctatgccggccagcccgcccagtcccgaagcgggcaccatccgctgcgcttcattctgtgcgggcttccccatcccagagtcgcctgcggccaccgcctatgcccacgctgagcacgcacagtcctggccatccatcaacgtgagtagtgtactgcttccctcagcctgggtaattgagatgcagagcagagagtctgccctctctctggggtcgcacctcattgcttatcttcacacacagtaggcagggacgaccctgcaaacacatcctagtttagcctttccctccctccttttccggttggtaggaatgagtccccacccccacctgtactattaaaagtgtggtgacagt

SEQ ID NO: 587 - protein, 153 aa, Mus musculus
MESMFEDDISILTQEALGPSEVWLDGPGDPSLGGDMCSASHFALITAYGDIKERLGGLERENATLRRRLKVYEIKYPLITDFGEEHGFPLYELKDGSLLEVEKVSLQQRLNQFQHELQKSKEQEEQLGEMIQAYEKLCVEKSDLETELGEMEL

SEQ ID NO: 588 - DNA, 37513 bp, Homo sapiens
  misc_feature (1)...(37513): n = A, C, G or T/U
ttttgtcatgttttgttccagggaagcagttgatgagtgctgttactaatgctttctcccagatccattcagtggtggagaggaggaaaatgggctggttggatgtggtcttggtgccttgcagttactctgcactggttatgcatttaattctcctcttttctagttaaccttttgccagtgggttttccatagtctgggtatttgtccttatatcagttataccacctaaggcaactgggtgcaaaatgcattctgttcactcactgtctgggccttccccaccctagtcttggcacattccttcaagaatgtagttaccgtctgcttgggaagatgtcagtgcaaatgtgaagataatgggcatcggactaggctttggtttgccacaagtggcagctgcctgtatcaattacatttattaattttgcttttcatttttcccagttctcctcaccccccctttgttgaaatgttggacttgctgtcagaggcaactgtaatattgccttagggacttgtggagaaggggaattgctcagtgtagtgttttaactttcagaaccaagcaatctatttactcttacaaatatttaagaagtgtgttagtccaactttaagaaaaatccaaactcatcagcttttgatagcatcttggtttttgaaacaacttcaatctgtaattggcattcagaatgcccttggcatgccagtctgtgatggcatttaagacctgtaaaacacttgagcccaactcgattaaccaaaaccgataaccaccacctttatcttctaaataaagtccgctttatttttattttcaacatcttgctgctttttttttttttttttgtcccaaatggtgtcacctccatggaggtgaaatggtttgaaagtcagaatgtgtggtgagaggtgtttgtgtatgtatgtgtgtggggaaaaggagggacacacatcttgaaatggatattacatagtgtaatgtgatatagatgaaacagtgtcctacaaatgaggtaaggaaaaagtatgcatggaggatgtttcgtgtttggagagtttgaagcattcctcatcagtaaaacaggaatactgactaaggttgttctgcaaattaaaacataaaatctcagtgtttaccatttttcacttcaggtgggccaagctggcaccttggaggccaggtggaactgcaggcttgcactgtgtttctgagtgtttgtattgggaccaggtatacggtaatggggtttcttgtgggagcagttgctccttctctgccatttgatgaactaattgcattcttttctcaaatctcaccttcagtggagaaatgttctcagtgaatcattgtcctctgtttgtgcctatttctcaagctaattccgtgtctaatggatcatccaaaagttggcctttcacttagttttcatcatgtatttcatttctacttgcatttccccccctcaagaaacttagaacactagtttgagatttaggagactaggccctttcctttaaccctgctgcttattagcgtagtggtgcctgcaggctagttcatggaaatacaccctttcttagttaagcaaagtaagggctgtagactcccttttctgattgtacaccctgttagtaaacttttgatcatgcataccccatgtgtttataaataacatacttggactactataaccacatattgtgtaatcataagacacaaaaatagaaagtaaaaagcaattacatgataaatagaagttctagtatttctaaatccaatttggaggttactgagttatagagagtaaatttttaccagactgcattaagtcctgaacagcaatgattcactgagaacatttctccactgaaggtgagacttgagaaaagaatgcaattagttcatcaaatggcagagaaggagcaactgctcccacaagaaacccggttaccgtatacctggtcccaatacaaacactcagaaacacagtgcaagcctgcagttccacctggcctccaaggtgccagcttggcccacctgaagtgaaaaatggtaaacactgagattttgtgttttaatttgtagaacaaccttagtattcctgttttactgatgaggaaggaagggcagaaagattgactcatcacaccaaggtcacttagagccagaattcggagcccggtctgtcaaatcaaggctttacacatttgccctggacagatgctatgagcctcttagtaataaaaaaacaaaggtccatattgcacatacttaggatatgccatccatttccttcccagcactatctaaaagtatattttaatttcgttgtttatctgttgccagttttccccgctataacgtaagttccctaatgcagtgaccttgactgtcttttagtatgctcagctgagagagcgcctgacatatagtagaccttcgataaatatttgttgaactaatgacatagtagagttcacagagttcctgtgatggcatcacttagcctttgaagggcaaagcatccagaaacctgggaatggcagggccacagaagacttctagctcttatctgctggatgacttcaggctaacttctcaaccttggattaactgatggaatgggaacaggattagtgaatagtcattatttacatgatgttctttttatgtgcttacaagatgctaggcctgtaataagttctttcatagagtaataaactttatcaacactataaggaaggcaccattttagtcccattttacaggaggaaatgtgaacaggctaagaaccttgcccaaagtcatgtgggctagcaagcagtcctgacctggatttgtacctctagcctacattgtgtgccagtgttgtaaatgagcttatagttatcaatcagagagaaccctggttgagattttggaattcaataacaaagccattttgtcttaattctacaataagttccattattaacctttggcaactgccagactcttaattgagtgtgtgtgtgtgagatcagtttctctcctaattggagtttgaatgtgtgtgtgatcagcttccctcctaattggagtttgaaccaaaccatctccctgcacttctgctccctttctctctaagctggaagcttttgggaaccagggctgggggaggggtggttgttggtgctcagtggccaaaaaggccattaggctgctgagtaagctccacatctgaattaccccagctctgtcagctgattgcatgcacagcacaggcaggaggccttcaaagcctgagctgttccctctcccaggtgctccttggccacaggttaccaagctgagctgtcctcagtgtgaaatgtacctttttgtctgaaaggaaagtacatctcagctttggcatatggcattagctctggatgcagaggggcagcctgtcaccatttccgaaggaaagagttcacaaatggctctgtgtgaataagctcttcatagcgatgagcaatgcctgctatgttctgggcattgcccttcaaaatattttagtctttcgagtatgaccttggacaaattctccaactcttctgattctcgatttcctcctgtaaaacagggatcccaatgaaagataatgcatacaaagtttttagcacaggaccttgaactcacattgattaaccaatcagctactactggccaggcgcggtgtatgcctgtaatcccagcactttgggaggccgatgtgggaggatcgcctagaagttggagaccagcctgggcaacatagcaagaccttgtctctacaaataataaaaaacattaggctgggcgtggtggctcacgcctgtaatcccagcactttgggaggctgaggcaggcggatcacctgaggtcaggagtttgagaccagcctggtcaacatggtgaaaccccatctctactactaatacaaaaattagctgggcatggtggtgcatgcctgtagtcccagctactcaggaggctgaggcagaaaaatcgcttgaacctgggaggcggaggttgcattgagctgagatcgcgccactgcactccagcccgggcaacaaagcaagactctgtctcacaaaacaaaaacaaaaacaaaaacaaaaaacaggctgggcgcagtggctcacgcctgtaatcccatcactttgggaggccgaggcaggcggatcacctgaggtcaggagttcaagaccagcctgaccaacatggtgaaaccccgtctcaactaaaaatacaaaattagctgggcgtgatggcacatgcctacaatcccagctactcaggaggccaaggcaggagaatcacttgaacctgggaggtggaggttgcggtgagctgagatcgcgccattgtactccagcctggacgacaagagcgaaactccatctcaaaaacaaaaacaaaaaaacacattagccaggtgtggtgggaggatgaggcaggaggatcacttgggcccaggcgatcaagtctgcagtgagatgtgattgcgctactgcacttaccaaacaactgtttacgtgccaggagacactggggatatagcagtgaataagcaaacaaaatcttcctgtggagctcacattctgatggataaataatcaatattcaataattcaatataactttttttttttttttttgagacggagtcttgctctgtcacccaggctggagtgcagtggcgcgatctcggctcactgcaagctccgcctcccgggttcacgccattctcctgcctcagcctcctgagtagctgggactacaggcgcccgccaccacgcccgggtgattttttgtatttttagtagagacggggtttcaccgtgttagccaggatggtttcgatctcctgcccttgtgatccacccgcttcggcctcccaaagtgctgggattacaggcgtaagccaccgcgcctgacctcaatataaccttttaaaaattctgtttgggagatagcagaaatgaacatggctgtggagaaaaatgaagcacatatggaattataaaaaacaaaaaacatctgggcgtggtggctcatgcctgtaatcccagcactttgggaggctgaggtgggggatcacctgaggttgggagtttgagaccagcctgaccaacatggagaaaccccatctctactaaaaatacaaaattagccaggcatggtggcacatgcctgtaatcccagctactcgggagactgaggcaggagaattgcttgaacccgggaggtggaggctgcggtgagccgcgatggtgccattgcactccagccagggcaacaagagtgaaactccgtctcaaaaaaaaaaaaaaaaaaaaccactctattccttcccaaaccctactaattcaattaggggctctgcattacctccacaggaatttggggacgtggtgaaggaatgtctttctaccactgccctaccctcccatctgatggaacacctgcagctgcagttggagtcccaggatgcttgcatggtgaatggcccactttctagggtctggaactggagggcgaaggtggcacctagatcctgcagtcacatggggctaatcaattttcctgcccgccagggttccatttgagtcatctgggttttattttgattcagcctctttaactggctgctaatgtcacctcctcctactcttttcaggcaataatgggacaggaaagacagcctccagagcaagagtcatgggagtgggagagtctccctggtggtttccaaggaggaaacactggcagggcctggctctgggggcctgcatttgcactgtctctcctaccttaacgattggaggtgggtcctctgttatcacacctgtgaaggccatttagaaatgttttacaactcatgcctgaccactgtccaccactttccccactgtcctcccactgtggctcctatccccttcaccatctcccctattattgtctccaccatgatgagccctgccaataccaggggctcttaaaagggattcagaccagctgggcatggtgtctcacgcctgtaatcccagcactttggaatgccgaggcaggcggatcacgaggtcaggagatcgagaccccatctctactaaaaatacaaaaaattagctgggcgtggtggcgggcgcctgtagttccagctactcaggaggctgaggcaggagaatggcatgaacctgggaggcggagcttgcagtgagcggagaccacgccactgcactccagcctgggtgacagagcgagactccgtctcataaaaaaataaaaataaaaataaaaagggtattcagaccaatgttcagctttctcagatgaggaaacaggcctagaaaagtgaagtagtcttaagtcacactgcctcatttatttattcattcaacaaagaacatactttcttactcttttaagatttagcttagccaggtgcggtggctcatgcctgtaatcacagcactttgggaggccgaggcaggtggatggcttgaacccaggattttgagagcagcctgggctacatggtgaaaccttgtctctacaaaaaatacaaaaattagccgggcgtgtggcatacgcctgtagtcccagctgaggcgcaagccaccacgcctggagactgaggtgggaggatcaccttagcccaggagggcgaagctgcagtgagccaaaattgcaccactgcactccagcctgggcgccagagaaagaccctgtcttttaaaaaaaaaaaattgtaagagctcatcaaggagaccttctctgaatactgtgaagcagatcccatcctcccattcttctctagtactgccccttggtgtttctttttatcctttatcacaatttccttccttccttctttccttctttcttttttttgagacggagtttcgctcttgtcacccaggctggagtgcaatggggtcacctcggttcactgcaacctctacctcctgggttcaagcaattcttctgcctcagcctcccgagtagctgggattacagggacccaccgtcatgcctggctaatttttgcatgtttagtagagacgggtttcaccatgttggtcaggctggtctcaaagtcctgacctcaggtgatctgcctgcctcagccccacaaagtgctgggattacaggcatgagccactgtgcctggtcctttatcacaatttctagtggttttacttattcatctttttatttttctgacttctctaccatactgcaagctctaagagagcaagagacatgtatacctgtcagagacatgttcagcactgtattctcagcacccagcacataatagatgttcaagaaatctttgccgaataaatatacaacgagcaggtaccaaccctcagggcaccttagaatacaaggatggatgggatataatctctgctctcagaactgcctggtatgagcagcagaactagaaatggagaatgcaatgagatcaggtccagattgggggagggggaggattttagggcacctaaaccaggcctaatggacttttgccaccaaccacctagaaccaaggatagaagcatttggctgcaccctgccaggtgactcaattaggccctgagcatccaagcagcagcagggggctgatgactcatcccagacagtgtgtgcttagagggtcctgggacccctttttccagtgagggagggcttgccagttggtcttatgggtcctgtttgtggccaagtccaaggtcaccgagggtcccagagacaaccctacacctcctagtctagcctccaatcttttgcctggtcccttgcttcagaagagatcttggggagtactagggaaaggaacatctgcctagcccttgggattagtggggtgacagatgtccccactggtttgccttcatatctagagggtagataggtcatcccacatggttcagagaaagctagtgcctcagagaacaagtggctgacctgccttcctgttctggactacaaacgggagccagtgctggcaggaaagactgaaagggaacccagcaggaggaggaggaaggaagccactgagaatccccccttctatgaagagaatgagtctagagctctggctggctctcctggtagaagctcacctctcagtccaattttctcccagcagtgaggaaagatggcagctgctgcttttcaaagctcagagagagcaagaaaccttttccttccatcctccccctcggagattcccacccccatcccacctcaggagccaaaaaggtaggctcaggttcccagcagtcttcgcagctaaggctgaatctgccaaaagcccccgcccagcttatcccctgcttccgggctttgcctccctgtccacagaggatgctcttcagccagagtgctccagggttcccctgatcattctctacctgcagctaggctgaccatgcctctgtccacattatttaatccaccaggcaatactcaaaatgacatcgttaacacttcctgagcattcgcaggctgctgtatttagttctgatccccattcttcctccatgagagtgcttaggtggggcatgatctccagcttagaaaggttaaggtaacttgcccaaggtcacacagcaggaaagtagcaaaaaacttgtttctcttgcccagcagtttggcaggtgctcaaataatctttgtgcacagggtgacatctgttgtttcttcatttccctgacctgtgggtacttgagggtggccggggagtggtgtgtggggagggagatggctgtccttcttcatgaatgaatctttgacctccttagtttactctcacttccaaagaagttacagctttaatctctctgtaccctatgttcaatgtatttatcgcagcaatgccccttttaccaagagcaacgaagagcaggtctaatgatttccttctcaaaagcgcaaagaccaaaaaaaaaaaaaaaaaagccaaataaatagccccacttcctccccaaatatacagcccataactaaacaaccaaaacaaccaaagcatcagccgggcccctgcactgaccgcagacgcccccaacacacgccaccacgccacactgcgccgggaggcgtcggggagggggcgccagcgcgggccgctggcgccgcagggagccggtgggctccgggcgcgctgccaggaagggccgcaccgtaggggccgccgcctctcgccacgtggtggnnnnnnnnnnnnnnnnnnnnnnnnnnnnnnnnnnnnnnnnnnnnnnnnnnnnnnnnnnnnnnnnnnnnnnnnnnnnnnnnnnnnnnnnnnnnnnnnnnnnnnnnnnnnnnnnnnnnnnnnnnnnnnnnnnnnnnnnnnnnnnnnnnnnnnnnnnnnnnnnnnnnnnnnnnnnnnnnnnnnnnnnnnnnnnnnnnnnnnnnnnnnnnnnnnnnnnnnnnnnnnnnnnnnnnnnnnnnnnnnnnnnnnnnnnnnnnnnnnnnnnnnnnnnnnnnnnnnnnnnnnnnnnnnnnnnnnnnnnnnnnnnncagagcgcggtaccaggggggtgggggcactggtgcccgtttggggagggagcaggcggagggggtaagctgcgattacaagcaggaaccggcagcagctgtgagtccccggctggggctagggctgggggaggggagcggcgcccgggctgggccccaggggtcgcggggtgggcaggaggaggcggcaggagggcggctggcagccgcacgggatggctgggagggtaaggggtccggtgtcggccgccctcatcccctcgcgtccccctccgccgccgttcctcaggccgcgccactcccggagccccttccccggccccgagagggtgtccgggggcccagggctcggccggttgtgggggagggggctgcgtggtctcggcccccgagaggggaggggcgacaatttctgtcggccgagcgaaaggggtttaaagggcggctcttaaaggggccgcaggaggggcccgggccgacagaggcactcaccccttccccagccgccttccattgcgctcacccgggcgctgggcccagagaggaatgcggaggaaggaggcatttgtggtgcggcctcggggacagagccccgccagcggggtgggcgcagaggggcgggcgggggtctgggggggtgtggtaagcgctggcgcgcggagctggggggaggggatggcgtgggaaggagagggttaaaggtggggccggccctacaaacgcgcgcacacactccttactcagacccagtcactcgcgtttccctggcacttagatgggcctgtgggtggcggaggggggggggtggattgaattggagcctgcgccggagccctttgcaccccaagctcctgcagcccgacctgggggccccgctgtctgaactcacagctccctgccgagccccctctccggggtgcacataacgctccagcgcgcgcacacacctcggacagtcccctcgcgtctcacgtgacacgcggcccggacgtgccaccctgcccacgcgctcacgcacgcgtgcacacaccagcctcctggtcgctgccccactccgtcccgacgcccctgcgaccccgaaggcactcattgactgacacacctacactcattcacagacgcacactccccccatacgccaaccccagacacacattcataaccaggcccgagagaagtacacacgcaccccctcactgcctactcctgctttcgggagcctgagtcattcctgccccctcgtagggttccccatttcccggtgcgcgggcaccctgagacagccttgggaattcgttcgcgtccccttccacctgggtccccttccccagtttgcgccccgtaacactcagccaaggacttcctgtgggtcccaggtcaggggccaaggggtcctggaccgctgccacagccccggtgcgcccgggggaggcgcttccttttcctgaactctgggatcctgcgggaggaagtggggaagttgggcgggggtgcagccgagggcgtgccgactgtggaggggccgaccctcgcgcagctctgggccttccttggggaggagctggggtgccagaggcccaggctgaggagcttggcggcgaggtatttggggaagtaaggcctggggtggagaagcgcggaggaatgggccgggcccggctgggaaggcagccctctcccatccacaggtctccctgggttctggcaggagcctgcccctgctgccggcctggcttacttgtccctacttgtcaacaccctggcagcggggtcttcacctggttccagccccttttccccaaggcggcagagaggatggggctgaggagtctgggaaggggccatgggagtccctgctgagctcggggcaggaagtttctgggttgcatcttagccggccccagggagtgcagagccagggagaggggtaccagggacaaaccctagacagacggccctgtccacggttgctcctgctctcctaggaggccccgtgtgggccgcggcccggccctcaccatggagtccatgttcgaggacgacatcagcatcctgacgcaggaggccctggggcctagtgaggtgtggctggacagtcccggagacccctcgcttgggggcgacatgtgctccgcctcccactttgccctcatcactgcttacggagacatcaaggaacggctggggggcctggagagggagaacgccaccctccgacgccgcctcaaagtctacgagatcaaggtcagaacttggagaggagggcgcctgatagagtgtatgggatggggagggggactgggaatctggtagataccagggatccaaaagaggggtcactgtgcagactcttgggaacttgagggtctcccatgagagacgtggctgttccggatgcgaactgtctcctgttggcttcagaagggctggatctgggatctaaaacagatccggtgggtgggagatggctacagacccatgggaattgggatcccactagccaaggagaaggagggtcaaaggtctgaggcaggttgtgggttgggggcacagccaggctgaggcctgggctgggcacccgggaatccactctcctgaagctccaccccacctgcagtacccactgatcagtgactttggagaggagcatggcttttctctgtatgaaatcaaggatggctccctgctggaggtggagaaggtcagcctgcagcaacggctcaaccagttccagcatgaggtgagcctaccaggctgggcgcaccccctgagcatcttgctccagtctgtttctgatacccttccctccacaccccccagcatctggcctctgccctttgattagagatggccaggtcctccctaagcccagctgcagctcctcctgcccctccatagggtgctgggagtgggggtggggaggtgcagggagctctccaactccaagtccagtgtgggactgaccctgtggtggggccctctgggcctcatccagttacagaagaacaaggagcaggaagaacagcttggagagatgatccaggcctacgagaaactctgcgtggagaagagtgacttggagacagagctgagggagatggtgaggcctggggagccggaggtgcttgaggatgtgtagctggttgtgtgtgtgcatgtgtgcatttagttctgtgtgtgaggattccagcctgtgacagtgcagtcccatgtgtcacacatcacttgtttgtgccctgcttgtgttcatgtgtatctgtgagtgcccgcccatttgcccttgtgagggagactgcatgtgttatccatgttgcggtgtctgtgtgcatcctggccatgcagtggccccgtgggaacctctgtctctgtgtgtatgcctggctgtcacgctggggtgaccctgtgcctgtgagcactgccctggctctcacgctggggtgaccctgtgcctgtgagcactgcccttgggaggctgtgagggtgagggcagaggtgaccaggagtgtgtgactgctaggatgggcctgtgcttgggtgtgcttccgagtcagggtatggctgtgccggtgagcaggtcaaaatcaagagacaggccaggtatggtggctcacgcctataatctcagcactttgggaggttaaggagtttgagaccagcctgggcaacatagtgaaaccccatctctacaaaaaatacaaaaaagaagttagccaggtgtggtggtgcacacctgtggtcccagctactcaggaggctgaggtgggaggatcgctttagcccaggagatcgaagctttggtgagccaagatcaagccactgcactccagcctgggtgacatagccagaccctgtctccaaaaaaaaaaaaaaaaaaaaaaaaaatcaggagacatggtctcagccaaccctaagctatgacctcagttaagtcacttagcctccatccctcctctgaaaagtggggcaaatattaacaccctcaccaggttgtggtgagggtgatggggcattcatgtatagatgctttgccttcataatcatagatatttatgtggcactcggggtgtgccaggcactgttcttttcacctggcatacactagctcattttaattctcaaaacaaccctaagaggtgagtgtgggactgttatccccattttatggatcaggtgggtgaagtccagaagctcttgtcatgtatgcaaatggaagttctgatgctcctgaggggggctggcctccaaacagggggctgagtgttcttttaagtgtccctgtgtgttaatgacagagcaggggcattaacttgacctcgccaggggcaacagcccgcaacagctgcattgcggtggctgagaggagactttgcactcacagccacttggagagtgggcttgggatgtgtgacctggggcctctgctgtagtctggggtgatgactctccagacatggggaagtcctgggcctgtgcagaccctcccctctgtctctctctccagagggccctggtggagacgcacctgcgtcagatctgtggtttggagcagcagctgcggcaacagcaaggcctccaggatgcagccttctccaacctgagcccaccgccagcccccgcccctccctgcactgatttagacctgcactacctggcactgagagggggatctggcttgagtcatggtgagatctcagtgaccccgacttacctcctagtccccaacccccatttcaacattcctagacacctcgcacttacttaccatcccatttgtaatataatctatttctccataatcatcccatcctcccttacctgctgtcccctcacctcacccactgttaccctaatttctccccttctaactcggtcattcctgatcacctcgttgcaattcctgtgcctgccagcagagggcgcccccacccagagtccccccgccccgtctctggctgtgactaggagaggcccttgcagatgctctagacttgagtctggccagtaaagccttcaagagcccatcttatttttttcctggcctccaggaaaattagaaatgcggctcagcccatctttcctcgctgcccttgtcgcagtcatccctccttggctagctgtcctggcttctctcttggagtccccatgctgcatcctcctgtttcactctggctctgggagctggaggaggcagctgagctcgcctgacgttgtcctgtccaccgacagcaggctggccgggctccacacccagtgtgagtgacctggagcggcggcggctagaagaggctttggaggccgcgcagggagaggcccggggggctcagctccgggaggagcagctccaggccgagtgcgagcggctgcagggggagctgaagcagctgcaggagacccgggcccaggtaaatgcaggggcctggaacagcttctggaggtccagggctgggccttccccactgtgtgcagactggcccagggaactgtagacaagggccctggcaggggtgagcttgggctctgacctcttcatcttcttccttaggatctggcctccaaccagtcggagcgagacatggcgtgggtgaaaagagttggggatgatcagtaagtcacattggtaaccctggtccctccgtgatgtttgggagacctcccctcccagccctcaggggtgtggtgtctgggctgctgttgctctgtgtgcatccttcataggaaggaggtggggttctttttttttttttttgagatggagtttcgctcttgttgcccaggctggagtgcaatggcgtgatcttggctcaccgcaacctctgcctctcgggttcaagcaattctcctgcctcagcctcccgagtagctgggattacaggcatgcaccaccatgcctagctaattttttttttttttttgagacggagtcttgctctgtcacccaggcttgagtgcagtggcgcaatctcggctcactgcaagctccgcgtcctggttcacgccattctcctgcctcagcctcctgagtagctaggactacaggcgctcgccactacgcctggctaatttttttttgtatttttagtagagatggggtttcactgcgttagccaggatggtctcgatctcctgaccttgtgatccgcccgcctcggcctcccaaagtgctgggattataggagtgagccactgcgcccggacctttttttttttttttttttttttttttggatttttagtagagatggggtttctccatgttggtcaggctggtctcgactcctgggaggtggggttcttgagtgtttgggatctgggacattccctttgctttcctctggggcccaaacccatctcttctggagatgccagggctaagtgacacttactcggctgctttgtcgctgtgtccagtgtaatgtcccctgctgagcttttgggcctccgtagggccccattttctattccagtgacaaggcccggccagttgggttcaccctcccctccctagtgaggaagagggaggtggtgtttcttgggatttgttgggccttgtctgctgatctcaggagagagaagcctgaggcttagagacaggagaggtttccatgggttcacacagccgtggggtggggagttagaatctgctctgctagggtactcccttgaatcctaccaagaaaggggcagcagagagcggcaagggagctgtgttggtggggggcccagtgctggggcctccaggggggcactggacagcaagggaggggtgagcagccacccggcaacagtggaacctggtgcctttcacatccgcactgaactcaccctctcccactttctgagaaatagagctcaaacctctttccgcctaagtcctctcccctaagatgagctgtgtggcacagactccctactctaattggaggagaagactgaggcccagagaggggcaggaactaaccctccaccgcatagcatacccagctccggggctccggaggtctcctgcccagcaggcttcttccttatctgcctcccagcttctggccaactggggatacccctcgcctacctccctacctaagagtgagggcttgggtggagctgtgatagctggggaggtggtgagaacccagtttgtgggactggtgggtgggacccctcagctaggcctttgtggagagggtccaccctagcttgtggctggagcttggggcccatcatagcccatgtgcccagacctggaacacacagacacacacagacacacacacacacacacacacactctctctctctctctctcacactctccaatcctagcttgccccagaagtcatgatgtagggcccttcatgggtcactgaacccagtcccctcttaccagaccagcagtgaatctccctgaattggtagaactccaagggaggacattttggtggggctggagtctggctcttcaggttttgaatcccaggggcctttctttactgacttggactctacctctctggatccagtttccctcacaggctcaggggccagtcattgctgagagatgggagaggaaggtgaggcggtgggtagaagcagagaaggggcagggctcccaggggccaaggttgtattgtgtgagtgaaaggaagcccaccctataaggggctaggaggccgtatcatccacgctgcccattctggcaagagcagccccttccctctctctctcaaggctcctgcccttctcaggccctttggctggagggagctggcctctgcttgggggctggccccacaggcttactggaggccacctcctggctcctcccctccttccctgtgattaggctctgcctccagcctcccagatctctgcatctggagccagccaggctctgctgcccagccacacgcttcctttcaggccgagcgagcatctctggacagccctagtttggcgagcgttaattctcagaggaagtcctcactaccccgatagttttattttcttataaactcagctccttttggtaataggctgcttcccgagtgctccctcccctgtccttccacccaaggaagcctcagtcacttgctttcagctcctcttcccccactagtgcccctctttcttctgtttccacctgactttccaggctggtgggaattttacaagtaggcttttccgggagtggagtgagtgtcgaggctggatgacccaggtttggggtgtgattggggtgaggaggaccaggatatgaaggctgaagaggggtacacccaattcctgagtccagcccactcttaggcgggagtcttctgtatggtgaactctgtatgtatgtatgcccacctgtcttggtctagacacctccggggcagccagttttattgcgggagtcctcaaggttaaccgcccccacccccatctctattaattcccttctctggatcctagccccagccccagggtttcccagttccttccctcccagcccctggcccacaagttctggccattaacgttcccacgaaaacagacacccagaccagaccgaggcagactactaccctccaggtctgaccccctgggaaacccatggtttggtttgcccagctcctggggacagagcccagggagacaaattgccccagaggaagagccactgggggtcacgcagaggccaaaggcagtgatgagggaggcggtgggagcagagcccaccctgctcctgaggatgcacagggaggtaaagaccctgacccttggggggttcccagcccaggtggaaggcgcagcacccacaacccccttctctctgggcccagctccccagcctggggttccagagtggggccttttggagggtatggccgtgctgagggggaggggaaatgcgggggggggaacttcttgaaggggatgagggctccgaagggacagggggtctgtgaggggaataagggcccggtaagggagggtgggctcatctgtgcggggtccatctgggagaagatggggactcagtatgggcgatgaggaaaaaactataggcctttctttcttcccaacgttgggggctcagcgctgcagcccgggcccttttccgcaccacctccccccccacccctctctccacccacaagcctctgcgtgggctgcggttagtggtgggaagaagtgtgaactcgagagagaggatggaaactctgcacggaggtcaagggcagcgtggggtgggtcaggacggaagtcggagacccccgcataccctgagcgtagcctcatgccccagaaccagcaggcccagggcctcccccttcacgcttctcaccctccctacttcctttctttcaagtctccttcggccagggcacccgcgctgcactcacaggagttaacccctgagcacttgcagcctcgggggctcccagaggctaggtgggtctgagggatgtgtgggctttcagccccagtccttggtgctttgcctgccagcagggtggggagcagctcatgccagcgccccctccctcgatgggaaacgcccatcttccctccttaaaccgaagccactaggctgctgtctccaaaaaaaggctcaaaacaagtttccccccttctccacctatctgctaggcactcccctgaaatttttttttttttttgtccatgccagacactatgcgaggtgatttacctacaaaatctcatttcattctcacaaacgtgatgtaggtattgtcccccttttacagatgagcaaactgaggtgcagggaagtgaagtaatctgagagttcagtaagaagttcagtgcagatgccaagtgggtcctgagcagatcgggtgatggcacctctgcggtgtgtttctggttcaggttcttcttcaggtagaaagcccttatatgaggggcaaccgtgtgatttgttgaccagactggatcacttttgaaagtgaaagggggcactattaataattatgctggggcaactagcgtgaactgggacagtcctaggcaaactgggatctctgggcaccccacctatgtaggaaccctggtttccaggcctacccctgagctgctccaatcagctgcatctgggaagctttctagacccgggatgtcagctctggtggatttgtggcaggggctgccatgaagagccaggctctggggaccccaccagtcatagctggtcgaggagagagaaggggctcaaggcgcccgaaaggaagtggtggagcactgggttgttgcaaagcaacttcctcctccccgccggcccgcaacctcaagtccgttccacggcccggtgcctgtggtcccctccccgagggtcgggcgggaagactgatgctgggtgtgcctgtgggtggtggaaagtttggtccctaaattatcccacaggggtgaggtggctggggcagctgggggcagctttgagcaaggatggaagggccctggaaggttggatttctgttttcctcccaattctgaatcagacgatgattctgaccacatggacagctctaaacctaaccctaatcctaacccttttactgctcccgtccctgactctaaccctatccctgatcctgaccttcagctctgtccacaatcttggccacgtgctacatcaaccccactcctagtctgaccctggctcctttaatcctgtcctcaaggcagtccccagctttatcgtttccagaagtgtgtgagatctgtgaattattcgtggaaagactgaatgaaaggatgcgaagcgtggaatatttgcagcccagggggccctccttcctgccagctctgccatttgctctctggctcctccgaagttgccagcttggcaggctgaggtgccaagaacctgtgtttgaatctgctgtgtgccactgccactctgtgaccttgagccagcctcttaatcgccctgattttctacttccacatgtgtctagcaccttcctatcacccccagggaaggggtggtgattctcagggcttccaggccactgccaaggtccccagtcccctcctcctcttcgtctttcccttctgttgctgccttgcctttcctctcccctccttcccgcttctttgggggacgttatagcatgatggtcagtagcctggactttggagtctagggggcagagctcccatcccagcaactccattgctagtaggctttatgattttggtcaagtaacttaacctctgtaagcctcagttttctcatctgtaaaatgaaggtaacagtggcaatgccgtagggttgttgtggagatgaataaagttctcagcagagtgcctggccccggggtgagcactcaaacagatcatccgattcttttctctctgggtgcctcccaggttttgaaagactcagaactttctcctgtcatgtaagcaataaagcagcatccaaatgcagccatctgctgccacttacctgacccattcttcccaagcagtcatgatggtgaaaaagcactcaggtgtgggccaggaagccaggaaatggaatgtgtatttcggtgcacgtgtgcaactcttggttgtgttgtgaagttgagatttttttttccactgaattggcagtgttttcagtgagtcattcaggtcgttagcatcttcagcggcccaggcctgtgcatcttgagatggagagagacacccaatgaagggggaggtcccaaaaggccatggggcatcaggaggaggtcaagtcaatcaccttgccggggacttagcagtctttgtgagggttgcctgaagttctgggtggacagaacccacctgcctcaggccccaggtggcagagctgggagaggggctgggcattgtgggccagggcttcttccttccattttcagccaccctgtctgtttcactgtgagaaggatgccaggggctgggtggtagaaactggggtagctcctgacaaggggagggaggcaagcaggggagtgacagggacctgggaactgagtgtggcaggtgaaatctctgaggcggggtgtgaagacgacgacctgtatctgtcgcctgagatacagcagtgaaaatggatggtgagagaagctttggctatgtggacagaggaccacactctgtctgtgccctgcccagagccctctccttcccctgctgccaaggagatagcacgatcctgccctccaaaaaccgccagtctgatgggggacacacagctcctgcccacagatgtcctcagtctgaaggggaagccttcccttggggagtccccaatttgacgtgggacacacctggacctcccagtctgatgggggagatgccatttcttcccacagacccatgagctgaggatgagggggcacaggacacatttaacaaaaacaagggctgagatgtgatgggatggaggctgcagggtctcagcagcagcttctgggactccttcctctctgcctgcccagccctgctcaccatcagatgggtggcgaggactccctccctaagaagagggctgtctcccagagacctggcccatttgcagtaatttggctttggcccaagtgggttaaaaatagtcttgtgggaggggcagtttctgccccaggattagtaagagacagccagtgagcgacagcagggagcctagtcattatctaccctctccacctctcttttcctgccctctgaagccctaacctcacgacttcccctcctctcctttagggttagacttagacacacacacacacacacacacacacacacacacacacacacgcacacacccctacgctcattcacgcctttcctcattcatcagcctggcctcacacctctcttcacactctcccatccacatgtccatcactatgggatggggacagggccctccaggcttaagaacttgagcccccttgtcctgggacaagacctcccctgggaagagatctgtgtggagtgacacctggtattttctcccagctccatcttccactaagttccccgagtcccttctggagctggaggtggggagagccaaagaaacctaaatctctgccttcagggagattcaaggctctgtccacactcagaacagtgatgaaggcagggcccaagggcatggcagagcttcccatgaggtcagggagggctcctggggccgtgcaggccacagtgggagaaagcagagagcagtggagtgatgaccttccatggttctgggttgcaagtgacctagagataaaggaagtgggtgaggttccttgccaagtctgttccagctccatgagggtgggtgcccaagatgcctgaacaggaagcagggaggaagaaagggaaggagaaagaaaaatggagggagaggctcaaatgcattatccacttactgaacatctgctgggttccaggccctggacaaggtggtgggaatataaatacaatgacgtaatcctcaccatcaagaaacttcccataaagttctagaacaaggcagcctttgagaagtgcctggtgtgactggcactcactgcaagtgtgcagtgtacagcagctgttcacaaagatctcagtgttaaggccctggtggagttgtacagcaaggaggtcctgggaggggcaaagctgaaaagagcccagaggcagctttgaggtcgagccaggtgcagtggacatggaattgggctggcttggggttaagtttatcagttagcacctccaccagccaggaaaccatcttcacttatggaacgagctattctatgcagcagggtccccaaccttttcaaaggtgaggactcttcatggatcccactcccagtacacagattataacacttttagtatgcattgcttgagaaaattcacagtgacagaagctactataaattcagtacagctttttgatgaatcggtgctttaattcatcatcacagcttttgcacagattagaaaaacattcacacatacctgtatgagctgtgttcagaccacggacagtgcctgatgcagggattcagggagcccttggaatctctctgctccctgtccctgcacttaggctgggaaccactgccctagcccagggaatgggtctcaggatgcagagggagtctccctggaagaggtggcttttgagctggaccttaaaggtagggaggatttctgcaattggggtaggagggccctgcgggtgggagggagcatggtggggccagatgctggggtagagccagttcttcctccacagctgggacggtagacccactgcccttctcgtctttcccactgccctctgacttcagggtgaatttggcgctggcctacaccgagctgacggaggagctgggccggcttcgggagttgagttccctacaggggagaatcttgaggactctgttgcaggaacaggcccggagtggcggtgagatggggcagggcagggggaggcagccgcgggacccgggaaggagcgggtagccatggcaaccatcttggtcatggggaccaccctttatttcctttcctgtggcctggagttggtgggcatgggtccgggcaagcccctggcgctccagttctgaggtcttctctctgcacctttgtccccccaccccgtcccggtttctcttccaggccagaggcactcgccgctgtcacaacgccactccccggccccccagtgcccctccccctccccgcctgcccgagcggctcccccgtgccccccgtgccagtggggggtggcgccagcgccgctgtctcgtgcccccgtgcccctcgccgcagcagcgccgctctccggcctcaccctcctgcccgtcgcccgtcccgcagcgccgctcgccggtgccgccgtcgtgccagtcccccagcccgcagcgccgttccccggtgccccccagctgcccggccccgcagccccggccaccgccgccgcccccgccgggcgagaggacgctggccgagcgcgcctacgccaagccgcccagccaccacgtgaaggccggcttccagggccgccgcagctactctgagctggcggagggcgcggcctacgcgggcgcctccccgccctggctgcaggccgaagcggccactctccccaagccccgggcctacggcagcgagctctacggccctggcaggcccctcagcccgcggcgcgccttcgagggcatccggctgcgcttcgagaagcagccgtcggaggaggacgagtgggctgtgcccaccagcccgcccagcccggaggtgggcaccatccgctgcgcctccttctgcgcgggcttccccatccccgagtcgcccgccgccaccgcctacgcccacgccgagcacgcgcagtcctggccgtccatcaacgtgagtggggcgcccgcgttccgcccaccccggaccgggccttgagattgagaccccagcgcctcaccctccgttgagggccttgcccctttcgggtgtcagcgcacaaactattcaccctccttggaccccgggccacagtctaggtcctttcacctccctttcccgtggtcttctgtcaccagaaattggggcctgccccattaagatttcgttcatttccttggataaggatatggattttggagtgagtgacagttctgcctttgattccaaactccaccgcttaatagctgtgggaccttgtgcaagttacttatcctctctgatcctcaatattctcatctgcaaaatggggacaatgattatagtatctgactaccttacagggttcttaagaagcaggcagtgagcctaaagtggtcagcacagtgcctggctcaagcacctgctattatattggctgtggtgatggtggctactgaccatagcaggccaccagccaacacaggaacaggcctgtttatccagctcccttcttcaggcctcagagcccttgcccttttctgtctgtcctgaaagacagaagcctatctcagggctcaatcatttcactgaaataatgagttccctgaatgtcagagccacccattgtaacctggaaagaccaaaatatactccaaagccagacagaaaattattttggggttgtaccttgtttaggatcgtacattgctttgagttatccgggagctgtcttagtcactctgggggcatgtctgggtcttggcttctctcattaccacagatgccctggcaagcttagcagtgactctctcatacctgcctcctggggaccctgtccctgggcaggggggtggacactgagctggtgtgggggaggacggtgctgaagaaagggtggctggacccctcctgcatgccacagccctccctgccctgggtcctgggacagggcaggctgggatgtggggaccatgggtgggggctggggaccataagtgacttccttctctctcgacagttgctgatggagacggtgggctccgacatccgcagctgccccctctgccagctgggtttccctgtcgggtacccggatgatgccctcatcaaacacattgactcccacctggagaacagcaagatctagggcaccagccccacccactggctgtttctccgtcctctcctatcacccccaaacactcactttgaatgctgcatgaatctcgtggggggtccctgcccttgcgacccccagatacctccacttgctaccgagtcaacgtgtgtgccatcttccctggtccaggcaccactcagctctggctcttcctgggaggtcagccgaggctccccccatgctcctggtttctgcttaggaggtggggacttgggctgggatggggacggcatacccctcccaggcctctccctctgcctttctgttcttaatcagggttggatccaagaaggtgtccagtgcttgggcctggggtggggggaaggtgttagaggactccaggagctcctgcacccctccccaaatgtccatctttctcagacggggctctgtctggggagcacccacaggctgcctttggggtcccagagcctgctctgtgcactgaccccagttcctccatcctgtggccagcctagggctcatggcatgggcccccactgggggagggaggcatcttgtttcttgtggttccctgcaggccagtcctgtcctcctttccctgttctgcccactctggggaatagggaggggaggagaggagaggagagggaggatcctggaggactgggaagatctagcctaaagaggcttctctgagggccagggccctacagcatgcccctacggccaggggactgtctgccagcctcccaggcccatgccctcctggtgcccctggcactgaggcacagatcgtcaaggcaggtaccccctcaacccttcttccactggagcccctgacaccacaggtgccctggagcccttgtgtgactcagcctctgttagctgggtgggtgtcatcagcccctgcctcccaggccagaacctgagaacgggcccagggtgctgtggagatcaacttcaaaagagctaaccccttcccacactccacccacccacctacatttcctctgtgaaatctacctcagagttgtaccctcagaaggacgggtaagcaggaggccagggggtccccagggctgaggtggggagccttctacggcgaaagcctgccaccccacaatgaatccaccctgctccactgcgcgcctctcccaggtctcagctctgggtggggagcagtggccgctaccgacagcgcatgtcccgctcttatccaactcttccaggccccacctccctgcacccctcccctctatagagcaggggagtgaaggggtatgtcaggcggggaaggggccaaggacacgtcattgtaccctgagcgtccccagggagtggaaatggggaagggggcctggagaggggaggcaggggcccctgtgctctctgaacaagttgaaagtccaaataaaacttacctgttccatctgtgctcaatctgtgccctctgtggctgggggcagggcgggggacgggtagagcccttggtagcaggaggtcttggaaagtgtgtctcaagggactgtgaccatgggaggtagacactgggcaagtaggggatgcatggggcacccacattcagagcggttctggaggttcagatgtgtaagtggttgcagatgacttgtggcacggcagtcattagaacagatagatacaaagcagtcacccagccctgagcaggcctcttgaatttcccacccagtaggtctggccagtcaaggttctaaagccttggggtttatcagtaacagttatgtattcatcaaatgatttctgcttgtcaggaaccaggctggggcctcaaagaggaagaacatccgtgttccatgtcctcatgggtctaagaacaggggaggggctgggttccaggctcagcagctgcctcggaagtcccacagcctgaaaagtcagagctgggtcatgaacccatgacttctgccccagccggggctgtgccctgtgtctgcaaaaagtgcttcagtgacttgttcatcaactgggtgcctttctcttccatgtggccatttttggtcaatggttcacttaaaaacaaaaaggggacaaaggcaattgctcattgaaggtgtgaggttcagctctagacccagggcaaatgtgccttcccattcagtgccaaagtccagacccccatgggaagacttcccagctgccctgggttctctgttgcagttaacaactatgctgccctctcaaagttcatccaagctcaattgtgcccgtggccaagttctgagtgccaggagaagtttgaccagccttccctatgtgacatgggttcacagccctgggaaagaaggttctggaacctttggcacatgggtgcccgtgtagtgccccctgctatttctccacctccatggaggaaggcagcacccgagtttctggacctgggtgccatttggatctttggaagcacttaggagatgtgcatgaatgaataagggtggtctagggacacatgaggcaaagagaaatcctgctgttgagaaaaggcacaaaggatggctgggaatgagagcacagaggcagggggatgacccaggtaaccactgctggtccttgagtatgtctgaaggtgggagggaacccaggtgtcctgcaacctggacattcccctgtcaccagggtgagggggagtgtggggacacagggcgcaggttctggcagcttgtctccttgatttctaggggcctgggagacggctcaggtgcagggcggaaagttgctgggggctgggagggaaggctgggaaggagagaaagctagcgtgccccagcctttcctctaatcctccccctcacccctgccaccaaaaggagaggacatggtgtggggagatggggaagggctagggagccctgccagtccttctctcaagggctgtgatcatggaaggacacttgatatgcattactctgtggagacagggaggcagggcactggggctgagaaaatgcagaggcaaaggggtctctaggctcccggaaaggggaagggggtgggaaaactgcggcaggagcaaggcggagggagggaagacctctgtcgaggctggaaagacacacgtgggggacccactcactctcccaaagccagacatgcagggttgggggaagacaacttcacagggaacaagccaccctcgggcgcatcgccacatgctgtattaaaggccagtgtcccacagtctctccggctatgccccttctccccacagggtttccccagccagtgctactaggccatggagacccctgcccctggcctgggtccccatgcaggctgtgtcaggagatcagctgagtgcagcaacagctcctttcagcagctggtggtgcatgtacgtgcacatgtgtgcgggacagtgtatgttgggagcatcggatcctaacaaggggaggggtgtgtgggtgagtcagccgtgttaatcagaaacaccttacccagctgattaggactaatgaagaatggagtgggtggggggctcactcagtgacgtctttatagagtagggaaagctggacagttcccccagtcccatctctccctctgcaaggacaagaacagaccaactttggcggccacaggaagaatagaggtcagatataaggatgaaccacaagggccgggcatcctagctgggaaggggcgggcaaggtgtctgaggcagcggccaggtaatgtggggaaaatgtgtgaaatcctccagcacctgcccctattcctgcacttcctccactttctctgttttgaccccagagacattctcagtgctcaaggctgcgccccctggttgccttctaagagccaacccacatctgctgcaccggagcccggtgagcacgtgagccatgctgttcaggagcctccagccgtgccctttacaccgcagcccaggacagaaggctctggcttgaggcacttactggtttgtgcattcactgttcatgcagatgccatgtagatgccatgtggctctgtcatgaccagggaggtctggcagggctgagggcacaaaggggctgcacagggggaacctgggcatcagctagaggccctctcgcacctgcccttccttggggcagaggcagatgcccctgagaacccagtctcagcccacagcttcacccatcctgcatgccaattcagccaagggcagagtcaccaggcgcatctcacagatgtcccattcggctatgtgagtgtgggcatgggggagggggagggctgaggggacaggatgggtgtcggccagcacctcaaacacctcctaatttgcattaccactgacacccttcttgaccaagaaaatggagccagaaataacaaggggggaggcggttcccttgagggggactttgaggttccctttccttgcctccaacactcccacggtgcaggggacaggaggtcagccccacagcagggccctgggcaggggaaatgcacctgctgtggctcatccctctccaggttgggcagacacctctttctagcttcccacttccctcaaccccaaacacctgagccctgacctttccctcttcagagccttccccactgtcttttcctctgggaaccctctccctggtgcccctctggcagcggtaatgaccccagctctacctaactggggagttgtctctgccagtgttctcagtctgtgtcctgccttccccatcagactgggcatttcccagggccaaggtctgaacctcccctgccaatctgggaccagctcagtggaccattctacatgggaaataggccacacaatagagcagaagagcttgcgatgagattctaaaaatggcatgaggtaaatccgggtccggtgtgagactgtggctgtgtggtggggcaaaggtagacccccgtccccgcaaccccagggactcccagctctgttagaggcctctgagtgtcaggcaatgggatcctggaagaaaaggatcaggaccgtggcagcgcgacacttctatcccctgccccagtgactgaggcacagactcacagacacatttgatgctcaaactgtgtggattgaatttacttctgtcccaaagaggggagggaatggtgtgacagtcacggcttggaagtgggaaatgatgggccatggagagcaggccccctctctggccaagaggtcctggcacctggcagggcgaggtggaggcagagcagaagggcctggcagggaaaccaggtcgtgagagacagtgagagagctgtgaacgcactgtgggaaggagagaacagtgaactgagaactcccccactcctccctccagagatgctattttagggggagaaaatatatgcagcgcagggggcaggggtgggggagcaggctctccatggggtcagctgggctactgctgccctcctaggcatcttctttggccctgggacacctaagcacttccttcctctctgggaaagtcttcttgttcccttgagtgtgagggtggaaagaacgagccaggagatttggagctggcctcttggtaccctgtgagggtccctggggcctcagacctagggggaagtttctatttccgttgcttccttggaaggtgggtgtggagggcagactgtgaggcaggcacggagcccggttcagcaggcctgagtacttcttgcacccaactccacacttaggcactctgcgcagatcctcccttagtgtcaagcagggggagtgaaatttggtgttagaggaggccagggcgaaaggcgcatccaggccagccgagcttccacaggtggttggacccctcccaatggggaggctgacctgctccttggcccaaggaggctgggtggagattgctattagatagaacccttgcttggcatgaagggaaattcttgcaccccagttcaaccctctgaagggccctgactcattttgggatgaaggctccaatgccctgtgggtttctgtggtggctggggacaggggtgggcagggagggtaggggatgaacaaagacttttgttttcttttttggagctgggttgtttctccacctgatccagcttcacctgaaggagagcattggctggagtgggaagaagacccaacttccagcctgggaggtgctgggcactggctgcagtagaaggaaccttcggttaaactttaggaagaacttcctgcggacacatttccaaagaagaactgagggatcctgtcccctggatgttccccacagcagatccctagagggatctgggagcttggcctggccttgggaacagaggcagagagatgaacagagagacccactgcgggtggggagtgggtggcagaaggctccaggcaggagggatgagggtgggtccaggcgtgagaacacacatgtccccaggccacagcctgcgttgagggatctgaggtggaagagtacagggaggaaaggctacctctccgcacctcctctcacctgtcctgtcttcctgcttttcttcttctggccttatgggccagggcagagagggggtgggaagaaacggctctggtccttctacccgttcctcccttgagcaagaggcctgcaggacttcttggtggggagactgagatgaaacctcatttggagcctcaaaggtcaatgcaacagtggagccaagtcccctggggtagagcagctggaggcagccaatgaggcgagaggcaggggaccatgtcactttgaagggatgcccatgccaggcctccagcccagaggtgagaaggtggccaggctgactgaataatgatcttgcccctcccctttcatggggcccttggccttgtgggtgttgcaggagccgaactctcccttccccccacagacagcaaaagcacactgtggatgggaggtgagggggaggatcaggagatggtgtgaaagaaatagttcacccctgcatgggtgagggggaagggagaggacagtgccccctggtgctggcctctgtgtgtgcccagcacacacacacaactcacatgagggatcagagagccctatgcccacctggacactccactccttcccagactggcaaatggttgtgcctgaggacagaagcagtgcagaggtgagacttcgcacagggtctcaggactccctgcgtcctctgagctcagaggtgtgtgtctctgatctcaggtgctgccctagtcccccacagtgggcacaggtgggtctccttcccacggatggtcaagcagttgcattgtcaccacaccaccctccagactcaccctgtcacatcaccccagatacacaaagcacacggaccgacccagttccatgctcatcccttccccacctaccaggcttccagggacacccacgtgcagggacacactcctcccaacacacacagccaggatcacagtgccacacaggtgtgtcccacgtgccacaggaaccgaggaatagtgcacactaacacatgcatggaaatcccacacccatatgcagacgcgtacactcctggctctgaagctgacctcattatccagtggtgtgctggcaaatgtttaacaaccagctctccaatgtaagctacctcagcactgagcactgggaagagatactcataattggctcttgagagctggcatgagccagctccagcccaccactccattatccttcatagaaatcacatgataaaacttaaaacgcagctgggcagccccaaggagggctgcacctgggcagcagtgactcatcagggcagcttttttccccgtgggagtgcctccccttccctagcttcacgcacctccccactcctgtctggaccccacttcctgcccctctcattcctcctccttcctctctgtcactcagggctgtgagctgtggctggtactcaggcacatctcgttcatcctttctctctctgccatggctgaggccaccaggtgtggagggtgacaggctcattcctaattctagtaggcttcctggaggaagaggacacggcaatgccatatgttaccaaaatgctgtagctgtctgtgcctgggctgccactgacctgtatccacatccttgagccaagtccattcctctttactttcttcttctgtctggtcatgaggacaaggggtctggtttacactgaaaattgtgagaaggggagggaattctcagcttgcagggtagcgaaggaagccgtttagagcctgttctgagagtgagcacctctggttctagccgcactctgtgaacactgtgcggtttctcagtgcttctgttcctcagtggactaggtggtttaatttccatcacggctctgacattttggcattctatatttctgagattactccaaactccactcagcaggaagcttcccttagagctaatcttgatctctttccctgtagctcatgagggaggtgacagatgtggttcgggagtatacctgggggactcaggggcctctgctcttggttgtgactcctagattattcctgccaggcacacatgtaatggggcaggggcagagagagaaggagagagagaggagggaataaggaaggaagagaaaggaaaggaagaaaagagggaaggaaagaaaaatgaaagagggaaagagaaaggaagtgaaatgatatgaaagaagaaaggaggggaaatgaaggaaaacaaaagagaaaagcaaagcaaaagggctcatcgtggatgcagaaagcagccagccttgccagtaaagtagccaggggtacatggaggggatacagaaggctgtttctggttgttgcaaaccctgtctgtgtgaatctgtaaagtgggtgcagttctgggtcttgctgagccttgggctgggtcgtgctagggcagagtgctctgggcaggggctggggtccgggagtcagcccactcctctgcccagggcctcctgccactgctttgctgctccttctgaaaacaactgaaaccgcaaaattggcttgtggtcgggtgactatcagtcactgctattcagcttggcttcctaggatgactaagggggttaaaagtccctcccattagccccccagattttcaggggagtcagaggccaagacagaacattgttttctttggaggcttttgctagggtctgagttcccaagtggcagggcctgcgcgcactgtgtctcgcaatgtctgtgggttcaggagctggggggtcaccaaggtggaggtagcagtatccctgggcttgcacacccagcagcttggagtggggaggggttggggtggaggacgcctgggtcatcaaaagagtctcctttcaacatgcctcttctggtcccagttctcggggtagctaagctgctgatgctgctagtgggactgggtatcatgggtccccttggcagggcctgggcaccagctaggcagcccagctgcttgagctgcagagagtgctggaactgcccctgctgtgctgaacatcccaggtgctgggtcctcctgattccccatggggttagaaaattcacaacctgggaggcaggagggtgggctctacagggttctgtattcccttttagtggctctgagccgtcttgctctgactcgatttctccttgagatgaaaggcttggattatctcagcactgacctttcgcgtatctgtgatgctagagaagaaagggaaaaggcaaccactttgtagacccgcaggccccctcaccacactgcccggctatccagaaggtcctgcccacatccagcgctgccctcctctctctttgtgactgcccgtggtctcagtttctctctttccctctctttctttctccctctgtcctgctcactttctgtttaggctccctcatactccccccacccctgacagcgaggtgcacgtgagttcttctgattgctgacctagaccttcctaaccactccccggctgggttcaatttccccaaggggtgagaccctccccaaactctcccacctacatccagggtctaggggtggagttttgatatctctttgagccctcaaacagatgggaaggttgagggtctgcatggcacgtctgtgacctgcccccaccaggccgagggtcctctgctgggaggaggagccagttttctgagagggaggtgccggtatcctcagagactcctgaattcccaacccttccctcccgaggtgggcgggtctcctcacagggaggcggagggaatccgcttaatacccagggatcaatgccaagcgggggagcgggacgccgatcagacatgtgactcgggaggcatgatgagcacgtgcagacccagaacgtgtgaagaacatacgtgtggaaaaagtttgtgtcactgataggcacatcagaggcatgacaccttccttccctcctccacccgccctctccctcggggggctagagggcccccctacataccaaccacacacgtgttttaagtgtgtgtgcacacgcacacatgcagccgtctggaagagcatggccggggagctgggctggaggggtggagggggaagggagaggaaggcagggtcgccccacccccaccccgtgcccgtgcctaccgagtgccgcctcccggtggctggtgaggtctctgcccccttgacttttccctgcttcgaggaaacacctccctttaggggaaagcgagatggtgaggggaaggaggggaagcactgactctcggcagaggcatgagcctgattttccagtccggggaggggcggagggagatggcactggggacgcccgggcgatggggcctgactcagagccagaaccacagggctcctccgctgtattgtcgtcggggaactagaagccaccaggtttataagaaactgcaattcatctctgccctcttccacccctctgcaagggatcaaggttagactagaagaagaacttatagcccggggcaagaaagggactctgcctcaggtgatttttttggaagccttccctgggtttcttcgagaagaagggcctgccccaagggggttagatcgtaagaagagcctggggccagggcgtggggccccccatttccctgtttgttgtcaaggaaagccccctcctcacttccagcccggaacaggagctcctaagagctgtcgacagagctactgctgaggctgcggcaggggcatacagggatccccagaatcccaggcagtctggctggcatggaggggatgaggcagctggtggctccacttggctctgctgcctcactcttggccactggctcacgtgtcccaaggtgaaaagcaagagggaggagagtgcaggttcgattagcaggagggcagagcagaaggtgtgatgaacttaggcgtgggcagaaagacggaagcactgcctggcagggcacatgcccagtggcattctcttcccattctaggagctgc

SEQ ID NO: 589 - DNA, 3432 bp, Homo sapiens
gccgcaggaggggcccgggccgacagaggcactcaccccttccccagccgccttccattgcgctcacccgggcgctgggcccagagaggaatgcggaggaaggaggcatttgtggaggccccgtgtgggccgcggcccggccctcaccatggagtccatgttcgaggacgacatcagcatcctgacgcaggaggccctggggcctagtgaggtgtggctggacagtcccggagacccctcgcttgggggcgacatgtgctccgcctcccactttgccctcatcactgcttacggagacatcaaggaacggctggggggcctggagagggagaacgccaccctccgacgccgcctcaaagtctacgagatcaagtacccactgatcagtgactttggagaggagcatggcttttctctgtatgaaatcaaggatggctccctgctggaggtggagaaggtcagcctgcagcaacggctcaaccagttccagcatgagttacagaagaacaaggagcaggaagaacagcttggagagatgatccaggcctacgagaaactctgcgtggagaagagtgacttggagacagagctgagggagatgagggccctggtggagacgcacctgcgtcagatctgtggtttggagcagcagctgcggcaacagcaaggcctccaggatgcagccttctccaacctgagcccaccgccagcccccgcccctccctgcactgatttagacctgcactacctggcactgagagggggatctggcttgagtcatgcaggctggccgggctccacacccagtgtgagtgacctggagcggcggcggctagaagaggctttggaggccgcgcagggagaggcccggggggctcagctccgggaggagcagctccaggccgagtgcgagcggctgcagggggagctgaagcagctgcaggagacccgggcccaggatctggcctccaaccagtcggagcgagacatggcgtgggtgaaaagagttggggatgatcaggtgaatttggcgctggcctacaccgagctgacggaggagctgggccggcttcgggagttgagttccctacaggggagaatcttgaggactctgttgcaggaacaggcccggagtggcggccagaggcactcgccgctgtcacaacgccactccccggccccccagtgcccctccccctccccgcctgcccgagcggctcccccgtgccccccgtgccagtggggggtggcgccagcgccgctgtctcgtgcccccgtgcccctcgccgcagcagcgccgctctccggcctcaccctcctgcccgtcgcccgtcccgcagcgccgctcgccggtgccgccgtcgtgccagtcccccagcccgcagcgccgttccccggtgccccccagctgcccggccccgcagccccggccaccgccgccgcccccgccgggcgagaggacgctggccgagcgcgcctacgccaagccgcccagccaccacgtgaaggccggcttccagggccgccgcagctactctgagctggcggagggcgcggcctacgcgggcgcctccccgccctggctgcaggccgaagcggccactctccccaagccccgggcctacggcagcgagctctacggccctggcaggcccctcagcccgcggcgcgccttcgagggcatccggctgcgcttcgagaagcagccgtcggaggaggacgagtgggctgtgcccaccagcccgcccagcccggaggtgggcaccatccgctgcgcctccttctgcgcgggcttccccatccccgagtcgcccgccgccaccgcctacgcccacgccgagcacgcgcagtcctggccgtccatcaacttgctgatggagacggtgggctccgacatccgcagctgccccctctgccagctgggtttccctgtcgggtacccggatgatgccctcatcaaacacattgactcccacctggagaacagcaagatctagggcaccagccccacccactggctgtttctccgtcctctcctatcacccccaaacactcactttgaatgctgcatgaatctcgtggggggtccctgcccttgcgacccccagatacctccacttgctaccgagtcaacgtgtgtgccatcttccctggtccaggcaccactcagctctggctcttcctgggaggtcagccgaggctccccccatgctcctggtttctgcttaggaggtggggacttgggctgggatggggacggcatacccctcccaggcctctccctctgcctttctgttcttaatcagggttggatccaagaaggtgtccagtgcttgggcctggggtggggggaaggtgttagaggactccaggagctcctgcacccctccccaaatgtccatctttctcagacggggctctgtctggggagcacccacaggctgcctttggggtcccagagcctgctctgtgcactgaccccagttcctccatcctgtggccagcctagggctcatggcatgggcccccactgggggagggaggcatcttgtttcttgtggttccctgcaggccagtcctgtcctcctttccctgttctgcccactctggggaatagggaggggaggagaggagaggagagggaggatcctggaggactgggaagatctagcctaaagaggcttctctgagggccagggccctacagcatgcccctacggccaggggactgtctgccagcctcccaggcccatgccctcctggtgcccctggcactgaggcacagatcgtcaaggcaggtaccccctcaacccttcttccactggagcccctgacaccacaggtgccctggagcccttgtgtgactcagcctctgttagctgggtgggtgtcatcagcccctgcctcccaggccagaacctgagaacgggcccagggtgctgtggagatcaacttcaaaagagctaaccccttcccacactccacccacccacctacatttcctctgtgaaatctacctcagagttgtaccctcagaaggacgggtaagcaggaggccagggggtccccagggctgaggtggggagccttctacggcgaaagcctgccaccccacaatgaatccaccctgctccactgcgcgcctctcccaggtctcagctctgggtggggagcagtggccgctaccgacagcgcatgtcccgctcttatccaactcttccaggccccacctccctgcacccctcccctctatagagcaggggagtgaaggggtatgtcaggcggggaaggggccaaggacacgtcattgtaccctgagcgtccccagggagtggaaatggggaagggggcctggagaggggaggcaggggcccctgtgctctctgaacaagttgaaagtccaaataaaacttacctgttccatctgtgctc

SEQ ID NO: 590 - protein, 455 aa, Homo sapiens
MESMFEDDISILTQEALGPSEVWLDSPGDPSLGGDMCSASHFALITAYGDIKERLGGLERENATLRRRLKVYEIKYPLISDFGEEHGFSLYEIKDGSLLEVEKVSLQQRLNQFQHELQKNKEQEEQLGEMIQAYEKLCVEKSDLETELREMRALVETHLRQICGLEQQLRQQQGLQDAAFSNLSPPPAPAPPCTDLDLHYLALRGGSGLSHAGWPGSTPSVSDLERRRLEEALEAAQGERAQLREEQLQAECERLQGELKQLQETRAQDLNQSDMAWVKRVGDDQVNLAYTELTEELGRLRELSSLQGRILRTLLQEQARSGGQRHSPLSQRHSPAPQCPSPSPPARAAPPCPPCQWGVAPAPLSRAPVPLAAAAPLSGLTLLPVARPAAPLAGAAVVPVPQPAAPFPGAPQLPGPAAPATAAAPAGREDAGRARLRQAAQPPREGRLPGPPQLL

SEQ ID NO: 591 - DNA, 4133 bp, Homo sapiens
gagagaagtacacacgcaccccctcactgcctactcctgctttcgggagcctgagtcattcctgccccctcgtagggttccccatttcccggtgcgcgggcaccctgagacagccttgggaattcgttcgcgtccccttccacctgggtccccttccccagtttgcgccccgtaacactcagccaaggacttcctgtgggtcccaggtcaggggccaaggggtcctggaccgctgccacagccccggtgcgcccgggggaggcgcttccttttcctgaactctgggatcctgcgggaggaagtggggaagttgggcgggggtgcagccgagggcgtgccgactgtggaggggccgaccctcgcgcagctctgggccttccttggggaggagctggggtgccagaggcccaggctgaggagcttggcggcgaggtatttggggaagtaaggcctggggtggagaagcgcggaggaatgggccgggcccggctgggaaggcagccctctcccatccacaggtctccctgggttctggcaggagcctgcccctgctgccggcctggcttacttgtccctacttgtcaacaccctggcagcggggtcttcacctggttccagccccttttccccaaggcggcagagaggatggggctgaggagtctgggaaggggccatgggagtccctgctgagctcggggcaggaagtttctgggttgcatcttagccggccccagggagtgcagagccagggagaggggtaccagggacaaaccctagacagacggccctgtccacggttgctcctgctctcctaggaggccccgtgtgggccgcggcccggccctcaccatggagtccatgttcgaggacgacatcagcatcctgacgcaggaggccctggggcctagtgaggtgtggctggacagtcccggagacccctcgcttgggggcgacatgtgctccgcctcccactttgccctcatcactgcttacggagacatcaaggaacggctggggggcctggagagggagaacgccaccctccgacgccgcctcaaagtctacgagatcaagtacccactgatcagtgactttggagaggagcatggcttttctctgtatgaaatcaaggatggctccctgctggaggtggagaaggtcagcctgcagcaacggctcaaccagttccagcatgagttacagaagaacaaggagcaggaagaacagcttggagagatgatccaggcctacgagaaactctgcgtggagaagagtgacttggagacagagctgagggagatgagggccctggtggagacgcacctgcgtcagatctgtggtttggagcagcagctgcggcaacagcaaggcctccaggatgcagccttctccaacctgagcccaccgccagcccccgcccctccctgcactgatttagacctgcactacctggcactgagagggggatctggcttgagtcatgcaggctggccgggctccacacccagtgtgagtgacctggagcggcggcggctagaagaggctttggaggccgcgcagggagaggcccggggggctcagctccgggaggagcagctccaggccgagtgcgagcggctgcagggggagctgaagcagctgcaggagacccgggcccaggatctggcctccaaccagtcggagcgagacatggcgtgggtgaaaagagttggggatgatcaggtgaatttggcgctggcctacaccgagctgacggaggagctgggccggcttcgggagttgagttccctacaggggagaatcttgaggactctgttgcaggaacaggcccggagtggcggccagaggcactcgccgctgtcacaacgccactccccggccccccagtgcccctccccctccccgcctgcccgagcggctcccccgtgccccccgtgccagtggggggtggcgccagcgccgctgtctcgtgcccccgtgcccctcgccgcagcagcgccgctctccggcctcaccctcctgcccgtcgcccgtcccgcagcgccgctcgccggtgccgccgtcgtgccagtcccccagcccgcagcgccgttccccggtgccccccagctgcccggccccgcagccccggccaccgccgccgcccccgccgggcgagaggacgctggccgagcgcgcctacgccaagccgcccagccaccacgtgaaggccggcttccagggccgccgcagctactctgagctggcggagggcgcggcctacgcgggcgcctccccgccctggctgcaggccgaagcggccactctccccaagccccgggcctacggcagcgagctctacggccctggcaggcccctcagcccgcggcgcgccttcgagggcatccggctgcgcttcgagaagcagccgtcggaggaggacgagtgggctgtgcccaccagcccgcccagcccggaggtgggcaccatccgctgcgcctccttctgcgcgggcttccccatccccgagtcgcccgccgccaccgcctacgcccacgccgagcacgcgcagtcctggccgtccatcaacttgctgatggagacggtgggctccgacatccgcagctgccccctctgccagctgggtttccctgtcgggtacccggatgatgccctcatcaaacacattgactcccacctggagaacagcaagatctagggcaccagccccacccactggctgtttctccgtcctctcctatcacccccaaacactcactttgaatgctgcatgaatctcgtggggggtccctgcccttgcgacccccagatacctccacttgctaccgagtcaacgtgtgtgccatcttccctggtccaggcaccactcagctctggctcttcctgggaggtcagccgaggctccccccatgctcctggtttctgcttaggaggtggggacttgggctgggatggggacggcatacccctcccaggcctctccctctgcctttctgttcttaatcagggttggatccaagaaggtgtccagtgcttgggcctggggtggggggaaggtgttagaggactccaggagctcctgcacccctccccaaatgtccatctttctcagacggggctctgtctggggagcacccacaggctgcctttggggtcccagagcctgctctgtgcactgaccccagttcctccatcctgtggccagcctagggctcatggcatgggcccccactgggggagggaggcatcttgtttcttgtggttccctgcaggccagtcctgtcctcctttccctgttctgcccactctggggaatagggaggggaggagaggagaggagagggaggatcctggaggactgggaagatctagcctaaagaggcttctctgagggccagggccctacagcatgcccctacggccaggggactgtctgccagcctcccaggcccatgccctcctggtgcccctggcactgaggcacagatcgtcaaggcaggtaccccctcaacccttcttccactggagcccctgacaccacaggtgccctggagcccttgtgtgactcagcctctgttagctgggtgggtgtcatcagcccctgcctcccaggccagaacctgagaacgggcccagggtgctgtggagatcaacttcaaaagagctaaccccttcccacactccacccacccacctacatttcctctgtgaaatctacctcagagttgtaccctcagaaggacgggtaagcaggaggccagggggtccccagggctgaggtggggagccttctacggcgaaagcctgccaccccacaatgaatccaccctgctccactgcgcgcctctcccaggtctcagctctgggtggggagcagtggccgctaccgacagcgcatgtcccgctcttatccaactcttccaggccccacctccctgcacccctcccctctatagagcaggggagtgaaggggtatgtcaggcggggaaggggccaaggacacgtcattgtaccctgagcgtccccagggagtggaaatggggaagggggcctggagaggggaggcaggggcccctgtgctctctgaacaagttgaaagtccaaataaaacttacctgttccatctgtgctc

SEQ ID NO: 592 - protein, 455 aa, Homo sapiens; identical to SEQ ID NO: 590
